United States Patent Application Publication US 2014/0057251 A1 - sequence listing, part 28

SEQ ID NO: 29356 - DNA, 5367 bp, Cannabis sativa
agcagaagagaaccaggaaatgcaatgccagttgggatgtctctccttcttgaaggcatccaaaactactgaggagtctgaaatgataaccaagtcgtcccaattgttgctagtggcccactgcagggcaatgaaccaagcaaaaacctcagctgccaccgcattctccccaacagcagactttgcctcataaaaccagtcatttgtgtcacgattccaagcgagaaatccagcaccaatctttccttcagagaacgatccatccaccatgatcaacttcctgtgtttgagttctaaattatgtatggttatagtatataaacatttaagggctcgtttattacgttatattaagtcgtattgtattgaattatattatatatcatatttttatataatactatgtaaaactttaatttatactaaaatattatatataggtgctcataaaattcaataccacgtacttatagttttatataaaaagtttgcatgaaatacaatacgataaaatactatacaatatagcgtaccaaattaaccctaaatcaaaaaaaaaatattctataaactatttattaaatgatttagaggtggaaatcagtgtcaagtttgtgtacgtttgatgcggcttaataattatttgatattgtttatatctcaactttaattggatcttgtgtttagcgggttgactatatttatgtacattacttattaaacatatcaatttgtttgactcatttgaataaagatatatgttttaataaataaaattgataaaattaaaattataagttgcaaatgtatgagtcttgtctatatcgacatggtctgagtttatattagttggttttattttgtgactagtgttatcgtattcgttttttcatggcaggaattggagtagaagagcagtatgcatgcagatatggaattggggggatgatgaggggtttttgatgtacgaggaagggacagttgatgcagaagattttgatgataggtggtgcctagtggggagatttcttacagatagatcctttgatttccaagccatgcaacataaaatggcttctctgtgaagacctgttcgtggtatgtttgttaaggatttgggacaagatagatttttgtttctattctaccatgagatggatatagaaagggtaattgaaggcagtccatggacgttcgatcaggtccctctaatttttgaaaggctaaaaactggagacaatccaagaattgtgtcccttaataagttgaatttttgggtgcaacttcatggcatgatctctgaattaaaatcggctaacatagtaaaggacattggcaactacataggacagtttgtggaatcggacccattgaactttaatggtgtttggaaggattatttaaggtttagagtttcactccgtgtggatacgctttaacggagaatgaagctccagatgaggggaggccccatgtgctatgcaacattcaaatataaagatcttacaacgttttgctttgtatgtgcagtactggcccgaggcattcagaaaggttttgtgcaaaaccttggacattctaaggcatcataaccaaaaactatggtattgaaatgaaggctgctcccaaacgaaaacaacacaccataggatcgaagtggctccgttcagacatgatggtcagagttgaggtggaaaagccggtggaggttccggtgggcttgactccacgaaatcccatatggaaagtatggaaatggaggttaatcaagagagaataaggggaggtcgtaatttggggaagagtataataggcgatgaggaggaaatcttggcaattaatgaccaaagaatgtcaactgttgacaatcgggtaaaagggggaaaattaatattgggagggaattcaaactctgggccctttgaagttagtgagggtattgaatgggtgcatggaccagaagaggaggagattgtctattgaaaatatgaatgggcctttgcaaggtaataatggtatgggccttaataaagaaaatatggacacttccattggtgatgttgaaacagcaatggtggaagatgtcgggacgaatgaagatatgggaacaatgacaaaaaactttatggaggcgaattctagtggccagacccgccaaagattatgaatgtattaagttggaattgtcgtgggcttgggaacccatggacggtttaattccttaaagagataatttctcaaaagagactccactttgtctttctctgtgaaacaaaatgtttgaagaatagagttgagtgggtgggctattctttgggctttgaaggggtttattgtgtggatgcccatggtagaagtgggggcctaactttattgtggaaggatagggagggggaaggattattggtttttctaacaaccatattgatattgtggtagaaacggatgccacaaagaaatagaggctaacgggtttatatggagaacaaaaagagatcaacgacaaagtacttggaaccttattcggacccttagcactagttctactttgccgtggtgtatcgtgggcgacctcaacaacgtcgtcaaccaagcagacaagaagggtggtcttccctacccgaggcggctattagagggtttttagcaagtgttggctgattgtgacttggtggatgtagatttgattgggcatcctttcacgtgggagcggaattggggtgaagcaaattggatagaggtccgtcttgatcgagcattggttagttcttcctgggcattaaaatttcctcttgcaaaattatttaatcttgaacattcatcatcagattactctcctattttcttggagcatgttggacagctggttgatgtgtgtaaccggaagtttaaaatttgaaaatgcatggctaaaagagcctttgtgtcaaaccattgttagtgacagttggatttcgtcttcggggctgattatttctagtaaaatccataattgtgctgagaagcttgcagtttggggtaaatcaattactggtgactttaaagggagaatcaagaattgcaaaaaggagctgaatctcttgaaaaacaaaagagatgaagcttcagtacagaggtataaggagactaagaagcatttgtttgaggtattggaatatcgagaaattttttggaagcagcattcgaagcaattctggcttaaagaaggggatcaaaatagccgttatttccatgcggctgctagtacaaggaggaaaaacaaacaacattcagaagctaaaatatgaacaaagaagatggttggattaggaatcgggtttgccagatttggtagtaagttattttacttctatttttgctgcttctgggagtaatttctaggaaattattgattgtgtcccacaaagtgtctcagaagaaatgaattgcagccttagacaaccagtcaaaaaagaagaggttaaatgtgcagtatttcaaatgcatcctgacaatagtcctggtcctgatggaatgacaccgactttcttccaaaaaatttggtccacggttggctctgatgttgttctggcagtttaaaagtttatgcaagatggtgattttgaggagggttgtaatgaagctaatgtggttttaatccctaagaaaaaacaccccgaaaacatgtctgaccttcgccccatttctctgtgtaatgttttatacaaagtaatcatgaaggttattgcaaatagaatgaagccatggatggatcgataaagtagtgtcggaatatcaaagcgcctttatacctgggatacttattatagataatataattaatgatttcctttgaggtgctccattaccttaaaaggaaaagacaggggaaggagggatatatggcgcttaaactcgatatgagtaaagcgtacgatcgcattgaatgggactacttgcaagctatccttatggagatgggttttaatgcttattgggttcggcttattctaaagtgtgtcacttgagcaaggtatatgattgttcatgctggtagagaaatgggccctgtggtgcctaggagaggtatacgccaaggggatccattgtcgccttatattttcattttgtgcactgaggggttatcacctttaattaaaaaatatgaaagcatgggtagaattcatgcggttgcaaagtggcgaatgaggctcctcgggtttctcatatgctttttgcggatgatagctatttatattgcaaggctacattggaggaagatgcttgtgttgaggagttactcaggaagtttgaaggtgcatcggggcaaaaagtgaacttggggaaatcatctatcttttttagtaccaacacaaatgagttgacaagacaacaactatgtggtttgctccaaatgaacatttggagatgataacagtaagtatttaggccttctgagtacaatgggaagaaacaagacatcggttcttggttatttgaaggagagggtgcgtaaaaaggttcaaagttgggactccaagtatctctccaaggcagggaaggaaatactaatcaaaattgttacacaagctctccccagttacgcgaagagtgtgtttgtttttattaccacttgatatataagccgtgatatggagcaacatatggccaaattttggtggaaaacatcgaaaggaaaagaatcagggatccattggctttcttgggaaaagattacacatcacaaaagtattggcggcatggggtttcgtaatcttagggagtttaatcttgctcttctagggaagcaaggttcgcgtttgcttactcggacagactttttggtgtttaaaattttttgagctagatactttgctaatggtaactacctcactgctcagttgggtaataacccaagctttgtttggcgaagtttgttggaagctcaagatttggtacgaaaaggggtgcgttggagaatcaaaaatggaagaaatatcaatgtgttgggtgagccctggttaactgataatgataatccataagtcacctctgttcatcctgtccttcacaatgctaaggttgctaacttattggctattgatggtcaaagctgggattatgagttgttggcagacttgtttgaagatagagaccgacttttacttgaatccattcctactcagttacttcaggggaatgatcactatgtatggattaatgaaacttcatgcctatactcggtataaagtgcatataagctaaccaaatcaagcttcgagcaagagggtacttcagactcaactgcattttggaaggctatgtgggcgttaaaagtactacccaaagtgaaaaatctggtgtggagagtgttgggttttgtgccct

SEQ ID NO: 29357 - DNA, 1321 bp, Cannabis sativa
  modified_base (1285)..(1296): a, c, t, g, unknown or other
attgatgggtactaaataaatttaattataaatattaattttattatatatatataactataataaaagtctcaaaaattttagtcctctaacaattaatttacaaaaaagtccctcacaattttgagggagttaaagtatttctctctcatcatatatattatatatttaagatttttttttctaagtaatctatttataaaaaaaatataaaacatgtttatttattttttaacaagattacttttctactataataatactactaattgaaaaataattattacttaaatgaaaaaatttaacattatattctcattctattaaatttataattaaagccacaaaataaacttattaaaaaaaataaataaacatacaactataaataataaaaaataataaaaaaacaacaatataattaatttaagaaaattctatgttccactctctaaaattaagtgtaccaaacactcatttcgtattttcgatatccagatagttttaattttaatttttttatatgacaatgtaaattttagtttttctaaaaatattttacaaatttttaataaattagaataatttaacatgccggaaacaaggttcaaacaatctgcttacttatgcccatttttataattttttttaaaattaattttgtattaattattattttttattagtagtattaaaaatccaaaaacatttctaagtatatttaatttttttcctaaaattttatatttacttcaacaattagatttaaacgttttcatatttatatattacttaccgaatttcttcacttaagtataaaaaataaaaatgcaagtttctcatctaaatcaacaataatatatttattgatcaaaaatacactttaggtaagagtttttttttctttttaaataaaaaatatgaaaaattatttaatttttaatttcttttttaagaggagacatgctttaatgtttgggagaaaaaaaaatattaattacaatgccacatcaaattttagatactaaaaaagaatgatagctaacaaaaattttatgtctctctaaacagaagagtttactaaatttttttaacatagtgtacagtttaaatgatataattttatagtgttgtaagttcgagagataaaatactaattatttcttaaaataattatacttaaataattttaagagtcactcacgtgcttcctcactagtttcttttaaaataaggaatgacaattatacccgcaggtgctatattatttataataatataatannnnnnnnnnnnatgtgtaataaactaataatatgta

SEQ ID NO: 29358 - DNA, 1341 bp, Cannabis sativa
  modified_base (575)..(576): a, c, t, g, unknown or other
tagaattcatattaggatattaatgaaacatacttgttcgtaaatctagatcctggtaaaatatatccaacaattactttaatgactagctcgtgggccttcgaggtgtggggaatagatctcattgggtccctacccaccaaaaaaggtggggtgaaatatgccatagtggcagtggattattacacgaaggggacagaggccgaacccatgaagaccatcattgcaaagaaagccttgtaatttgtcacaaagaacattttatgttaatatgggttgcctaaaaaatagtctcaaacaatggaatataatttgattgtgatgaattcaaagacttctgcgatcaacacagagttatcaaaaagtttctctgcggtcgcaagaccccaaacaaatggacaagcggaagctgtcaatcagatactcaaggtcaccctaaagaaaaagctcttggcctacaaaaattattggcctgaagaactaccatgtttattatgggcctacttttacttggctgaggtatttatactggcttgaggttgccttccgatatgctttcttctttgcctgtgcannctaccacaaagtctgctaaggcctggcctttgattgctgttcgggattggaaagtaatttcatactgacccagttccactgcccacttgagcaaccatccagaagcgtcccacttttgcaatatttggcgtaacggttgatcactgtccacctgaacagaatgagcctaaaaatagggccttaacttttttgttgctagaatcaggcagtaagttagtttctctatcaatgggtatcgactttcggcctcaacgagtcttttactaatgtaatagaccaggcgttgtatgtttttttcctctctaattagcacgaaactcacaacatgctccgtgacagctaagtatatcccaagttcttatccgtccagaggtttcgagagtacgggatgctttgcaagttgaatttttagctcacgaaaagctttttcacattcctctgtccactcaaattgcttattttctcgcaggatgttgaagaatggaacacacttgtttgttgattttgaaacaaatctgctgagtgcggcaatccgaccagtcaaacttttgttggactttgtgccctaaataaaacactatttcaatgtaatctttaccatttaattatcaataaagagacagaagtattttcatcacttagttagtgtgtcatatggttgatgttatcatttatatgtctatttgatttataaattcatccaaacccttatcacagtgatattcttgtttattgtgtcgccagcatagtggaaagtaatcaaga

SEQ ID NO: 29359 - DNA, 4722 bp, Cannabis sativa
  modified_base (4193)..(4200): a, c, t, g, unknown or other
gctatcaaacatgcaaaccttagtcaacagttctagcttttcttaagttcacgatcaagacatccatgaatctagtaatggtttacactaggttcaaaatggacaactatataaagaccgtgttaggtcatcatgacggattttcctctcatccatctatatgatcaaatagttttgcttgtgagaaaaggttaagttatttttgataatttcttgtgcatcataacttcgtgcaaattaatgctccttacttttaattaagaaatcacatatgtgagagaaaagatgaaacttctataataattgaataagacttaattcctaaaagatctcttgtaaactatagaaatgtttacgactaatatgaaaaattatattgtgaaaactaaggtttattaaaagagaatcttaagtgtggtatatcattgttaatatgaatgacaaaaatgtgtaaagatattgtgtgcgtttactgattagttgatacgttaaaaattcttatacaatggaaggttcaaacgaaaacacacttggtcaaaattatttgttggtctttctatgtgtgtcattttcataaatgtgaaaataaaatctgcgaaaatgaaatatagtcccacattgcttttaaagagttttttaccttaattaactgttataaatattcctcggtaaatttagttttaaacgcacacaaatatctaagagttacataacttctatttagaatattttttctaaattactcatagaggtatttataattttctagttcaagaatacattattcgcagctcggtggtgcgcctcgctatagaaatcctccagcactgagaagaggatgcaaagttattttaaggaaatcaggtgctacacaggcttctgaaaaattatcagttgggaatacatccacggtcaatttctctcttctctctctttttttaatatatttattattataattatgcttagtttaatagatatttcttttttttttcttcatcactttatttttttatttttcttttttgtaaaaaaagaaaaaaatattatattatattactttagactagagaaggagaaagagaaaaaagataagccagttacggcgcagaagcagcagatgacttctttaatttgtttttggttctcatataaccaaaaaagcattgctagcatctctaatgtggatgctttaaaaaatgtttgatgatataaatatattttgacattatttaacggatgcttaccattagagtgaaaaagaacgctaagaaagaaagtcatacaataacatactttatatcttttattttttattattttattattattttgtcgtaaaatctaattatttaatatattaaataataatataatattattttaataattttagagatgctttctattagaacattttagaacaaaacatggtaaaattgatgtgaaaaagaaataaaataaaatagtattgaggtgatgtggatgtttttgaaactcttaaaagaatacaaccattggagatgttcttaagcaccttaaggtgtccaactgatatgtcgagttgtgagtggttagtgattttctatattatttgtaataccagattgatattaaattgtgccaacaataacaatataacatcgtttatagtgtttgccaaattaacttgctcttaacatttctctaaccaaaatatgtagtaaataatacaaagcaaataacaatataataacattttaacacataatttgaaataagaaaattatttgttgttgtataactgaaaaaatcttcattcacgtgaatttctcaaccgtgtggttcataggacacagtgaaaaactcttaattttttcaagcctttgtcaactttccgtttcatcacttactgtcacacactaacgttcacttaaaccagctttgatagaattagtatcagaggatctttttaataaccaaaacaattggtagtatatttaatgtcccaacttgctccaacaaagcaaacaaaaacctataatacaaatacacacataacataataaaataagaaaactatatttattactttgtaactgaaagtcattcacatggatttctcataggacattaaaatctcccttttcgagcctttgtctccaaactctcagtttcggttattctcacacactcacgttcactcaccaagagagagtgaacacatatatatacatggaaaaataattaaaaaaaaaaagcaaaactttaaagtatgaacaagagaagaactaacttattagagaaaaaacataaaattccaaccctattttgtagcctattcactgctgttttaatgtcaatcttgattacccttctccagtagtttcctatagccacgtgatttttcattttgaaacaacacccatacatgcatgatcacaagttagtatatatataatgaatgactagaatgatagaacaacacaagtctcaccttcttatacaaggcaggacattgagtctttatgttattactagtggtgttcttgtcttctattttggttctggtatttctttcctatcaagaggtttaacactcctaaaattattctaggatttgttgccaacattgtaagactaaaatcaaactaaaagaatttttgtggttcccaacaacatttacaaatattttttttatggaaatatttacattaatatatagatgtataaatatatgaattaagatacttgtttcattgatttcaaaaaaaaaaaaaaaaaaaaaatacttgtttcatgtagttgagtaatttgttaagaaaataaattgaccccttgatatatatatatgtcccaaattccgctaatatggtcggttggttgcatttatatttggaatttagatcgtaaatagaattgtgaatactgaaaatgaaaagatcaatgctcaatgaagaaacatttttaagagaaaaaattggaaataaataaaaattaaaaagttgggtagtttgataggagaaaaaggatttgtcaaattttgtgtctaaaagtggtgaaatttatttcacaaattcaaacactataaacaacaataacatgaataagcttaattagcaaaccattttggttaactttactttttttattctgagaaaacttcaaataaatctctatttttgattccataagatttcgatcggttctaggatttcaaattctatatacacacaaatatttacaatggcaatgtaaacctcccaataaatttttatttttcttaattacatgttaacatttattaagctctatcatagtaacattcatgccattcgtaccaataatatatttactatggccaactatttttcatatattcataataagtttaaaaaatttaattcaatttatgctaattattaggataaaaaaatataatttaaaggatgagcatagatattttttttttctttttatattaagagaggggattcaaaccttctctttatatgaaaataaatgtgaaagtgaaactatatagactatatttatgacattgtaatacataaagagtttataaataacatataatattaatagtatcaatgtaagaaaaagaaaaagaaaatcatcttagttttaactcaaatatcaaatattttgaaaaaaaaaaaaacaaaaactcaaatatcaaacaaaaataaccaacgttttccaaaaaaaaaaaacaaaaacattatagagtaagtttgtaaaaaaaaatgtcataaaataaaaaaaaaaaaaaaaacaacgttggaggttcgaacaaaacccgaagcgtaacggcgaacatcgttgagtgccaactcatagtgggacctacatccacgtgtcgctatgtaaacttattttcttgtccggtctgataaaagcagcaaggacggtcggcattaacgccgtttaaacttttaacggatattttttacctcagcaaatttccaccgactgactagtgactacaaaccagtcagtagagtctcccatttaagggttttaacggcaacattgacagtaacagagccgcctttttccataaatgcccccggcatgctcccttgacgagtcgctttcaccctcgtaattactcatttccctttgtccttttacatacctgccactcttcacgatgtttttaccttcactcccataataataataacaataataannnnnnnnataataataataataatttctgttctatcttatttaaataaaataaaaataaatgttactgaacacttgaagctcccacattgttgtttccttgttgacaaaagctgaaattatttcaaagtctaaaatcataaattatagttacatagtttcttttaaatatcagttttgtgttgttatttaagtaaaatagacaaaagcaaaatgaacggctgagattaaaaggtgtgaccaatgagaagtgacggagaaggctaaggtcataatatacaaatggtcagctttcggctatgcatgagaaagatgaggaaaaaagaagcatgcaaatttgcaggaaacaaagggcgcatagtacttatcggcgtaagctagcaaatattaccggcgcagtatagcaatgtagaaaacataaagagatgagagagaagaagagcagaaatgctggtgtacagaagacacatacacatgcgcgcagtacaacccacctcataacacacattaacacaacctttgcttattttt

SEQ ID NO: 29360 - DNA, 1436 bp, Cannabis sativa
aaaaaaaaaacttcatgacaattataatacaactacaaataaactgtaaggcaaccaaaaaatggtttattgtttttactaaagaggtattttgtaaataaaaatattaaagagtaaaaataattttttttccatattgacatatttttgtaattttttttttcatattattagtttattatgtaaatttttgtaaaattaaaattatttttataaatttttaattttttataattacaccaaccatataaattacccaaacacgtgcaggtgtttttcttttaatcggaaatactttatttttaataaaaataattcaccaaattatcactataaataatatatatatattacataagtcattttataagtgaaaataaaatttatggtgattacaattagtaatatttacaatttattttttgttttaattacacattgcaatgactatattaatatgatccaaaacattacaaatatatagtatttaaaaattatttttggagcatttacatattattaatattattagtcatatataaatttaattgattacatattaatacttaaaacataataatcaatatgatgatttagtacaaatattatattttctataatatttatatgtccatagaaattaattataatattttatttattgttttattattaatataagtttcagtaaaattgtataaatatacaaaatataatacaatcttataaaattgaatacaatttaattaaaattaatttagaaattatatactttatttctaatttgttcaaatatttttttttaaaaaaaatattggcacatactttgtatttcaattttaattttgtttagtggttgaagcattttttttaagtaaaaaaaaaaaaaaaaagttagccgtacattttagacttttttaatatttttataaaaattcaaatcatcacaatatataataaaagaaaacataaattatcaaacattaactaataatttatatttatagatttattgaaaaataatattatataacatttaaccaataacttattttaaataatgaaatgttatgaattatatgacttaatttcaatccaaaacatgggattatatcaaattaaaattagaagttaattaattaatttattttacaataaaattttaatttatttagtaattacattttaactaatactatttatttgcaattactttgaaataattttatttattattaaaattagaaagacaaaaattaagtatttacattgacatcattttttttcttttcttttcttataattgtttgttttgctgccagctattatcttgtgttgtgtctttttgccgccctctttttattattattattttcttttgtcttttggtacttttgatatggtttttttttttttttgaatttttgcaaaatttt

SEQ ID NO: 29361 - DNA, 2221 bp, Cannabis sativa
ttatgtatctccccataactatttaagaaatgttctaaaacaagtaatttatatatctaaatttgagatataacaaaatataatctaatatatgtagtctaataataacatcaaagatgccatattagttcaatttgaataagattttgtctagcaaaactcataatttaagttaatcctaggaatccatcttgaaatttcttcaaattaaattcactcctacataatcttaatgtaaacttactcaattcttaaacaacaaaacatataaactaaaatgatgtaattaataacataattctcttagatgttgtacttgatttttagtgtttgtaaacaaagatcataaaaaaaaacttaaatgagtttcttgaatacaaagagaattcaaaataatttagtcaagtgtctctatgtacaaagagggagtgtagctaattaacaaaactccaatcaataatttttataaatgatttacaatgacatttgccatattactcttattataattatttttagttaatcatgaagataggcatggacaatagatcataatcacccatagaaaggaaacccctctctattaaagtctttttaattgcatttacaatcataaaacagagagcctaataaaacaaaattttgatcattttatcattaaataatatcatcatcataatcatcatatagattaatttcattatctttcgttttcatttttttatctctttttattttaaacaaaaagagagagagagagttcttattaacttctaataataatctctactttgtcataaactaaataataatttaaaaaataaaaaagatttttatgtcaagaatgggattcgaacccatgccctttcggaccagtacctgaaactggcgccttagaccaactcggccatcttgactttatgtcctctgattgcaaattataatatatgaatattgaaactaaattagagtataatagaatggtgagatgagagagagagccaaaaacacagggacaggactggagtcgagaaagtctcgaccagaccaccccttatccgcccctctacagagtctacactatacttctttggttcctttcaagaaagagagaaaaaaaaaaagatggtcttgttggcatgccctctacaactccatgtaatctcatcacgtgtttcccaaaaccactacttgggtcgtagacaactctgcttcaatggcgtctcttcttcctcctcctcctccattgatgttccttcactcagtccaatatccattcaaaggtgaagctattacttttcatttgttatgaagctcttttttttggttgtttgcttgctttgattctaaagcttttaacttttgatttggttttttcagtgttgaaaatcccacaaaggatttgagccaattgttgatgaagattactcctttcacttcaaggcgtgcattgttctccactttgtttttgtattcattttttcattcctcaaggtacttagcaggtctgctcaccacttttgagccttttactttatcttttgcttcattaaattatctctatggtgatatggtggtttaagcaaatgaattggtaattataaaagggttaatacataataaacttagataatttctagcacgaacaacagatggagaatgtgtcaactttgccgtaacacttctgggtccaaattctcatttaacaaaacagagtctaatcagtaacattggtaaaacacagagtcaaatatggtataatttggattttggttttcttaattattagccaattgaaaaaacttgcttcttagattgttatgtacggattttcagctcaagctttaggagatccaactgtaaccattgatgaagttactcctactgtcattgcttccggggaactcttccctactgaggttcatcatatcaattttattatgtttagtttcattctgatcacagcaggtgtcttattgaagttttttgtctgatgtaattgtggtgttgttgatgtgtgtaatgtacagaacagaattgtccaactctttgagaaaaacacatactctgttgtcaacatttttgatgtaacattgcgccctcaacttaatgtaactggtgcagttgaggtatttataatttggtaccaaaatgatcatcattgtctttcttctttttctttttggctaattagtatttttgctcctctgaattttgacaa

SEQ ID NO: 29362 - DNA, 6067 bp, Cannabis sativa
cttaaatgtgaaaaaatgccatagaagagtggcaaacctataaatgccatatttttctaatttttttatgaaatcccatatttgatgtaattttcacatagtatattgggtgtcttaaattatctgtttttttaaatatttatatatataaaaatgttaaagtgtaccagtaatgtgaattaagatctccaattaaaaaatagtgtctatattaaaccaatttaaatttgatacgtcaattaattttttatatattaaaaaattaaacctttaattgaattaacaaaagtaattaatacatttaatataaattaaattagttgatatgttaaacttatattggtttaacacgtgtttagtaccttcaaagtataatattactattggtgtaagtaaatttcaaattgcatataatttaatataaaaaaatttactaaatattgttaatctatcgcaaagtgtcactgatagttaattcttatttatatatatatatttatagggatatgattttgtcccgttatgtactttcacggaatgtatttcgtggtacattagatgggtctcagggtacattaaatgagtgtcaggtacgtttctactttttaaccctaattacacctagatcaatctctgtcgtccgatcaaaaaactccctcatctgacggctgtcgtacatcacggattacaattcgtaaaagtacaataacaggacaaaatcatattcctatatttatatatataaatatatatatatcctctaaagatgaaccatccattaatcattctttaccattattattcttccaccccaccaatgactcattcatatatgctttgacaaagtaaattggagtgttagctaagagagaataaagaaaaagagataaatttaatcttttctctaattaagtacaattgcaattaacatccaagccatcatgaaaatataaagatgggcaattagttttttttattattataattttcttcttttctttagcatgggaactacataacatattaagcattatatatatagtttatattatattatcaaatatacaaagatggatggtggtgatgatgaagatgatagtttatattatattagggcattatcctcactttgtgtagactctaataattggtccacttcccatctttctctaggtgcaaccttttcatgtataggtgcatactcctgcaatatcatacactcaagatatcaattccataaaaatatgtacctttaataatatcaatttgcaaaaatgcccttctagaatttttaacaaggtgtgacaaattttttttttgagagaatatcgagtttattggaagattattttgcgaaaaatatttatcaaatagagaatattcattcttttcagtcaacataactttgttgaaattcttatcgcattcgtttttatataaacttgtttattcatttttacaaaatttgaattttttgaattcatttagtataaaaatattcttaataaactttaattttttagacataaaataataaatatgatatataattggacatttatttgatagattgttgttaatataaatgatgaattcaaatattgagaaaaatattcaatagataaatagaaacaaaagaaaaaaagatttatcttgcaaaaatgcccttttagagtttttaacaaggcataacaaaattttttgaaagaatatcaagtgtatcagaagattattttgcgaaaaattatcgaatagagattattatgcgaagtagtgaattgtttttatgtattttctttacctccatcttgttgatgagatcttcagctgtattggctatgaccacaatatgtctagctgaatggtctatgaagccttcatctactcctttatcaaacaaggcaagcaagttgttatagtaaccatccacattcaacaatcccacctgttttttttttttcataaaagaaaaaaaagaaataaaactcaaatatgaaagctaataaagcaaaagtcaaaagtagtactatatatactatataaatgttgggagctacttagatagggcatcacttgtttttggcactttaaaagattatatcttaattttttatatagtatgaatttagcatattttcgagaaattttgaaaatttacagtgtcaaaacaggcatacatggaattgactatttgaatcctattttcaacatcgtaaattatttaaaattttataaaaaatatacctgatgcccattataactataaaatataatttttctatataccgaaaacaaaaaatactccttcactataagcaaaagcgatgctcttaccaaaaatttttcctatttatgtataaataatatttatcttactggtttgtcatgaatcccaagctgagaccatgttatcatctccaaaagttcttccatggttccataaccacctaataacaaaagattgtaatttttcactttatatatggtattatatacacatatatatatgtatatatagtgggtgtttcttgttgaacaaaccaggtaatgcaatgaaagcatctgcatgtttttccatttcagacttcctttgatgcatgtcagcaactgctttcaattctccaattgtatcacctgaaatctgcaaagcttgttgtagaaattttgatcattttcaattcaatctctccatatataaatataaatatagatacaacaataaaaaaaaaaaactacctcatgaggcaaaagagcagttggaataacactacagacaaagaaacaggatcagaatcagaatcagaatcagaatcagagtcggaattgttatatgaaaaaaaccaaagaaaatcatcatcatcaaaagtgttttacccaagaacatggcaacctccattaaacacagtcctagagaccaatcccattaggcctatgctccctccaccatataccaaatcaatttttctttcaacctatataaaaaaacaagatcaattctaataaagattcaatttttatgttttttttttttttttcaaatgtgatttgatatataataagacagagattattagttagtaccatctgtttaccaagctcaagagcagcatcactaaatgcagacttgtatccaactctgcttccacagtaaacacatattcttttgaactttctcttcttattatttccttttgttaaggatgtcacttctacttcttccattatttcctacaaaaaaacaaagcaatacccaataaagagatagatagatacaatcatagaagagatgttggatggtgtattaagggaagtaggaggcaacccaagcttttaagtacatacaactttatcacaagcaccttttgtctgcttaaactagtacttgttgttggagaagaccccaacaagagcctgttaggattgatcaagtatgggattggttagtagtatataattactcgagcacccttctttcttagactaacttttgggaataagttctacccaagtgattgtggctctgtttggctaagcttctactttctgtttttagctcgaagttcttcttaagaaaactactaaaattggtttttgttaaaacttactagttacccaagtactttttgagcttcagaagctcaaaagtaatttttaaaagctcagccaactaagacatgtatcaaatgatattagagtcatgcacctttaagtaggaccgacattgaagctcttcctaaaaaagctattaaaattgattttcgtttaaaagtgcttcttaaagctaaaatttgaaactcattagttacccaagtgctttagtaacttttaaaagctcaaccaaccagggcatgtattaaatgatatcagagccatgcacccttaagtgggaccgacgttgcaaaaagggcgacctatgaattaggccaccgcaaagtaggccaccataaagtgggcccctctctctctcactctcttccccttatatcagtctccttatctcttcttttcccccctctctcagtctatcttgtttaactatttatgagactttggtcaataatagagttagctcatatgctcattgtctttccatttgtgtccatttgattctgaccctttccttgctttttatcattttgttgtcttttcctttctctcatactgaaaaaaatttctcttttttaaatccattatgtaataaagtagtggtcctcctcatccttaaatgagccaccataaagaaaccaataacaaatagatgataaattgtatttatataatcccaatcaaaattacagtcaaggcctaaaacttgtatatgcatatgaattcattcaattatacaagataaaagtacctatattattggtggggaaaacaaagagctacaaaacaagaatttatgaaaacattattgtacttttcttctcaagtgtcaatgtcattgttttgttttaggggccaatcataaggttctcttgtacctttaaatcatcttttaatcaacaatcttaatactacctcttatgcaatctaattataagcttaacaatctgtttatttagttatactaaagaaataacctcccaaatcttccatgtttaaataccaaagaatacattttttctagattattatagagccaattatctacaaccattttaaacatcttattgttggtcatcttgattagataacacacatatataaacgagtgtatcgatgcacctctttgtgttttcaattttgagatagttttaatcttaacagtgtacatcgtaattatctaagacattctgtaaattttcaaaaattccaaaataattaaatgtgttgaaaacaaagttcaaacagttttaatcttaacagtggacatcataattatttaaaacactctgcaaatttttaagaatttcagaataattaaacgtgttgaaaacaaggttcacacagtttgttgcatgagtactttttttattttatacgtatgtgaaataaattatttgaattctaatttttatattgtaaattatttcgaatttcctaaaaattttacccaacatcttaaataactacacattatacttcatatatataaatatataaaaattaaaattataactgttgagatattgaaatacaaaaagagtgtattagtacacctattttttgttttatatactatatgatttcattttctattctaaaattttgagaggactaaattctcttacctaaagctttgcacttttatatttttcaaagattgcattttgatcttgagtacaataaagaggcatttctaaaacgtgcctgccactgccactgccactgccaccacccctaaaagtttttttgtttttttacttattttatgcaaaccatttcaattcactagtcacttccaaacccaaatacataaataaaaagatgaaattataaatgaagagttttttcggctaaacaatttcaattgttgttttatttgtatttatctcttcaattttaaatttttgcggtaaaattctctaaactactgaattgtttacaaatttaaagtgttatttatttttcacaattaattgtcaatataaacggtttatgtatatatttttgtacacgtagtacgtttatattagtacacctaatattattatttaaaaaatttaaaaaaattcaaatttcataatactttttattttttaaatattttattttttatttttctaattttatttaattttcaaatgaattttaaaaatagtttttaaataataatattaagtgtaccaatataaacgtagcatgtgcacaagaatatacacataaacaattcatagtgacagttaaccgaataacaccttaaatttgctaccgataaagtagtttgaaggattttaccgccaaaatttgaacttagaaggttaaatgcaagtgaaacaacagttggaaagatttagccgctaaaaactccaaattttatcagataaaggtaatcaggtactcttatgctgttttttttttttttttgctaattaggatttttgccccctaaactttgacatgt

SEQ ID NO: 29363 - DNA, 1888 bp, Cannabis sativa
atattttaatataataatttttagggagtatcgttagctaatcgcaacgcgacatgtcgagaaggtggtaggcaccactggtgcctaatagcaatactccaaaataaatttatcaaagaatctttatttatttcggtattaaaaaataataatttaattttttcgttgtatttatttagaacatctttaaaaaaattcaaaaatattttaacatgtcgaaaataggatcaaaacagtctatttcgcatgcgtataaaataaaagagtctcgagtgtaacagactgtttaaactatgttttcggttaatttttttttaatctctcaaaattttaaagaatgtcttaaataactataaaataaacaaccattaaattaccgtgaaaaattctctcaaatgtcaaaacagatagagagtgcattggtaaatccttttaaggggtgtattgtaaaaatattcttaaattttttacgataaaaattctttttgttacttatgtatttttataagtatcgtgaacaattttttatattagtttttattacagaaaagaacggcttaattaaagcctcaagaataaacccaatgggagaaatttcaagagaaaaaagagtgttagacaatatcattaatcataagagtctatttgtaaagcagcagcaatacaatcagagcgatcaggcaaccaaatataatgatcattcaaagacagtgttaacttcgctaaattgtgagccacactattattaattctagaacagtacataaaaaaatattaataaaatgattacaataagtaaaaatatctttgattatacaatctaagtaaggctgatcaacctaggcaaggatatgagtgtatttttgtttgcttgaaaaaaaaaaattttgtgatgcagaatctttctccatcccttcgataacttagataatattgggactttatacctcattctctcttaatttggtcatcgacatgcaccttgagggttcccttcatattaaagatgatattgccacacaaccagctaacctcccaaaagatcaaatataatcccttccatgaaaagatatggtaagattcgaactcttgactcaaataaagaaagttacctttattgcatccttactactacaccacagaacacgcgattctaaaattgagtgtattgatgtatataatgatatacattattttaagatattctataaattttttaataatttaccatacaaaatatagagttttaatagtatgtttcatatgtgtatataatacggactatttaaattttattttaatattaaaaattattttaaatttctcaaaaaatttaacgaatatcttaaatatttacagtgtatatataataaaattatagggacatgattttgtcctgtgattgtactttcacggaatgtattccgcgatgtacgacagtcgttagatgagggagttatttgatctgagggttgagattgatctaggagtaattagggttaaaaaaatagtaacgtaccctgatattcatctaatgtaccctgacccatctaatgtaccacgtaatacattccgtgaaagtatatcacgggacaaaatcgtgtccctatatcgaaaatataaatgaatgttcaatacacttattttttaaaggtacctcctataattttcatttaattcttttttcattatcaaaggaaatattattattattagtttgagcaacgcattattattaaatactaattgaatccaatattattattactagatttaagatagtgttaataattttttataataattattagggattttttcatttttacactttaaaataattttctttgcatttttacgaaattatacatagaaactcctattgcaa

SEQ ID NO: 29364 - DNA, 2500 bp, Cannabis sativa
tcccaggtggcttcctcctccttattgtacctccagagtaccttgaccaaagctatggtcttgttctgaagcactttatcctttttgtctaaaatttggactggttgctttttgtacgaaaaatccagctgaagttctaggttttcataactcagcatatgagtgggattcgaaacgtattttcataacatagagacttgaaattcactatggacttctgaaagtgctggaggcaatggctagatggtatgcgaccaatccaaccttttcaaggatctcaaaaggtcctctaaacctaggacataacttgccctttttcccaaaacgtttaattcccttcatcgatcgaagacactcataggaatacatgatctcctacctaaaattctacgtttctgcgttttggatcagcataactcttttgcataatatgacaggcaagcattctggcctttatcttttctatagcctcattagtctgttgcactgattcaggacctaaatattctggcctttatcttttctatagcctcattagtctgttgcactaattcaggacctaaatatttcctttctttagttttatcacagtgaattggcgatttgcacttccttccataaaaaatctcatagggagccatcgctatggaactctgatagctgttgttgtatgaaaattctattagtggtaggtacttgctccaggagccttcaaaatccatcacacaatctcacaacatatctttaggtatttgaattgtcctctcagattgtccattagtttgaagatggaaagttgtgctaaacttcatcttggtacccatggttcgctggaaactttgccaaaattttaaggtaaccttccgatctctgtccgatgtaatggactttggagccccatgtaacctcaatatttatttcacataatttctcatactgatccattataaaagttgttttcactggtagaaatatatgtggacttagtaaatcaatccaccacaacccaaatagaataaaaaatccccatggttctaggtaacccaaccacaaaatccattgtggcatcctcctatttgcactcaagaagagtcagaggctacaacaaccctgtaggtctctgatgttcagccttaatctactgacaagtcaagcatcgggataaaaattacaccatatctttcttcatcctgcaccaccagtagaagggttttaaatctggatacattttcgtagtgccaggatgcaatgaataaggaatggtataagctcctttgagaatctcacttctaagccctacactgtttggtacacacactcttgttttgaacaatagcatcccattacttgacactgtaaagtctttagcttgactagctaaaaccttttctcggatcttcaccagttcagaatcagttaactgagaaactttaattttgtctaacagatcgaattgtaatgtcaaattattaagttttcctataagaaactcaatacctgatctgaccatatcatttgctagctggggtgaaatcaaaatcatgttggatacatgcccgggacccttcctactaagtgcatctgccaccatattggccttctcgggatggtaaaggatttcacaatcgtaatccttgaccagctccaaccaccacctctgtctcatattcaaatctttcttggtaaagaaatatttgaggctcttgtgatcggtataaatctcacacttttctctgtagagataattttgccaaatttgcaaagcaaaaactaccgcgacaagttctaaatcgtgagttgggtatcactattcatattcctttaactgactagaggcataagcgattactctatcagcttgcatctaaacacatcccagaccctgtctgtatgtttcacagtacaccaagaacttctctttatccgatggcaaggctaagaccggagctcaaatcaacggttgtttaagctcttgaaagcttgcttcacacttgtctatccacaaaacctgttgattctttttattgagttcggccaagggtgttgagatcttagaaaatacctcaacaacctaacgatcataactcgccaaacctagaaaacttctgactttagtaactatcttcggtcttggccaattcttgacgaattcaatcttccctaaatcaaccttgatcccattgataatgtgttcgagaaaagacacttgggatagccaaaattcatgctccacttctgattagagtatacaaggatgtcgtcgataaataatatgacacatatattgagaaaatccttgaataccctattcatcatatccataaaggttgccaaagcattggttagtccaaaagacataaaccaaaagttgatagtgcctatacctagtgcaaaaagtagtcttagaatgtccttctctcgaattctcaattgataatagcctggtaggagattaatcttagagaagatcatttttccctaaatctaatcgaacaggtcg

SEQ ID NO: 29365 - DNA, 2889 bp, Cannabis sativa
ttacgctcattgtcggttgaatttgcagtgaacatttaaaaagaaaaaaagaaacaaaaaaaaaaaaaaaaaaaaaaacctcccaattactcagccttaacatttctttcgtgattgttccatgaggataaaattttagagaaagcccagaagcacgaattaacaagcataattttagtaagttctccatttttagcataagatttctttttttggtacttagaatcttgttagcagtgctttaacaaccctagtcattcttccatcgtttttttttttttgagagctaaaactaattgatttcattattgaacggtttggtcatggtgtagtcgatctttccgtctgaggttttgaaatggtttgttatgtactgtgtttttttttttgaaacattcatgataattagtttcagttgttgcatgcattgtaaattgtttctttgattttcaattctgcttttgactccaccaccatgtattgagaaatttgttcatctctaaagatttttccttttatattgtgtttactacctttgactttattctatctatttgattaaaagagtgatactttttaaataaaagattttggatcagtagtaacattatcctttggagttgcatttgatgattctatactgaggacttgaaatcttttcttgcaagtgaccctttttggattccttttgtgatatgtcttgcaaccctctagtgcgttgtacgaggcagtaagggcatgattgagacacaactaagtttcttcttctctttatcagaaagaaagtatgttctgaaatcgatcaatatattcaccacaaaacacgaaaaagatcactatcttgttttagtaatgacattagaaaattaaatcaattgaatactacaaacaaatacacaagtaaaactcaaatacatagatttaactaaaattgtcgctttatttcaagcctgttcgggagtgattttattttttgtttttttaaattttacttaacaaaatcttgtactttcttcatggtttttgattaattaatcaaaaaattgattaatagttcccgaacaactccttcattaatttaataaaattcatctgagattattacaattctctcactcttactctttttacagttctaaagagaatttaatcacacgatttttacaaaaaaaaaaaaaaaagagaatttacatgaaatcaatgcttagccagcttagagttaaaggtttctacagaagtttaactattaactaccgaaacataattgggaacctaactaacaccctagctaacttggaccaacatgcaccaataggtataagacttgatgactggaccaactaattgacaaatctccaccttggtttagaatcgagtctggtgtggtgatacttttgagtagtgagatcaatctcaatctccgtatagatggatcaaattcaaccaatgaaaaaacatactacttgacactattttggtgatcatatcagaatgattatgatcaattgaaaccttcttgatgatcactgatccatttgaaattacttctcggacaaagtgcaccttgatgtctacatgctttgtcctttcatgatggacatgatttttgggaaggtagattgcactttggttatcatagttgacagtgatggcattcttttgcatcttcaactctcgagttattttcttctaaccataaagcttctcttacatattttgtgagtgcaatgtactctgcttcagttattgacaacgttacaactttctgcaaattagctttccaagtgatagtagttcgaaaagcagtgagcacatagcctatgagtgattttcaaatgtagcatgcatagtttgaatccacaaagcctttaatttcagcatgcctatttcttcctttagctccaccatagactaaacaccttccaagtgaccctctactatatcttagaatccactttagtgcctgccaatgagcctttccacgatttgccataaatctacttaccaaattgactgcatatgctatattaggccaagtacataccattgcatacatcaaagagccaactgcatttgtatatggtacactctccatgtatttctattcatcacgagttttaggtgcttagtttttactcaatttgaactattgaaataggggagtgacaacgagtttaacatttgacattttaaacctattcaagaccttcttgagatactcctcctaagataaaagcaatttcctcttatgtctatctcttttaatttctatcccaagaattttcttagcagcatctaaatccttcatctcaaactccttactaagttctttcttgaattttgccacttctaacttgcaattgcaagttattaggatattatcaacacacaatagcaatatgacaaagtcactgttaggcaggattttaaagtacacacaaatatcaaacttacttcttgtgaacttgatttttgttagaacttattttactagatctaaatttactaatatatgtatattacttatcacttaagtaatctaacattaaaatatgaaaatcataaaaagatcaaataacaccttaaaatttaggattacttacattaatggtagcaaaatacaatgacttcttatgttcagtactctaactctcgaattctttttgtaaaagagtattaccaagtattgaacttggatctccttccttaacctgaaaagtgatagtttttcataatcttctcaacatgagattagtgtggtctgatacttaattcacgtttggaacacattttgaaagtgagaaagactagcaatttcgaaaagggaaatttgattttatatacttaaaaaataaaaaaaaatttattattaaaccaaaaacttaaatc

SEQ ID NO: 29366 - DNA, 1393 bp, Cannabis sativa
cttctccggtaatgcggcagaggaggcggtggaggcccacgccactgactgttgtgactgtctctgacccgacccgacccgaacccgggcccatttcttcgacccggcgactggttggatctgactactcctcttcccaaatctccagaaaacgatcggtgataattcttcaacggcgaagagtgtctgtaaaccctagctccggtgacttcgtcgtcttcgtctctggtcagagtcgtggtggctgagacgctctcgctctcctcctcttcttctccgaccgagatctcttcttcttcttcttcctcgtggtaaaacggcggcgttttgtggatcttgattttgtcttcgtctgttaatttaacaatgggtaagggtttgggattagggatgttgttgttgttgttcttctttagttctggttcttgttctatgagttttggtttggggtttggggtttcggagaggacttctttgacagtttcttccggtggtggtggtggtggctcggttgatcggtcgtcggaatttggaatctgagatgatgagtcgccatttttcccggttgtactagcacagcaacccattagaacggtgtcgtttttggtttgaaaggttaaaagagcatttgtgttatgagtaaaacggtgtcgtttttgtggtggaggaattagtaatggaacgagagaaagaagagagtgagtgagtgaggtctctctttcggttatgaagagagagtagtgagtcaatgtgtgtgtatatatataaatatttatatatagatatgcatttattattgtatttattattatagcatttttttacatctcacaactactcatggtcacggctatgaacaaatatataacctatacatatacccctatagaaatactaagaggcacatttaatttgacataattatcacctataattataattataagtgtattttaatataataatatatataaaagaaaattactaaattgtgttgttagtatctagttttttttttagtgtcacagtatattgttgttgggtaagtagtctttacgattaatatagcggcattctctaaaagttatttttttaagttacataggatctgatacttaattatactaacagaagtatgacactaatgagggtgttagacactaataatatcttttaataattctctatatataatagagataatatgacaaatgctaaaatatattgatagtatttaatactcttttaactatataatttatatgaatattgctaattaattagaagacactatcaaatcttatataatttaatataataattaatcacaatacactaactaaaatagtaatactcaaacagtcatacctcaaacataataataataataata

SEQ ID NO: 29367 - DNA, 2301 bp, Cannabis sativa
gtatttttgtaaaaaaatggcaaaagttagtataacatgtaaatttccctatattttatttactttggtatttttttaaaaaaaaaaaaaaaaattaatagtgcatgtggtagaattgtagttacgtaagatcaatcactcataaatttttttaaaaaattaatagtactaaaaataagattcaaaacatttgtttaattaagcatgtacttttaaactttttttaaattaacaattaatcttaaataactacaaaacaatacacaattaagaagaaaaaaaaaataactaaagggggcatattttttagtattattatttttatatattttaatatttgcccccacctaataaaaaatttcattttttttcatcatatattgtcatttttgttcttatattagagttagttagttaattttctgttaagtttgttatcacttagtccgttagttagttcaaccatcaactatattttaactctataaaaacattgctcttgtaccattttacacatagttcaatcaatacaaaattgtttttgttttactttgtttttcgtttctttcctcctaatacgatattagatgttataatccaagaattatagaatccacaaacttccactgcctacaataatggtgggcacgagagccaattcctttgctacctccattgatctcaataccaaatccagtggacgatgctcttttgaattctgctcctccagcatctcaaaactcggcaaagattcctcctcgagtccctgttccagctgctgctattcaccatgtccatggagatcgaccagcttatgaagatgtacgaagtccctaccacctcaacactgtagatcatccaggactagttcttgttactccggtcttaacagatcgaaactttcaactatggactcgagacttcaagctttccataggtgcacgtagcaaccttttcttgatggtacacttcttaaacctcctcccaatgatcctttatttaattcttggattcgttgtaatcaaatggtccaatcttggatccttcactcggtttctcccgagatcaaaagcagtatcatgtatctagatactgctagagacatgtggacagaactcaacaataggttcaatcaaggtaatagtccacagattttcgaatttaatgaaaatcttacttttcttcatcaaggtaatgattctgtcagtacttattttactaaactgactgctatttgggatgagattacctaacttcttccaagagtaccctgtacttgtgttgctgttgccgtaagttaataataccacaaccatgatcaagtgctacaacttcttaagggtctcaataagtcctatcatgttgtacgagattaggtattacttcttgacccatgtctccctcagaataaagtgttttccatgattatacatcaagaatgccaaagaacgcttggcaatcaaaacattaaccccattgcagcagctacatcttcttctgcactcaatcgcatgtattaaaaaattaatctacatataatttttttttttcagagagagatataattaatatgaactaatataatttatcaaaaaaaattatattagttcaaaaaaaattattaactaatatgtcaaaaatatcaaaattctaaacttattatgtttatcaccatctcttccctcacataataaagtaagcacttaccgatttttattttatttattttatgtacaaaaccagcttattagaaataatattaatgatgattataagtgagatacggtaatgacatcaactataaatatagtggttactacaaatgaaatacggtgatgatagttgttttaaaattatataatgaattttctataaatttattatcttcattctatttcaaatttctattttgtgttagaaatatttagtttctaattttttttcactataatgtatatttaaaaaaaattacttgaatttttatttatataaaaaattatatggtaatttttttttttaattctttagagttttttatgtagatttattattattttttactaagtgtacaattttttttaaaaaaaatataaataaaaataaatttaaattatttaatactaattttattgttgaattaatatttatataattatttaacaacccacaacccagtcatacttagcaaaaaggataaaagttgaattggtaaatttattaaatatagagtcccaatcatgaacttctagaagatggaaagcatgttattagaccagcctaaccaatttatgggttgggtag

SEQ ID NO: 29368 - DNA, 1506 bp, Cannabis sativa
ttcattctaccacttagctaaacttagggaagagctacccacattttcccacttaagttccaatgctaaatcatagtcagttttgatactatagcatccattagtattataatgccaacatcatcgatctctatacccactgctacttagagggatgctcaaaattacttcaatatccataggtagaaaaggcatattattaagcttagccaaatcccaaaagcctaactcagacataaactcactcactaaggtaatcctatcatttttgttctaatggagtaacgatcatggtcttggcaaccaagggtcacgaaaagcacacccacccacattacttccatcacctatacgaagccttttagataaaactaaaataaagaatttttaggtagttttgtaaacttatatactctaggagtttatattatttatgattattgttttatagtgtttttgagtattccaagtggtgattgaggaattgaagtcaaagtcatgtggcactacaataaaaatggggagtattcggtaaggagtggctacaagacaattgctaccatgagagaggaattgattcagtctgattctacaaaaagacggagaaatggtagacttctttgtggcgtcgtaaatatttgccaaaaattaaacattttatttagaaagtttgtaataattgacttcatacgaatcatgctttatccaaaagagatttggttatggatctaaattgtcattacattcaaacaatcctacttatatataaatatagtcctaatgcattctttatggaaaatttataaggtatattaacttttgttatttttttagaaaaatattgtttggtattttttacttttgtttactgtgtttttttataggtttcatattgcagtatactgtgttaagttttcattggtgttctactagtatttttaagttgttctgctactgttttgagttgttctgttttgtgttctactgatgttttataaaaatacagtatttttgaaaacttttaggttttacaatatttttgtaaaaattaatctaaatttcagtatttttgtaagtttctttttttttttggaaatttttaaaaatatttcttttttatgttttatttgtaatcttactgtctaaatttttaattacaaaaatactctaataaagttttaaaattacaaaaataaactttgttcagcaaaaaattaaaaaaaaaaataactaaaaaataatgtgaaatcaaccacacgacgactataaatcaactaaaaaaatctcatgacaactataattaaactataaaataactaaaaaatagtttattattgaagagatatttttcttaataaaaaaatttaaagagtaaaaatgaaaaaatttataaattgatgtatttttgaaacattttcaaatttttagtctattaatttttttttatcattataacaatacttaatttttatattatcgtctaataataaatagattgcataaaaa

SEQ ID NO: 29369 - DNA, 1253 bp, Cannabis sativa
taataataataatgataaatatttctttaatattaaaattgatggtaataaattatacttaattataattattttttatacgattgtgagtaactattattgaaaaaaaaaaatataaaagtaattaaaattaaaaaatacacatatatttagtattgagtcgagaaagattttccttgctagaagcagaaagagaaattcaaagagagggaaaaccaatccctcgatagaaggagtgagactatactcttatctatgaaagacttgtttagaccaagcccgggcgactatttaccaaaaacacaggtctctgcaaagtcaaactcatcaactgtaataaaaatacaaaattatggaacacgaatttaagtccgtataaaaatagattagtatttttaagaaaaatgggctgacctaaataatgcacaatacaaattcgagcatgacacgaaattattagatttgtgaatcatatcaagcctaccttataaaattattatacagtacgatacgactcaacttatattttttatgacgctgtatgactcgtactttaaaaaattctaaaaatataaactaaactaggcatggacatttgtccaagcttagagctatgattgcaactaaaaatgaactcttcctactttttaccccttttgactgaacagatgatttttttctctttttgactgaacagaggattgcacggtaaaataaaaaaatattacttttttttttttttgaagacaaggtatggaagaataaaacctcgaatgcctcttttattgttgctttctccacttgctatcttgaacaatggaattcggctcaagctccatatttggagacatcacggacaggtttaatggccggggatgggttagaccgatggtgcgcacctaatgcaaatgaaatcaaggttaatgtggatgcttcaatctttgagggtagtcatgcatatggctacggaatcgtggctcggaatgagcatggttttatgattgagggactttctcgtctttgtcatggtattgtacgtccggatagcggaggcaattggagttcgtgaggcccttagttggattaaggacaaacgatggcaacaagtggtccttgaaacagactgtctggtggtggtacaagctattcgtaatccaactcatatgatctctttatttggtgatgtaattaaagagtgtcaaaacttgcttgtaaatttaaggggtgtcactatttcttttgtaaaacggtca

SEQ ID NO: 29370 - DNA, 1604 bp, Cannabis sativa
ttgaaattatgacttccaagccttgaaaatcaaagactctccaggaccctaatgtcaccttcgaggttgaactaatagagctgaaagtgcgagccatcggagattacgtaggtaccgttttaaggacctgtggcatcgaatacaagagaaactttcgagttcgatcagtggttactgaagaatttagttgttgcccaccagaatgacttactcacgaagcatctgaggggaccagtggggaggccagcacgagtggctcgacggggataggcgcttggagcctcgaacacatcagggctggagcaatcatccccctgtgggactactttaaggactttctcaaccatctcgaaatttccccattccagttggttcctatctcatacaggatcctcgcaagtttgaaggtcctgtacaaaattttaaactggaagttccctacacctttggaaatagaatacctcaacccggtgaaggcagtccctgcaaggaagaatgttgcagggggtttttattatctcgggactcacacaggagatcgtaagatcattgttgtattaccatataagacccccttcaaagaggattttttctagacaattggtctttctcgcatcaaaacaaccaccttctgcataatccgtaagtgattgcttacttaagacttggttaaattattccatgtctttaattctggttttgttgactttaattttgcttttgttttcgaaacctgtctcaaaaagaccaacacctactcccgagatggttgagcgatgtaggctcttgttgggtcttccattcggtcttcgatcggttgagttccttttgagcgaggtcaacctgaggtctgtgggtctccttactgagaagaagtttacttgtgattacaaatatcccaagtattcttcttggcagcaggttccggtcccagccaatgaggaatctcaggattatgtggctcgcatacattacctccagaatggagtccctcgagaagtcgaagaaggagcatcctgaggtaatcaatgtggttggtcacccacagtgcttaaggccgagcgcactactttagtgtcttttcgggatagccgttataatttctacacttggaatcccctccttatagatcgcattgcacataggtttgatagttggtacccagacttctacgtccaaattagatgtactaactcgtattatgggatagccgagcagtatgggaccatgttggatagggcaggtcatatagatgcgagctgggatttagaaccaattaactcctatgatatattgaggatcacaggatgtagagactttagtgaatattatagtcctcctacctcgtcttcttatgattatggtaaatcccttaggcgggaaattatgtccaaactttccctttttcttgctttcaaacaatgctaacacgttgttttgtctcgtagaaatgaatctcgaagacctcttccaatcttcaggcaagaagggaaagaaaaggttgactacctcggagacttcatcagatgtcaacgtggagcctctcaaaaggcccaggaagataattgccaacaagaagtgagcctcccaggctattgatctcg

SEQ ID NO: 29371 - DNA, 1662 bp, Cannabis sativa
cggctgtggtgtgggccttgagtcgtgtaggaaagaatcccaccttgggaaaagttataattggatgtggggagagtgagtgagaacatttcaaagggtttcactaatttgagtaggaggagtgataccgccagcttcatgttacattctcttagtcaacatctatgtccgaaaatacatgttggaatattttttttctttctctgggattcgttatgcttacaacatcacccctgtagtaaaaaatttcgaataatttatatagctgaaaatacgtttgaagttttttgaacgcgcgtagtaaactgaaaaatcaagaactctattttcggtactgtaaattattcagaattgtaataagaggttataattaacactccttttcgagtagtgtagattttattattttgagtgcatcaacttatttacactaagtaaaatatattttattatttattaaaaatagctaatttattaaaataagtagtaagaattgtatatgaatattaagaaaaaattataatattaaaataatttagtaaattaaatatttgttaaattaattaaacactaaatatttttatttaaaaaaaatcatattaaaattctatagttgaatcaaatatatacaatctttttcaaaatcatgagcaaaataaaattatgttttaaaagctcactaattagcatctcaaaattctaaaaataatattgatattcgtgaagatccataagtaatcaatttactttattttttttattatttttataacttaatgttatattgtttttattttattagtattaatattttttttatagttattttgtattttttaaatatgtgagtgttttcttttttaaaaaatatgttagtattttgaatcaatattatttttgtgataaattgaattgagatctaaaatgtaaaattatattttaaaataaaataaaataaaataagagttagaattaaaaaaattgtatatcaatttcgtatatatttaaaatttaatattactaatagtataaaattcagtacacatcaatttaatgtaaatattgtgtactattaaagtaaaattgtgtgaacatttcacatctaatttagtaaaattgtatacgagtgagtaagttagaagaggagaaaaggtgggaagaaacatatgcttaaggggttgatgcatgtgcagaagcatttaaagccttaaaagttgagacagacccaactcatatttttataaaagttaaaacccataaactcaataaataaataatcgccactgtcatcattcttgttctcttctggatatggaaatttatacagcgggacccgcctctaatggggtgggattttccgtcttggtggttaatggggcggtcgtggtgggagacaatttcaatacccgaagcgggaatggggtgggagcgaggatactactatccgcaccatatccgaccccgatataaatatatataattttctttttattcttaatatatatatatatatagtatatatatgattgatatcataatcaaaattatatatctcatatggttaaattataaaaatctaatgacgataatgaactgatgatcattgtggattacatgtgtaaaaatattttcttctcgattcttaatttcatctttgtttac

SEQ ID NO: 29372 - DNA, 1742 bp, Cannabis sativa
gccagccattgttacctggtgaccagagggacttagcaagcacatgaaaaagtaaaagattagctgagtctttaaattttccggcttttcccaatagatccaccctgcgtaatgtatcacctctaagcttggcaatatttgcagcttctatgaaatattccttttcttcttccaacagcaaaagttcatccaagcagcacaatggattcaagaaattccgaattgaatccatagaattaaattctttaacaaatttcatcatggacctcttatctttgatctcaaaataatataaagcacatttctccaaaaacatttgttcaattttgtcaatttcatcgcttctctctgcagaactgcactcatttgttgtattttgtttccaacatttaatgtaattcaaacccatctcaaataattttcctttggaacaagcagtaagacattctgagatgtaattcccttttgcataaacatcagcagcaagctcatggcaccctgccagagaaaagcattccccagcctttcgaagctcagattcaccacacttctctaaataaatacgacctggccaaagaaaccaaatcataagaaactactaaaattgcaaaattgccaaagaaaaccaaactattagtatactgatttgatatttttatttatacctgctttttcatactctccaagatcaaataaacatctcgcagcagactcagccttaccaatagcttcaaatatttcggcagcttccttgaggatagaattagcttcatcaggatttgaaatgcgcaaacgataagctgtagccttgagtccagaagctttagataatccctccctatatgtatcaccagctctttcaaagcacattgtggccatttcatagttgtgttcatgaaaaagctgtggataaaaaaaaggattaaagatacaatcaataagaattttcaactttctccaaggggccagagactgatagaatcaataaacaaaaaactataaataggtattcattatttcattaaaaataagccaaaaccttaatgccccttgatctccactcctcaggactgcttgtgacttgcatggtctgtgcaagcgaatcatcaagcggtttagattgcacaagaaacttctttctccaatagtcaaagataggttcagcaatttccgagctttcacatatccacaacctttgccttgtacgtgtgacagcaacatataactgtttgagttcagagcatagaatattatgtttggactcggaaaactttgggaagttaggtacggtgttgtcaaacaaatcttgctctttcatgtattcatatatgaccctccactgattctttagaggagaggagccaaaaaagttgtacagtaatacatcctacagaagcacaagaaataacattatattggaatgtaattgcactatgcaagttatcacaaacacaagctaatctagaaatctaaaacagttaaattgtgtattgtgtgattacctgaaactcaagtcccttacactccaatacagtaagtagaagagctttcttcccaacataaccagcaatttcctttcgagcgttgtcatctcttactaaaataacctgctctgcgccaaagccaacaatatttccacttgtctctccactgttgccaaaaatctttatgattgcattttcatcatccccacattgaagcagcaatggagattccccatatatcaaactggtttctggttt

SEQ ID NO: 29373 - DNA, 3320 bp, Cannabis sativa
  modified_base (2762)..(2762): a, c, t, g, unknown or other
cacaataacatttgagagatgtatggcgggatgggttgaaattcccattataacatttgaataacaatgtgtatattataggtttatatacacaattatgatattcttaataagtttactttcataaaatatattgtttataaaataatctacaattagttaccgaattcttaaacaaattaaaatcactagattttaaataaaactaatatttacgtggctcgtcacgtaactttcttctagtatatataatatatatgtattacattattttttagacacaattcaatataatgacttgttgatcagtatatatattatgatgttaaaattttaataagatttttttttttgtagtgttaaaactttattagattcattttttcagttttattataatgtttaataatgatgatagtgtaaaccattcaaaccgcatcgcaccatactgtatttctgcagtattgtttttgtagttttaagatctcgtggtgtggttgcagtttgagaaattacaaaactcacgtatgcaatttagtttaaaaaaaatatatgcggtttagtttaaaaaaaaagttacaacccgcattattatcaccacacatactttaattatatatgtatatttatattaatcatttcatttagctcacatcaattccatttttttaacagcacatcaaccaattattatttatttttttttttcttgaagtaaattttttattttttttgacataagagtcgacaaacttcgaacttcaaatttcctttgaagagaatggtgaaacataagtaagtatatgttttgatgaattggaccaccttaatgaaatagaataaaatatggaggaaataatttttattctatttttttgtttagttttattttaaaatatttaaatatcattcttattttaattatgttttcactccatcaaattaaacgttacctaatagagtttgttgtgtgagtttgagtatgaaaaagtagggttaaagaaagtagacttggaaatatatgaaaacacaaatcttgtttcattcaaatttacattctcattccaatcaaatctaaatctttaccagtacatccataagtatatattttgaatttatttatttaatagcatgctaagtagagtactgatcatattctaaaaagcgccttttcttttttaagtaatcaatcaataaataataatgtatttaaatattagccaatcttatcatattgttttttttcctccttccaaataagtttccaaggggttatatgcatattgtttaatttcatatattgaaatacttctaaatatttcaattaattttttttaaacaataatttaattatagaataattacatcatacgctattttgtaaaaaaatttacacttctagtttttcttttaatatttttacggtattatataaaaacaacataaaaataacaacaaaactatataaaagtaataggaaaatagcatccaaacaatatcaaaacaataataaaaaataacaaaaaatcaacaacaaattaacaagagtcaacataaaagtaccgtatcttctataaataaaatcgtaaaaatatttaaaattcgtaaaactatatttgtgtaataattttattatttttgtgtatttatcaaataattcctttaattattgagcatatttattttgatgggcccattccatgtggttttgtgttgtttctagctaatacctaaatacatcaaaagtttttcttaaaagaaaaatacatgaaatgttggaagaacatttttttttttggaccacaaaactctctttttcgaaaatatctaggttcagaaaaatttataaattatattattaaaagaaattacttcaaacaaaaaatctataatatgccatatatagaaatcattcaataaaaaagaagtgtgcccccctccccccctccttttttcttcaaagaaattaagtatgtttttttcaatcaattaagtgatttaccctacttacattttcattttcaaaaagataaaagaaagcaatttaactaagtattaattatttacctgcttatgaagtataattaaatatgagttcatagatataaattataatctaataatattttacctgttgtgaaacaaaggtctcaaacttgaattctcttccactgttataaatatatacatacctacaatgcatatatataaatgttataaataaacaaatgagcacattatgatgttggtacaagacacactacaacagttgtacaatttgtattataataaaaaggtcgaactggacatgaatgctttggagatgctcaacaccacaaaatgctaataattaatatgcacacaatatttatatagatatgtattcttcacgtctattttcatttggtgtcatcatgtcaattagcctaacatactaatctaatgctttgttcttttcttttttatttccttgtctttcatatcttacttggctacgtgcatcgacgtggaattaaatctttaatatattatgaaatatacattatgaaaaattttattgttagtcgcaacaaaattcataactaaaagtaaaaatattttaactaattataaatcatcatttctatattgtgattactaaaaggtccgtagctaaaagtattaatagtcacaaaaatcacaatttgttatgactaaatatatttttagtcacaataaaactaaattagtgacaacatgtatctaaatactatgttttagtnacaagtaattttttgttgtgactacaagtcacatttagtcacaaaaaaattatgttgtgattaaaaggttatcactaaaagtagctgttattgtagtgatgtgcaatataaatataaattttgtgattgtagagtagagattgaaacactcttaattgttgctattgattgtaatcgagctatctactacgagagatgaatggacaaattgaaccatatgagggaatttagagagaggaataggctctttacaattgtgagggaaaattcgatcctctacactatgcgatataaattctatttgattacatttctagttcttccattgttgttcttgtattgcttatgtattgtttatgtgtacaggatcaagatcgagttgctgttggtaaattctaacagtgatatcagagcttatgattttgggagaaataactcgattggtgaagatcaagaacaaggcgcgtgagaagaagaaattgaggaacaaaattaaaggtacattgatcaaaaaagatgacaagtgttaaggttgacattgagaagtttaggttgaaa

SEQ ID NO: 29374 - DNA, 1362 bp, Cannabis sativa
tgaaatcaagccagccatactgcatatggtccaatcttcaatctagtttggggggctatcattagaagacccaaacttgcacctagctaacttcgaggaactctgtcagacattcaaggtgaatagagttagcgatgacgccatcaagctaaggctgttcccattctcactaagggagcgagccaagagttggttggtatctttgccgacccactctatcaacacttggaaggaattggccttgaaatttctttccaaattctttcctcctgcaacgatttccaagctgagagctgacatcaacaacttcacccagcatgacaacgaatctctttatgaagcctgggagagattcaaggacttattgagaaagtgcccgaatcatgggattgagaagttgttacaagtgcataacttctagactggattaaggagcaatacccgaacactgatatatgtcgtagctagtggagcttttatgaggaaaagtgctaatgaggcctttcaattactcgaagagatggccataactaacaacattggtcaacaaagagaggcccaacgaaaaaggtcgcacgaatgcatgaagttgatgaaataactaagttgacagcctaggtagaggcattaacaaagctggtgaatgcacaagtaaaacaagctcaagttgtctgcaagttgtgtggaggatctcatgccactgacacttgcctatagatgtcgacagtttgccaatgggacaagcccacaccattggaaactatcagaatatttatggttgttagcaaaaccttctagaagcagttttatcctcaggaaaatcaatctcaacaaagccaacagtattcacaacaataacaagcctctagtggagggtctaatcctcaattagacacattactgcaattcatgacggagattaagtcttccattaaggttttggaaactcaagttgggcagttggctactcaaaacatttacagggctcaagttaacttgcctagcactactgaagtcaatccaaaggagaactgtaatgtaattaccttgagaagtggtatgacctatgctgagctaaacaaagatgagccaaaggaggaagatgatgtagagacaacacctacactagaaaaaggagaagactactgatggtcttccaaaaaaagaaactccacctcccatcagcattgaccatcacatcaaaattccttatcctcaaagacttcacaagaacaagatggataaatagttttcaaaattccttgaaatattcaagaaactacatatgaacatcctatgcatagaggctttggaacagatgcaaacttatcggaagttcatgaaagatattctatccaagaa

SEQ ID NO: 29375 - DNA, 3877 bp, Cannabis sativa
  modified_base (3271)..(3273): a, c, t, g, unknown or other
ttttgacgtgactcgcgaatcacatacctacgttgaataagttttatggactgatgcacgcattttctgaacaccaacacaacaaaaatatattaatttcaaaccaaattatattatattaatcatcaaacctaatctctatcaaaaacttaggtatatatataattttttgttgggcatttaggttaggtatatatataaatatacttaaattgtataaattgtcttcttcgaacttagtacgacgacttattttgtataaattagtaatagttttatctgcaactctggctttatataaattggtttaaagtttacgtcgtcacctacctcacccaggatgaagtttaatattaagagactaagagatccctcaaaaagatccgtcaaagtcatatgtttgtaaaagtctggtactgtgtgtttataggaaaagagaattgctaaaggaactagtgcttattatttttctttttgtgttataattaaatatctcatcttatatataatttaaaaaaaataatttaaaagaatatctctaaccaatagctacatataaaaaatactactagtatctaataataaggtaccctagacattataaaaagtagcataatattgaaacattttaatattaaatttatatattttaatttaataaataatataaaatatcaagagtgcattactataagtctataatattttgcaccttaaatcaaatataggattaaatagctaaacaaatcaatgcagctgtactgtacatgtgtatgtaaaggagtaggaaaaataaaagttcgtccttgtccattaatttgcttagtttgcaatccagctgtacatgtgtatcctttagtttccgatcgatttgcttaattacctaattacggtgaagacgtcattcctaaacgacctcaccatatgacaaacaaaaaatatgagaacaataaaacaaattatttaaattccaatttagtaaaaaaaaaaataataataaaaatctgaacaatttgaaagcttatgtagaattacattataccatgttatgtaaaaaaaaattatttgacgttcaaatttttgtgtgttttaattttatactaaaattctttaattttttttgacaactctcttaaatttacttttatttacaaatttgaaatattagctaaatttcacagttaaatgttaactaaatttccactatttacatttgtgtatacataacatgttttcgtaagatttaagattttaatgtcacgtgacatagataattacaataacaatctcaattggcatcgaaaaataaattttaacaaaaaataaatttaagaaacttataaacttaaccaaaaataaacttcaaatttacatataaaaataaacttaaggagtattatcacaaaaaaataaatcaagagattaagtatataaaaattaacatataagaaaattttgttgctaattctccccaaaatattatagcttatgtgtgttgagcctattggggttttgagtgttgagttcacttaaattattctttgtcactataatcatccacataaatcaacaccatgataaattaattgtaaacttacattatgttatagtgtgtatttttcacctagaaatcgagatcaggctcccataaggatgacacgtggactcatatccctcgaggattgctgagctgtcagaagaggacctcttaagaatagaccttgcctgaaccaaactcagcgagatgatgtgacactgacagagtctggtcgcattattacccctcgcgtaatgtaggaccaagaaagaattatacaagtctcgcatataccgagatatatgcgataactatgaagacttctcctgcagtttagtaaagatcgtttctttacatagcgagttggtccgaatgacctaacatgttcgatgacccaacaaggactcacatgccctaggttgtcgacgctgacaaggtatccgtatacgcgactcgattaggacgcagatacctaagcgtgaaacccattagcctcattttaacagaacgcaccctaagcctacgagcttgtgcgagtatatgaacagacaacttgcactatgaaaattgcatacattgttgtatttagtaaaatagatttaagctgttcttcatttattccatttatatttttcttaatttaatgctaatattcaatgtaaaacggctcaaataattaagttctgtgtaaccaaaggaacacttgctttgtatataaaagaatgatctaatatgaatagaacaagctagaaaatccttgcaacagtggactaagcagactgtgatttgactgaaccactatacctcttcgtgctcattatttttattagtttttttcagtcagtctgtgaagtctcagttgcatactcgccattctaggttgagtactcgctctcttttattatataattatatttttatttttatttggtgttgtcaaaattcctccaacaacatttggcgttgtctgtggcaatcgtatttatttttgattttgaaagaaaattgaaatgggtgcaaattagacgaacagaaataacaacacgggatccttcaatgtcggaacgatgaatgtcccactcccaagcaatggagcgaatccagttgacacagttaatgggagtgtgggacgaatcactgtcactcccctcaatttatttccaaaaaccgtcggtcatgtcttgttgaacctcctccatggcagctagatgattgttcaccagtatgacctcctgcttgacttcctacacatctgcaggagcaaaactggaacttgcaacagtagaaggatttgcaccattcgagaccttaggacgcttgggaaaggctccatcaaagtaatccgagggttgaaaaatggtgctagtaaggggagactcgagtgtctcatgggaataagccacatccttctgagagaaaagaaatttatagattaaattggggaaaacaagcttatgagtatgttttttacctctttgaaatgaaataatttggttcaagatataagaacccaaattgatggatgcccctgaggtgatgcgaaagagaaaattttccaagtcttgagacactacagttttattagagtttggaagctaattgctaaaagcaaaccgcatgagtgaagcatggccataagtgagatgactgatgcgaagactttggccaggttgccattcaactcgtgtgtgcagtgaaaacaagaacattgtgttaggaatattttaccaggannnagatttactaataagtatgttgaattaatatcctaaatatgaattctctaaaatagttaaattaaacacataagagtttagaaaacataatttcatcaaataaaatatctctagagatgtacaatctcccatccttagaaagacacttgtagcccttatgagacaagttgtatccaagaaacagacaaggaataaacctatattggagtttaattctgttgtaaggtcttaaattgggatagcatagataaccaaacactttaagagataggtaatctggtttggtttaaaattaaacttctaagggagtgctttattttagttaaggattcgacattctgtttatgaaaaaatagcagctctataagcttcatcccaatacttgagagctaatgatgcttgagcaaatagggtaagcccagattccacaatgtgtttgtgtttgtgttcagcaacaccattttgttcaggagtgtgtggacaaaaaattttgtgattgatgtcatgttcttgtaatagatttgtgaaagcttgatattcaccctcaatctaattggatgcttttgattttatggccaagttgcagctcaacttgagctttcaa

SEQ ID NO: 29376 - DNA, 1910 bp, Cannabis sativa
tattgttaaccgtacaagaagttgcatcagtatcaaatctgtcagatttatctgcaaaatcataagcaaatgctctaaacttcaaagctatattgtagtacaaggatactagaaataacaaacagtgaatcctctcttctctctcctctctgctttttaaccctaaaattctaggaattttagttgttctcttagctgggtcaccaagaggatgatgcttttggcacatgaggtggagatgcttgcatactagttcagggtttcctaaatttttgagtttggcacgataaaaattcagtaatgggagttgatcgtgccaaactcaaatataagtagtttgaccacaaattaccctataaatactggtgtttagcactctgtcctttgaacttttgttttgtattttgtttgggttatctttagcttgtttgtttatagagtgttgtcaagacaatttggagcaccattacttgttacttatttgcaaatctcacgaaggtgagcttccaatttatgtcctttgttgctatgtcatggccctcatatctttcttgtaaagttcctttctaggaggtctttagttatagcttttgttgctccttcaatataatcgatgcggtttgccattcgtatggtaatatttttatgagtttgtgtggttttgttttgacttgatcttgtaaaattttgtttcgttcaactttgaatgaataaatgcactttctttcaaagaaaaaaaaaataacaaataatgtgcttttgaagtgaaaagttaaaaaagtatctatcttctgtatagttatttgtataaataaatatatgttctaagcttaaggatggtcccatataaaccgaacttccattaaaattataccaaacataagtttaattttacattgttattaccaagatctcaaacaccaataacaatagtgcgtgtcctttgatatgttaatcatttagtgttattggaataaattttccctcccccatgagaaagtctttattaaagaaaactcgtggtatcgaaagagacctcgtggtattagaaaaaatgaggaccttgcggtatctcgtagtatcaaaaaggcacctcgcaatatttagtaaaatcacgatttcaacataaaaggtgcgaacacacaccaatcaacggaaataacggtcaagtatattcaagtgtcgttaaaataaacattatatttattttataattgatgtaatcaatataattaatagacctatcattaggtgaatcctcctccgttcaaaggggacctgagttgatctgaataataaaaatacagagcatgagatcgctttcaacagtggactagacaggctgagtcctgttgaaccactatatttttatgttttttatatatattatttacatactagcatataattatatactatattctttgagtattcgcatgatttggtgttgtctagttttctttgacaacatttagtgctacaaggagggtagtattctaacaatattctcataatttttggaggagaatcatggtggcgtaccaaataatatacacaaaatcacctatgttcaatcagacacaagcaaataaaaatatgtgagcaatttttcagcccccgtgtacttagagaccatccgaaaacaagcacaaatcttctccattcctaaagctattcaaataaacacaaaattttacaaattaaaattcagatcgacacagttgtgtatacaacatccatttaagcaatctaatcgagcccctatctaaaaaaaagaaaaaaaaatccaattttagcaagaagaaaatatcgaaatatacaatatatttagtgaagaaagaacgactccgctaacttagagcacgtttggtattgttttctgtttttttgttttaaaaaattgtttttag

SEQ ID NO: 29377 - DNA, 2102 bp, Cannabis sativa
ttattgtgtgtaatgttaaattaaaataaatgaagttggaattgatattcaacagtataagaattaataataaggtgttgaaattataattacttgaggctagctcaagtgaccataaatgggtgtatgttggaggtcctggttcgaatcccaagtaaaacatgattggttataatatataaacgcttaaaaaaaaaaataaaaaaatcgatattgttgacccaaggcaagagtggggtggggggcatactaatctcattacatatacattaatatatctcgaattggtaacgtagtatattttcgtagatgtctacaatagtttctgggtttggtttcagaatgttggtctactatataactaagttttctcgaatacgtgaatgcaatggggtctgccgacatgtcatgctaggtgttatgtatacatatatagtctatactctatataatataataatattatgcaatctttttcttttgaaaacacagtagtttgttctatgttgatgttgtgcacctgcaacatcaccaacttctactctataattgtttcaattattggttattggtgttggtcctattctctcttcgtattattttctaatgggaatggttaaaagttgcatgtacgtagtaattaattagttagtcttatataatttaatataataaattatatgacaaagtattttgactcatcaatgtatcacttaattctatatttaaattagtatatatatgatataaaattatttgtactataagtccttaaattatataaattttcgcaagttggtccttaaattttattttttaataaatttatccccaaattattataaattttgacaaactagtcctcaaattttatttttagtaaattggtttccaaatttttattttcatgaaaacataaattccttacttttttttttttttgaaatggataaattccttactcttaaatggtgtattttatttatttatttaattttgtattaattttaaatatttttatattagtatacgttatcaaattattaaaaaagtacatatttttatttatatgtctttattttaaaaaatatgccaaaataaaaagaaaaatatatatgtatttttttaaaatatgccaaaataagaaagaaaaaaaaaaacaaattaaggcatattttttaaaatatgtcgaaataagaagaaaaatatatatttttttatttatatgtattttttttaatcaaatcaagacatattttgaacattacaaaactatatatatatatatatgtgtgtgaactaacaatttatcattttataaataatacttacacaatatatttctattattgaataatttctctgtacttcaagcaaaaattcattctcatcaaatagtatgtgatgcaaaaaaaaaaaaaaaagcaactatgaaaaaaatttagatgctctaattgttttccttaccattagaggatgatatcatttcttaaatatatgaaatagcttaatatgaaatctatttatatatgtagtaaaatattattttgtagctacattaatattttcttataaactacctaagtaaattatattataaaatttatttttaacttatactcagcggtgaactcatgaaattttaccaacgttgatgtaaaatttaaataattaataaatatatacaattaaaaattattaaaattataatactatatattcgtaaatcaataataaaatatatactataaatgctaaatatgaaaatgtaaagggactagaattttttttatgtattatatgggtccaccagtgtttatgctcttttattccttattaataatatatatatataaataaatataattattttatcaaattattaaaattaaaaaatgtaaaattatttgaatttaatacaaaaaaataaattaaagtaagtaaagtaaataaaaaataattaaaatatcaatatttaaaagtgttgacttaatgttccttataaaataaaagtttgggaccaatttattaaaaaaaaagtttgaggataaatttgccaaaacatatataatttagagactaatttataaaaaaaaaaaaaa

SEQ ID NO: 29378 - DNA, 3150 bp, Cannabis sativa
attagaatccaattgggttttgttggttgtttttcagtcgatgctaagggtaaaagtggtggtttggtgcttctttggtcggatgagtacatggttcagattaaatctttcacgaggtctcatattgatgcccttgtggaaaatgacttgggatttacttggcgttttacaggcttctatggcagccccgacccggggggaagattagaaagttggaagcttttaaaaaggctcaaaccgatgttcaatggtgcatggatatgtggtggagactttaatgaaattcttcatagaaacgaaaagaagggaggggggcacaaacccgattatcttatgaggaatttcagaacagctatctcggattgttggctaagagaaattaagccggaagaggatggttttacttggtgcaatgggagggccacaaatttgattttcgagaaacttgatagagtgttttgcaatcccgattggaaggacaacttttgaaagaataaagtttccctcttaagttggtggaattcggatcatagacctcttttgattcaagcaagtccgggaaagatggtggacacattcaacaaaaaatggggcactagatttcactttgaacaagcttgggcgaacaacgaagaatgtcaaaagatcattgcaaaggtgtgggcaaacaaaactaggagggaaccggtgcttcacatctctcggctgctacagagttgtggaaaatatttaaatacttggaacatacaacaaaaaaaggaaatgtttgccaagtccaaagaactcaaaggaaagattgatagccttgcaaactcaactagtacggaagattggctcactaaacgcaagcttgaaatggatctaaactgtgtggaggaaaaaagggagatatattggaaacaacggagccgtgctctttggctaaaacacggagaccgaaatacaaagtattttcatttcaaggcttctcatagaaagaaaaacactattcaagggctttttgatgaaggaaaaaaatggcgaaccaatgagaaagagattgcagctatcgccattaattactttcagcgcctttttaccaaagcgaatagaggttcggatctgctggatattctccatagatgtgttcctcatcgcctaagtaatgctgaaaatgattatttgatgcagccttttactagtgatgaagtaaagacagccattttccaagtaaatccccttaaagcaccgggtaaagatggccttccaggtctatttttccagaaaaactgggaggtagtgggcgaagaggtcatttcggcctgcttggatgtactcaataatgatgccgattgcaaactgctcaacgaaactctgatctgccttataccgaaggttcaacagcccaccgtaatgtccgaattccgtcctattagcctatgtaatgtcatatacaaagtgatctcgaagtgtctagcaaatagaatgaagcaaagcatgagttctgttatttcagcaaaccaaagtgcattcattggaggtcggattattcaagataatgccgttattggatttgaaagcctccattgtatgcaaaaaggtcgatttggaaatggaaagaaaatggccgtcaagctcgacatgtcaaaggcgtacgatagagttgagtgggacttcttggaaactatgatgatttgcttggggtatgagaagaagtggattaaaaaagttatgaattgtatccaatcagtctccttttcaatacttataaacggttcaatcaaaggctatttcactcccaaaagaggtctacgacaaggtgatcctctatcgcccttccttttcctaatatgctctgaaggtctttcttgcttaatttttgaagctgaacgggctgggagaatacatggcttacggtttggttccatggagcaaaaattatctcacctcttatttgcggatgatagtctcatattccttgacgccaatatagaggagagcattaccttaaaagaaattcttgagacgtattcctccttatctgggcagtgtatcaacttggagaaaaccgaattatgtgtgggaaacaagatcaatgactctctggctaatcaaatagcttctcaattaggagtaacccttgtcaagaaccataccaagtatctagggatgccttcctttgtgggaaaaaacaaaaaatagattttcggtaaaataagagagaaagtggaagcaaagctccaaggttggaagatgggtctcttctctcaagccggaaaagaaattttaatcaaagcggtaatccaagctattccttgctatgtaatgagttgttttcgaatcactaaaggcattcttcatgaaattgaaagcttaatcgctcgtttttggtggggatcaacttccaacaaacacaagatacattgggggaattggcaaaagttgtgtaaacttaaggaggaaggaggcatgggattccgagacttagaagatttcaatcaatctcttttggctaaacaaggttggaaggtaataactgaacctgaaagtcttctcagccaagttttgaaagccctttactttccaaatgaaaccttttttgaagccaaattaggccactttgggtcttcggtttggaaagggatattatggggtcgtgatcttctaacaaaagggtatagatggagtgttggagatggtcgcaaaattcgaattaatgaagacccatggctgcctagacaattccctttccagctaagaacaaaggttccaattccccaagatgtcactcttaattcattactaactaccaatggagattggaagatcaatgaagtgagtagttggtttcataaagatgatattccttgggttcttggcatcattccatctactcaccaaccggatcggattacatgggggttaaataacaatggacattacacggtcgctagtgggtataagttgagatttctcaatccggagtgggcagcatgttctaacaactccaaattaaaagcatggtggaagttcatttgggggtcaagactaactccgaaaataaaaaatttcatttggaaggtgtttaatcattggatcccaactaagatggaattgaggaagagaggtatgtccttattagccaaatgtgacaggtgcttacaacaagag

SEQ ID NO: 29379 - DNA, 3132 bp, Cannabis sativa
  modified_base (3075)..(3091): a, c, t, g, unknown or other
aagcccaaagcattcctaagaacaataatcatcaccatcaacacaaataagcataaaggatcaaaatcactccattttgtacacacatgcaactcaagaacttaacaatctaagaacatgcttctctactaaaatcaacaacatacaataaattaaaggagtaagaaactaccttaaagctcacacaatcaatagacaccgaaatcccccaagctccaacaagatccaaaaattgaaataatattgaagtgaaaaaaaaagattgaaagagagggagtaggggttcggtccaaggggctgagaaaaatccagaaattcaatttcaataatgacaaaatccattttgttgcaaagtaattcaagtggtcaaaataactaatttgcccctagggccatataacacacacataagcattcaagggcacttaattcatttccatcacattacatacataaataaataattttaggtttctcatatatcattaaaatgccaaaataaaatctcaaaattgtatttcgaccccaaacccggttcggcccgaaatacccagttgtgactataaccgccccgacttgtcaaaacacacctgaaaaaggacaaaacaggcataatatataatactatagtcccataaccacgttaataaattaatttcactgttctacccttcttgggtcaaaattaccaaaatgcccctggctcaccaacgtggtcttaacatatcataaattatataaattcacatataataaattatataataatataattcttcaataatacataattatctatttagggttttgctaatccatttcataatttctagggtattatagcaatagagccaaaaaaaaaaaaaaacttgagcttgttcacagtgatgtacgcggactaattaatattcaaacttaaggtggttacagatatttcatcacttttattgatgattattcaagatacggtcatacttacctaatggccaataaatctgaaatttttagaaagctcaaagacttcaaatccatggctgagaaacaattaggtaaatcattaaagacacttcgatcagattgtagtggagagtatttggattctaaattcaaagactacttgctggaagaagggatcttatcccaacttacaacacctagaacacctcagagaaatagtgttgtagagagaagaaattggaccttgttggacatagtcaaatcaatgaagtgttactcaacactgccactaagcttctggggttatgaacttcaagcggctacttacattttgaatgtagtatcctctaagagaattagcaagaccttaatagaattatagaatgggacaaaacctagtttgaaacatttctatattttgggttgtcctactcatgttcttaaactcaaaactagaaaacttgctcccagaacagaagtgtgtatatttgcgggttattcagaggaaattcgaggttcatacttctatagtcatgtagaagataaagtatttgtaccaactactacattcctagaagttgactacatgaaaggtcataaatcgtgtactcaagtggttatcgagaaaatcataaatgagtaaatttctaaaccattaactttaaacaatctacaaatgtagttgctcatagctttgctagagcatctcgttcctaccttgatcgtactttcagtttgggggatgtctcaactaagttgttatcagttttggtaatagattttaatgcttaatgaagcttgatttttcattcaaaaaaaaatgaaaatattaagaggcacattaaggtgccaagcaccacaaaaagtaacatactgttattggtgcatttcaatatgagctcctacaaattttaacttaataaatgatttgaaaactgctaatcaattattaggtaccacatcagtatgatattgaacaccttaaaaaaaaatttaaaattttaatcgaagttaataaagatatgtacatattaataatgaaaatattaaatggtacattaaggtgtcaaacaccacaaaaggtaccataccgttatttgtgcatttcaatattagcttccacatattttattttaataaagaatttagaaaattactaactaattattgggtaccacatcggtatgctattgagtaccttaaggaaaaaattaaaaattctaatcgaagttaataaagatatgtacatattattaacaaaaatattaaatcacattaaggtgccatgcaccacaaaaagtagcataccgttattcgtgcattttaatatcagctcccacaaattttaatttaataaatgatttagaaataggtaccacattggtatgatattgaacaccttaaagtaccacatagcaataataatacaaaaaattatttatcaaaaaaaaaaaaatacaaatatcatttttcaaaaaaaaaaaacaaaaacaagtcgtttttgtttattttgtggtgaacatcaattctttaattgatgttattaaaaaaaaaaacaaagtcaaatcgtttttgtttgttttgtagtgaagattaactcttctagggctcgtttggtacgccgtataaggggcgtattgtattaaataataaattacattatgtttaaagcaatgtattgtattaattattacgaccaaaatttttaatacaatgtatgttgtattattaaatacataataaatgatccgtattagtgtattataatatttacaaaggattcagggtcaacaccaaactccgactcgaactccggactcgggacccgaacccggacccaaactcgcacccgcaccctggacccagaccaggactcaaacacgaaccccagacctagacctagacccggactacaaacttggaccccgaactcgaaccgagaccgagactcgaactcgggacccgaacaaagacccagacccggggcccagacccgagacccaaacctgagacttggacccgccaagacccggaccccgacctggacccagacccgaacccggacccaggacttggacacgtagttggtgttagggtcgagtgtattgaaaatatatnnnnnnnnnnnnnnnnntattaatacaagtcaatatcaaactgttggaaatattttac

SEQ ID NO: 29380 - DNA, 1337 bp, Cannabis sativa
tatattcatttcattttcacattaattaatttaacatgtttcttataacttataatacaatagcatgatatatatctttacctgtaaaagattagttaaggctccaatggtgattttagaatcagggcctagctcatatgatctaatcgagaagttttgctggaaaatatgcttcccctgcaccaattttccactgaataaatcatcatcattattattatgataacaactactattctctttaactgataatttcccacttggtctttcgtcccctgtggctgcaaaaattaaagattatattaattaacattaattaagattcaatattaattgatatatattatgtataggtacgtacctttgtttttgacaacattaaatttgaacctgaaatgatttggattaataatatttcgactactaatcatggttagtttgttgaatatttgcaagcttgggaagaaattaggtatcggagtagccaagtgaatattcatgatgatcaagtatatatatactattaattatgatataataaaattaataaaaatcaataatattctctttttatgacaaacttgactaaattctttccgatcattaattataagaaatatatagtttaaaagtatataatagatagaattatatatgttatgagttatataataataatgattaattttttgaaagaataaaggaatatataggtagacatgtaaataaaaacaaaattgaattaataattatacatcatgaggatggatctccatgtccttagtctctaagatgtatctatataattaatcatgcaaaataggacacaagagaaaatgtttgatgtgtgatataacgacactcagagactcctgaaattgaagtaattaagatgttttacgtgtcactcttccaattatattttttaaaaaatatatatatttaataaatattaaataatttaatattaaaaaataattaattcaaaataatatatattgaattggagttattagcctaagcctcaaagttttatttttgagtacatttaacaaaaaatatcatactaatggaaatagataaaacacttatatattaattaagttagctcttacttaattattttccgatgtagaacttgaattgatattcaaccttagaaattgtatgtttaattataagaaaataataattaaaaagtataatatttttcaaaaatattaaatatatacaccgttaaaaatagatataaaagtagtgtataaaatattgaaaattagaggttattattataactaaatagtacttttgagaccataatacaaatatgttggaat

SEQ ID NO: 29381 - DNA, 1608 bp, Cannabis sativa
taaagctatgaagctcaacagcttcaactagtggggaaatggatgcgaacatacaaaagatagtgttgaacctcatggagcctcaaatagatagaaatggctgcaaagctttctcaggaaaaaaacaggttagaggataaatagagatggtgaaaggggaggtgtataatgggaatagaaattgaaaaaaagggtgtaaatgaaagaatttaaaccagcatgtataaatgagagacactaacttaaaagaggtataggatttaattttctctattttgtgtttaagaaaccataatctaacttttaattttagtcagtttttttagtatcagaaaaatatatgcttctaatatgtcaaaataatactttaaaaagttaattataatagtataatttttgtgtttaaataataaaatgtgtggttgaaaaaacttttgaaataaaaaaagaaataagaaataaagaacgtgaaaatgattacaatctgtgtcgtttatatatatatatataaaagatgattgtatataaaagaaaaatatatggttaatttttaatttcggtagatgtgcaattatttctttctaaaactattaattagattagaaaataaaaaagaatgtaaaaaaaatatttgattagtctagtctactgttttgctgaaaaaaaaaataagattgttattaaaagaaaatgctacaatgatatgtctaaaaaaaaaaaagaagaagttagagtgtaggcaaggctttggagagagaagacataaatatacattggtaaacctgccaaaaagaattaccgaaattacaagcaattaaatagattagggaaaatccttaaataatttaataataatagttgctggcataaatatttcaattatttatgtgtcactttcaaaccgaagctaaatacccttttgctagtagtaaattcatggataatatattagagaatatatgaaacataattataagataaatgatacattaattataatagtatgattaataaatctaaaaattctttattcatatggagaatgtatgatcttgtaaggacgtacaagagaattaagattatacgatatgaataaaacaagtcggtagtgtattaaagtaatgtgaatctttaatatggaattgctaagtatggtttactatacactatacttttagtgtgtgtgattttgattcagatctcatatgtggatagacatgtagtaaatgtactgtgtataattcaatgatacatgactggaccgatatataattgttatacccgaaattcagctacacttcagaagatgacacgtgtcagttagtggaatatgaaccacttgctataataaagttatatcatttaatgcaaagatgaataactcattaaacataaaattaatagagattatatccataactcgctgattgtatagttttaatcgagacaaggatacaaaactattaatacttatattgacgagacaccagcctacctcggaatatatggatccaaagacaagattcgtttatttgaaaggaataagcgaagttactcaaagcaacctcagtcaatatatagagaggcatccaccttgctattcataag

SEQ ID NO: 29382 - DNA, 3913 bp, Cannabis sativa
ttacccaaaaatttgacccgatgacatgggcaacaattttgaaatgttgaaagaaggaagcaaccttgggccctaaaaatcgggactaatggaccaattgtggtcaatttgagcatttgaaactgtgtagctgctctagttgacagtagtcggcgcccaagtaggcactatgatttattaaagacgtttctagctgccatcctttgacaaagttcaagtgaatagatcctatagtgaccctaaatcaatgaaccgtgaagctgaggatgtcacatggacatcccagggctcaacctaatcaaacaacagtactgggcacctaggttgacatcctgtgcaccgtcacacattagtttttgttcctatcaacttgttatgggcaatatgcttagacattgtcctaagatacatgagagacatgcctcagccaagttttagactgtggatatgactcaacattaaatggaaccctgaagccgtaatgtgtgccaaggttgacatatagtcaatctaggcacaccattgcaagggtttagatttttggggacatacttagaccccagttcctcaaacctaaaaaggaaaaattcaaggacatgatattttatgaaaaacatcccgaatgagcccatctacaactatgggtgctcaggttgacattttaacctgggtaccaaatttgtttcaccaagttcttgttaaggtttatgccctaaagagcctataaagatatttctgattattaaataggagttgaacattttgatgtatgcacgaatattaaattattaatatttattattgaataatttatatatattagaaaattccatattcagatatgaggttttgacttgcagctctatagagaactaagatcacttagctataaatgaaaaagtcagcaacctattgaagtttgggaatttttaatcaatggttgcagtacggttcactgatgcccgttcttcgatgcaagtaatattagtttacattactgatgtagtatgacgtctaagttaatgggttgcatataatatagattatatatcacaaggactgataggaataaagtggtattgatcaagcataccatttactataaatacctaatttagatcataatgttgatcaatagtagattagcctaaatcctaagtaaccatgaactactgtgttaattctagaactagaaagtagtgcgcaaatttagatgggatcgaaagtatacttccactagtgaattaatggtactaacagataaagaagtaattagaaggggaaaatagtaatttaatcaaaactagttacggggtatcacaaggaagactaatcactagaattgattatatcaatggacactacagtaaaactcaataaatacaattctataattactaagatttcaatttcatatatacagtggagtaatcgtgaaattaataaataagtttattttgttgatgagactcaataaataatctagtttattggagtttagaattatatgtacatagtccttgaattgcctcctcgaaatactgtcaacggtagggataaaaagttgtataatgttgctcaaaaaatattattttgaattggcaaaataataattatttatttttgtaatatttttcaaataaatttaagagggaaaaagacaaaagttgtttagaaaaaatttgtcaagacaataattgttgagacaaaagttgtgaggacaaaagacaccatccttgtcgtaattgagacaaggtaggcacctaccatacaggagggtgtccctatttgttttgtctttttgggttaattaattatttagtttattcaattagataaatatttgaatttgaaaagtggttaaagatatttcaagttagttgagagattccctcatatgaaatttcatgaaatttcagtaatcatcagtaatcaaaagtaatcaaatttaatcaaattcgaattcggttatagatatttatttaaataattaagtatgatttaattaattaaaattaagtactataaatagaagtcagatttgagaaattagaagaagcttttcacaatatcatttgcaaaataaatggagaaaaagaaaattatttttctctctcaaattattcttggtcatgtttgagaatttcaacaagaacacattatacactttatcgtagtagctcacactagttcttgtgtacggtggatcgatttggatgactacggtgtgagtttctaatcacccaaaaggattcagcttacgaaaagtttagaggataccctgatagtcatcaagaactatatattcctttcatgtaatttatgttttgatttaatgtttatacatctagagatccgttgggtctatggtacaatgataatcagatatacaaatacttccattgcatacttgatttagtacaataaaatcaagaatttttcatgtgaaaatttgatgaaactgaaatatgtgaaggacttttcaccaaaaagaagattgagcatcaacaaaacctatttcgaagatgatgctcaacacttgggcacccagtacatgcctagaagacattatgggtgcccaggttgacacatctaaaccaagagcactccaggacctctttctagataaatattccaggaatttccctcatttttgtccacgagggagatacaagtgctttcaggaagcaaacaaagccatctaggccccagttggagagttgggcactgaatttgacatcacaccagtcactagccgcctaagttaacataaccaccccattggtggttttgtggatccaattgtgattccatcacgagcattcttcctatatttctccaataatagatatggaatttagaatcaagagaaaatattggtagagtagcaagttagtccccaacatcaccaggaaccagtgtgcaagcacatggggtgccctggttgacattggcatgggcctcagtgttatgtccttcaaacaacaattctattttaatcagtcctattttgttaagatttggattcttccacatgtcagtatctcatgtacatgtgtcacgcacaagtccaccaacacccatgtgcagtagtgatcacccgtgggttacctagtcgtcactagtgaattaccgagatccccgatatcaagtaaaattggcaagagaacttccccaaggtcaaataataaactaaggatagctatcacatcattgaagcattttaagatgtacctaaagcccaagaaacaagtctttggcccccatgttgacgtttatgtcaacctgggcgcccaaaagttaggctgatcttgtagtcacttttcagtagtgcatatcactcagtaaaatggccataattttctcaaatgattcgattcaagtggcaaattaaagctcttttcaaggagcatttaagtgtgtatcacaccatcactacaattctgaagtttggacctcaaaattggctcatgatctagggcatgattttcaagtgaatgttgtgaatatttttctattattttattgttatttaattggaagtccttccctataaaagagagctctcctagctcatttttcacactttacattctttctacaaggtgagagcttctctttcttcacactttatctctctagaaattacgaagcagagctagacttagttatttttgtcgagctctcttgtaaggcaattgactttttgtgataataaaatctttaaatagacgtagctccattacctttgtgataaggggagtgagctactataattgtagtgttctctttttactttctattcatacattcattggttgctactgcttatcagacggtacgaagtttatcgctttttagcgtcaacacctaacaaaagaaggaatcttatcaaaccatagttctctatcca

SEQ ID NO: 29383 - DNA, 2050 bp, Cannabis sativa
aaaaaaatgttcattttatttcatttgttatgaagtttttaattaactgtttcatttcttttaaaaataactacaaaaaataactacttttagtcttaactttttagttataatataaatttttatgacttttagttataataaaaaaattacttacgactaaaatatattatttagatataagttgttactaatttacttttagtcacaacaaatattgtgtctaaaagtacacttagtcacaaaaatcataaagtctttaatcatagagcttttaatcacaacataaaaatagtaatttaaattagtcacaattttttttattttttttttcacaaattttattatgactaaaagtaagatttttttgtagtgaatatattctttgtcttgtcaagactaatttgtattttattattatatattaataataataaaaaattaatagttttttgagggaataaataaaaaattaataataaaaaattaatagttagtttttgccacttgtaaagagtggcttctttcggatatggatatatataggtaataaatcaaaagcaaaaataattaacaaaaatgttcctgtcattcatgtatatgtattgctaataatataaataaatataaataataacaaaattatatctatacaaaattaatattgacccaattaatttatataagttaataattacatgtataaactttccatatatcaactaccctcgtccacttactactcctcatcataatcataattatactacactaatcaataaaattagttttaatataacaacaccatgatgtagaatccaacactcattattttataattaagaataataatcaatcataaaagaagaagaaggtaaattaaggaatactacatctacattatataaataaataaatatataacctttgtcttcttgttcatgagagaatattttgcaaacattttttatgtctatatatgatcttatgttatataatattatacaaaatttagatgcatctacttcacctttatgaaacaataataataattaatccctattaagtaataattaaggaatatatttgcagcgaaattctttaatatttataattaattattacacatacaatcttaataaaaaaaaaaagtgacaacaaaagtattttattttataattttttttgacaatcgtacttttttttagttattaagtgtcattaaacctattaagtgtcagctcgaaaacaagtagcgacataattctttaatttatttattatatagtttaataatatattgtcacgtgtttctgaattaatacttgatgattcaaaaaatgtacaattataataaaattataaaataaaataattttaacgttattttttataattagaattatatgtgtaataattataaatattacgagaatttttaacaaatatttataataattaattacaagtaatatatacaaataatgagcatagtattcttggcaaagggtgtattggtaaattcacataattttggagagagagagagagaatgcatgccttgttgcctatgaaagaatatactttgatcacaagaaagctccacttgctttgtctttatacagaaaaagtaagagtgcatataaaactaagggacagggtgtcctttttatcattcattattatttttttaatattttttattttttaaaaaataacaataattgtttttttttattattattatttatttaaaaaaattctctctccaaacccacatacctttttgcctttatgcttgtgtcccctcatcatctcatatctgcctttttggaataaatacaaaaactcaaccactctctctttctctccacacctaatttatttattggtttaatttactctattataatttaattgtttattagatctcaacgaaaaaaataaaaatataaagtgttactagtaacattttgagtcacaaataatattttccttaaaatatgcaaaggcattcttatatacactaccaaaatatcattatttttag

SEQ ID NO: 29384 - DNA, 1144 bp, Cannabis sativa
tttttttaaataatataacattactcaacttacctatctctcatttacagatcaatggatactatcacataaataaatataatatcccaaaattattatatgctatatatgaatatttttattcaattattatacgtatatctaattatatatatacacacacacgataatataccatatttctctcaattattcacattcatgtataaagtacaaaagcaattattccaagtttgatttcaagtctttattatgtcatggttttttttttattttattttttttttctgttgtaatgttggggcataaaagaaaatgcatgcactacagtcaaatataccaccattttttttttaaagaaaaagttaatagaaatatttattaataaataaattggacacaattaattgtaatgaatacaaattaacaaattcaactatatgaattcttttttttaaaaaaaaagaagacattgttgtgcctaaaaaattatcagttcaattctacattcgattaaagatgaataagtggtcattttttaaaaagtaatccgacccgattcaacttttgagagcaaattttctatacaaatttttgatattttgcaaatcataaccacaagaacaaattaacattttacacatgagtagaagattaaaagaagaaaaaaataagaaattttactatatagataaaaaaatgtaaatatatagcatatgaacaataatacatcataatacttgtgtttttacagcagttacaaataaaaaaaaaattaaaaaaaaggtcaaaatcatagtaaaaaaaagtcttatattatatacgtttattctttattttttctttctctctctaaaaaaaaagccaaaattatagtaaagaaagtaaaacttatagtaaaaaaagtcttatattatatacgtttattttttttattctttgtttttattttctctctctctccaaaaaaaaagtcaaatttcaatgtaaaaaaaagtcttatattgtatacctttatttttcttattaggtaaaagttacatgcaatgcaagtatgtatggttagttttatgtttaaaatatattgtttatttattatctttttataattattttattaaaattcaatataaaaaacaatata

SEQ ID NO: 29385 - DNA, 1147 bp, Cannabis sativa
ataatgccgttcaaaaagcctaagtcaatcttctttgtggaaaatataagatgtttttagtaagagaagggtctcaaccaccaacaccaacaccatgagtaatgaaatttaaaaaagatagggataggaatttattaaatagtaatatctataaggtaagattaaatacaatttcgataattcagctactatatattacaagtggcttaactaaagtatggataacaacattaaaaagatctaaaatagtacttaaaataaatattacgaaaactagaattaacacaactaatgtcaaataagacaaaccccaataaaaaattttaaaataacttgttgtgaaagtttttgaataacacttaaacaatccaactcaaatatgacgggatcttattgatttttattaatcactatacaaataaaggaaaaagattagtagcataaataaaatatataacatagaattattaaggaaaaaacattcaatactatctagctttcaatatgccaaatagttcattggattctaaatcgaatttccattgagcatttactttatttctttctataaatatcatctcaattctcaaaactcccactcatccaccaaaaaaaaaaatgagaagtatattactaaggctaactttgttagcaactttagctctaagtgtagtgagtaaaacaccatgtggatcaaagacatgtggcaatggtgagtgttgtagcaaatatgggttttgcggcaaaggtaaagattattgtggtgcaaattgcagaggaggcccttgtacaataaatgatgtttcggttgctaaaatcgtcacaccacaattcttcgatggaataaagaataagatagctaatcaaaattgtccaggcaagaacttctacacccgacaggcttttctcgttgctttgaactcatatagtcattttgctagaattggcactcttgctgattccaaacgtgagattgcagcattttttgctcatgtcacttttgagactcgatgtaagtaactctctctctcttttatgtttcatttattattttagaatgtgcatacataattaactgtttgttagtatttttatgaaattaatgtgatatactttagatgtgaaaaagtcaattattttgtttgat

SEQ ID NO: 29386 - DNA, 2714 bp, Cannabis sativa
aatatgagatgacatttacgatttatcccttcccaaaaacacaaataagaaaagtaataattaattatcaacttagtattccggtttatcatgaatagcatctacgatagagacagttttccaacactttaaatattcttttattttatcgatttactttattattttatctagcatcttaatgttttttttaatcaaatctcatagttctttacaaataatataataaactaagcaaaaaagagaataaaagtacaatgatttaattttttggctacactcaaaacatttgaaatgacataaaacaatcacggttacgcatggaaacaataaatagaagcatataatatatatcaaagcggtaaaaaataaaatagacaggattacatgattttacaattcacatgcaactgagtagtaaatatgcaaagtacaaatacaaatttacacacgaaattcctttaataaaaaaattttgtaaaaaatattaaattagaaatatgaaatagaatactaaatgggtcttcctcctcgtcaagacgaagagtgtgatccccgtccacaccccgtttaacattcggggacaaatgttaattttcatttccgtcccgtttagcattcagggacaaaaaataattcttgtttcgcgaaatccctacctcattgggggcggattcctgtggggccatggaaatgtgcaaccctacccgaaactcactaaaaaaatacatctctctcaaaaggttaggcaatacaaatgttgtttctggtttttccttcacatgcttatgctctctttgattttcccttcacatgcttattctcttcatatgtaattaatgaaagggagcagctattgtatttgtacagcttgattggctaatatggcaaataataaatggcaaaaatcttttcattactgaaccatatgtttgcaactactgcaaactttgattttgagccattatattaaaatttcgtaaaatattattaaggagggtagaatagtcatttaataataagctggcattacataacaacctgaacgagcaaaacgtgacataactacaaagaaagagagagaaatggagtattaatttcaaaaatatataaaattaacctaagtttattaaaaaatcaaattgatattttctgttgagatgatattttttttaaaaaaaaaaatagaatcataaaccgttacttttttttttaaaaaaaaaaaatcgtaaatagataattacgaactgagtcatttaataattagataattggtaattttatttttcaaaaaatacctctatatatcattaatccatgtcactttaattaaatttggtatatcagtgctattataaatagagaggccttctctttttgcttctcactcttccaaaacactctctctctctctctcacacgctttttctctctcaaaacctcgatcgaagatggtgagtgccgaagctgctcggaatgtcgtcggtatcatcggtcagtactatatatactgttactattacatatatgtatatctgtattgtgtatatatactcatgtatagtgatcgagaacactaatggcgttatacatatgtacatatatttctcagtgactgtgtactgtttaactgtggaatatataatcttaaatctacagattaaattatagagtaattaatatatatgtatgtttttatataaatatatttattacctccttattatgtgatttcttcttctatctggtatttgctaatcatgtatatacatgaatattttcttgttaattatctttgttttattgacgaatgattttttttgtttgtttgatctgtgtgcagggaatgttatctccttcggcctgtttctttccccagtgtaattctctccctctagatttgcttcgctttctctctcttttttccaatttaaatttaaattttgttattttttcatataaaaaaagaatataattgttctcatgatcagatcgctaaatgaattcaatataaattattttgttgtatgctgttatttatgttaattaaattgaattattttgtaaaaaaaaaattgaattacgaaaagtgcatacgcttttgcattaacactgtttgttaagaaggaaaagaaaagaaatttggaggaaaacaagttggtaaactaggagagaaaattttcctctgtcaacatgactattttgtttatagaattttaattttattaattatttgtaaggataatatagtaaatttatatgtatttatttgtttgggtggaaaatttttggtgggcctatcctattgtttctcttcacgtttctgttctaatttttctttccttctatttttccaccacaccaaacacacgctaaattagagcccacgctgattgcatcacgttaagagctccgcacacacaacactcacaccaaaccttaattcaatacataatcacaataatggttttatttataattttccatctttttgctttttttttttttacatttttgggaatatcaatttcctcaaactcacacaccacttggcctgtcattcattttacatgactacaaataataataataaaaaaaaagagaatatatattgtttattatcgtataatatatgtattgttacatcacgggatttacttataattgtcttttactaaatatataaaaatgaattaattatatgtgatatatat

SEQ ID NO: 29387 - DNA, 3174 bp, Cannabis sativa
  modified_base (1391)..(1393): a, c, t, g, unknown or other
tttttctatgtatatacaagaataaaaatgggaaggataatggccctgcttggagagctagctctctatatatagatgttataaaacttgtaaaaggataacacattaagagattagttaattaaacgaaaaagcaaaagggtatgtgtagggaccacaaaacgtacaatttcatggaaggaggccctccaagagaatggggtgagtgaatgagatagtgccacgtgtcagaaaggggttatgcttatagctttgggcatgttcatgcacatgcaaccacatgatattcttcttcttcttcttcttaattcaccacatatatatatacacatatacacacacacctccacagccctcctcctaataaacccaccacctttcatcaccacccatctcatggaaacactctggattattcttcccccactttccaaattcaatgcataattctattatgtgtataattaaattatatccaagtttgggatatatatttagcttcattggccagctcaataaaacacatggcattcccataaataactattataataaaaagtaattattaataattaagtacttaataatatatttaattaatatgtatatatggtggttatataggacaatgcatgtttctgaacaggaaacctatttaaattaatagaagaagcaagaaaaatgtagctaggtgccagcagagtgttactaatactattgtcaatatttgtgttaacataaatggacaaattagatctcaatgttggataagggatagatttttcttctgacattcatgaacggcagaggcctcgttttttcggtcgaaattccgatccacaataataataataataataataataataacatatatgatttatattgatcaagaaaaatatatatgatttatattgttttgtttgtcttagaatataagaattattattcgtgaaaacatatgatatatgcatgttctaacatgtctgtacttcatatagtactaaccctttaaagttgaaacagtagtaatactactatatataacttaggcaatatctcacatgacaaagatgcatgcatctcttctctgatgtctttcccagatcgatcatcatcatactactatatatatactactatatatatgtgttgttatttatatatatatatatatgcttaattttgaatatgacgaatacacacttccatgtggattatcttttactatactttttgcatatattccctcacttttttttttttttgtatagctctattatatgtaggctaaattttgatgacaaatacacatttccatgtggattgcatatattccctcacttttcttttttatataatatgcatgtgtttatatataaatatatatnnntatatatatatatatatttattggcagctaattttttgtacccagaaatacaaaacacgaaatgtattccgttgtacggcgggtacgtaataatgtgtcccagagtacgtagtaatgtgttccaaggtacgttcactacaagaatgattagttctacaggcgttttacaattgatgcgcctgcaaaagattagcaataaaggcgctgaaagctgagaaagcgttcataaaagtatacttttgtgggggcttttaataacgttactattttttaaccctaattatccctagattaaccccagccctcagatcaaataactaccccatctaacggctaacgtacatcacggaatacattctgtgaaaatacattaacgggacaaaatcgtgtccctatatttatttatagatacatatgcacagtccttaaatattacacgtttttcatttcttcatatagagtgtactctgtaaaaataatatatttcttcttttaatgttttctctttttaataagtcattgtttttagaagaattacaaagctgagatatacctcaagctttcaaacttattcctttacatgctccaaaaaatactatgtaattgaaaatttgtattttttttcatatggcaataaatttgtttaataatagttgattgtaaagatctactaaatctgattagaaacttgttgctgcagaatacagatttgtagtcactactacaaaattgagcattcccgggcctgtcggtcctcaaaataattttttccgagaatcatcgctcttgttaagtgagtgttttaaaccgtcgggaaaaattgagttttcctgacggtttagaacactcgttatgggaattcgcgacgggttaaggtaaaaatgcagaatttttacggggttatacccgacgatttaaaatcgttggctatagaattgtcgggtatactatagccgacagttttaaaccatcggttatagtaaacgcgcgtgatggtttaaaccgtcgggtataacctagccaattaaaaccctatcttcttctactgaacccctctttcttttttatttctctcatccaccgaacccctctctccctcccaacgccgatcaccctctctctctttcgatctccgcctccatgtctcgtttatctcgccacccacaaaagccaccaccaccagtgaggaccaccgcctctttctctcctttgtctctcttcttgcctccctttccatctccctcttctcgtcttcctcccttcgcacgccgcgaggaccaccacctcctcctcttctactttttaaggtatatatatatatatttatataattatctatttatatatttatttattaattttttaaaatttaatatatatttatttatatatatatctttatttttttttaaactgaatatatataaaaatatgtatttatttatatatatttatttatttatgtatatatttagaaaaaaaattaatatgtttaatttaaagttaattgttattgtataaattaatgtgtaaaaatttgatgtgttataaaaaatttaatgtgttttaaaatttgttgttatatattgttaaaaatatttggataaaatatcaagtaaaaaaattatttatttcacttgttattgcaaaaattaattagttgtttttttttttttttgacaaagtgattagaatcactcatgaatttaccacgcagacgtccgataccggcgctggaacctcctcgaaccatgatagctcatcgtctaaccgcagagcat

SEQ ID NO: 29388 - DNA, 1376 bp, Cannabis sativa
  modified_base (1168)..(1171): a, c, t, g, unknown or other
cgaatttattcttattcaaaaaaaaaaaaaaaggaaaagaaagaaaagaatttacactttgctaaaagctagtcgaccctgtccatttccggggaaagaaatatcctacaaaaaaacccaaaaattaaattagggaggatgaaattatatgaaagaaaataagaaacgattaaggaaattaattaattaaacaagaaaataaaaatcaaacaaaagaaatgtagagttaaaaatattagtagaagaaatgattaatgatccacaatgtatatatatattatatgatgatcaagattaaagatggtgatatatataagtcatctaatcttgactcttgaataaaaataaaaaataaaatgatcaaaaagaaaagaagaagattttggttattataactaagtactcttcttgattattcaatataaaaaacaaaaacaaaaacaataattattaatcatgagatcttaatttggcagtatatttagtggtttttttttttatctaaaagaatgaacacatgagtaacaataaatataaatgcataataatatatatgtatatgtatataccggtggaggcacaatatgatgagagtgagttatatgattgttacatttgctgcacacgtatattactccttcaccttcagcttcaatagtgatcaagaaaagccttcccatgtctctattgcttaatttctcccaaaacgacaacaaaatcttggtcgtttcctttgcttcatcatcaagaacgacattaattagccaaattgtattgttagttataagaagaagaaaaaaaaaggtaaagaaaaacatgtcaaggttgaaaactagaaagaaaaggttatggggttgggttgattttgatctttacctatcaaaatggttaattctattctaaagagagaacaaaactaacatgtagtcaccttaaattaaaagggatactaagccaaaggattgtgtatatagttaattacataatgtcaatacaccttaaattaaaagggaaatttaatattatatgcttaaaattaatttattcatatgctaacatattttgtattatgcaaaatatacttatactatttttctcatctaattttacccctaaataaataaaaaccaaacatccatctctctctaggatactcacaccacacacnnnnacacactctaccagtcggacgacctatccccagagctagtgttgttcggccgccttacatttcaaaaaaatttctcttgttttttgcatttttttcttttggtttaccagttttttgcaattttttgcgatatttaatgatgtatttgcaatgatataacgaatctgaggtcagggatgaaatttagtgatgatttgcgatattt

SEQ ID NO: 29389 - DNA, 1091 bp, Cannabis sativa
taggagtttctatgtaaaattttgtaaaaatacaaaaaaaatatatattatatatattttaaagtgtaaaaataaaaaaaaccctaaaaaaaaattaaccacttgtaaatattgagggactcgatcgcaactttgtgcacccaattaattaacgtgtagcttttttttaagggtagcatttttaagtcatagaaaaaatattaaaaggtaaaaataaagagatttattctatcttattctaaaatcatgcaaaattaatttatacactacaacattaatgttgccactgatgtcagtactcccaaaaagaaatcccttagaagtatttatgtcccaccaacagatctacaaaatatgaaaattatattaattataacatatctgcataactatattaatctaatattatacagtttttcttagaccgaaataaacttgaatgataaatcaccatatatatatatactcaaaataattcttatggaaatataaatgaaataactaaaattattttaataaagtaaacttataatcttgatgaaatgtattatcccacattttaacaataaatttggtagaaaacatatataatataaaacctcctcaaataaaattatccttagaaagttaaagtttctatatattggtaaaaatgttagcattatatctgatttgtcaaaaccacgagatacgtctctaacataaatcactatatatacacacttaataagtttcttaagaatattataataataataaacagaaaaaaattaataacaataaattagtaaatttatcgtggtaaattaagctctttttttaaaatagtatcatcgtgaaatttaaacatgtatataacaacaccgcgcgaaccaaaccaaaataacaattaaatttattaactaatattaaccaatgatatatcatatcattagccaagccaataaatgtatatgtggtttcacaattgagtaattttatagatatgatgatcagtggtagtggtggtggtggtggcattgttaattagtagtacgtacacacagccgatcttgcaactttgcatcaagctagagagagagagagagaga

SEQ ID NO: 29390 - DNA, 1065 bp, Cannabis sativa
aattagaaaaaaaaaaaaaagagaaactgttctgtttgtgttttgttttgcaaaagtgttcatttgtatttttagatttccttttttcaaatggatcaaagtaatattcactaaaaaaaattgagttgattaaaataattttaaatataagattaattattacattctatgcaataaaaaataaatttagacaatcgaaaggaaaaaaaaagtgattggagaagaagaaattataattaaatttttgaataaaaaaattataattaaattaatttggctaaaattgggtaactatttttattttaatcaactttttaaagtaaatataatttatgattatttatttatttttgaacaaagaaaattattatctattgttgtgttaaattacatcattttcaatttgtttgtgtaaatctgagtgtggattatggaaagtttgtccgaaactatgtgacttgggttggttttgttgttataaaatggggaaattatgtattaatatttattataatatcatatttctggagatttgaaagctaatttggttttttgcacacgtattaaggcctactttaaggaaagagatcctacgagataaaataattacaaaccgactaccaacttaatgccatactgttcttttgaaaggattaatgccattaatttataaatattatatatatttttttgttttgactaaaaataaaattatcttttacatttactcaagtttcttttatataaaactagatttattttcctttgtaaggataaaactagagttattagtaataatatcattaacatttcctttcaagaaaaaaaaaagtaataacaatacaaaattagtgtgctcaatgaggcttagtgattacaatgaagtttaacttcaataaattaataattttaattaaaatatattttgtctgattctgactattaatttgtaaatttttagtggtatattacatattgtttttaattattacttcatattttcaaatgcacattatgtgtagtgtccaattgatcatatctaacctttttccatagtaaataaac

SEQ ID NO: 29391 - DNA, 2521 bp, Cannabis sativa
  modified_base (26)..(63): a, c, t, g, unknown or other
aatcactgaaatagtaaaattgaatnnnnnnnnnnnnnnnnnnnnnnnnnnnnnnnnnnnnnnagttcagggagaatttttaacggcgaaaaaagtttagagggcaagatttggtatatgtcaaagttcggaaaattctaaaattagcctatattatttatttattttcaataaaaaaggcaacattattagttgaaagtattgcaaaaaagacgatctatttgacatcattacaatgcaagtgaatcattttgttatgttataagagcactcacaacaatttctttactctatcatttaaaatacatcaccgaaattccactttgtttattttacaatacacttttaccttacactatacatcaacttctttaaaatacatcacaaaaattctactttttaaaatttttatattttattcattttaaatatataatactgatatatacacatatcctcatataaaaacaattattaaaactcaaaataattaataaaatataattagagcaatgcatagtattctataaatgtagagcatgaatagtgtattttttttttaaaaaaaaaaactttaaaatgaataagaagtttagagcatcggttgtagcatatttttagtacggttctttaaaatttttaaagcttctctattttagagaagtgttgtgagtgctctaagaaggaaaatttgccgcatatgtaagattttgagttcgtaatgatataaatttaatcatttttaagggcataaatagctaatgttagtaaaattataattttcttctagctttgtcagtataaactttgttagtgtcttaaacgagacatatgtacatcacatattttaaattattgggtctcaaggaaacatttagtatcaattttcaaaaaaaaaaaaaataacaaattcaaaaactaagtgtagttagaaaatcggataaaaattacaattttgccaccaataagtacttatgttgctaaagcttacaaactcaaaactttgagtgttatccattaaaacagatgttatgtatggtcacaagttagttactagtttcttattttggaaagttagttgctcgaggtgacttggataacttgaaataggtgttagttaattcagttagtattgtcattagcctataaatacctaccacctattgcattctaatgtagcttgtcatatcactataatgtaaagattagctagagtgagacagaattagttctaaaccattgtgagaaaagtgattcttgtaactctcaattggcttgatcaaggactgtgtaaactcaaaaactttgatgatcgatgagacaatgatggttgttattccaactgagacgtagaacatgcacttagctcaaactttttaaattcctagtgttctctttttctgttttaattcattcaattattcttgtgattctcggattagtaagttcttgaaattatgtttgtttgtttatgtgaacttccatctagtgccttgattgattcacaaaaaattggtatcagagcttggttcttgaaatcatggcggctacaaggtatgatgttgaaaatttcactagtttgaatgattttaggctatgaacaatgaagatgaggccctgctggttcatcaaggctttatatgaggctttacttaaggaaaaggctcttcctgagataatgtctgaaaaagtcaagaaggagacacttgcaaaggcgcatagtgtaataatcttgaaccttagagataaggttatgatgaagatcaccaaataaaccattgcaactagggtttggttgaaacttgaaggattgtacatgacaaaatccttggtgagcatattgtacttgaagtagattttgtattcattcaagatgatggaagacaaaatttttggaaaacagattgatgattttaacaagttgatccttgatcttaaaaatattgagtttaccattgaagatgaagatcaagcattattattactgagttccttgccaaaatcatttggacatttcaaggatacaatgttttatgggggagaatcaattacactcgatgatgttcaatcaaccttgaattcaaaagagttgaatcaaaggattgagttaaagaactctagtaatggtgatggattgtatacaagaggcagaaagtgagaagagagaaagcaacaaaagaacaaagagataatcaagatcgaaatcacaatatggtggtaggaagaacatcagagattatcattgtaagaaagaaggacatatcagaaggctttgtctagaaaggaagaaatcaagtgatgaaagatttgaaggagatgcaacagtaatgagttatggttatgactcagctaattctttccttgttacctctgagaatttagattcagagtgaatcttggattctgggtgttcatttcatgtgacaccaaataaattttggttcaaagaattcaaacttgaaagctatggaatagtgtatcttggagataacaaatattgtaagatggtgggaattggaac

SEQ ID NO: 29392 - DNA, 3122 bp, Cannabis sativa
  modified_base (357)..(359): a, c, t, g, unknown or other
ttttttttttttttggaaatgcaattattttgtgtgaattttaaacttattgttgaaatgtaaatttgattgattttgaagctcagtctattatatcttataacaacttacttgcatatcatttaacattcaataatatgtaaaattctaatctaaaccctagattcattgatgggtaatgggaaaaagagtgaaaaaattattgaaaaaaagtgagaagataggaaaaaaaaaaaaaagttggaggaaaatagaaaagttaatacaaaaaattaagctagtccgaaaaatatatgtctaaaatttaagagaagtaactgaaaagttgaaactagtttttctttttttttaaaaaannnaaaacaaaaaaaaaaaacaaataatacaaatatatttttggatgattctacaatgcactctcttaaaagagatatgctaatgcatcctctacttgtttcagcattcaaaagaattttttagtctaatttttttttcgtattcatgtaggttttagttatttaagatatcctacaacattttaaaattttttgaatattttacaatatcgaaaacattgttcaaatagtctattttacacacgtataaaataaaatagtcacgcgtgcaacatactatttgaacgcaatttttgacatattaatatttttggaatttcttaaaattttgcaggatgtcttaaataagtataatttacatgaccatgggaaaaaatttgactaaaaatttatttcaaattctaaaaacagattgaattatattatgccttttaaagagtgcattatagaattttccaatacttttcactaaaacaattaaaatttaaaatgaaactttattttctccatctctaccaaacaactacatgaaaccaaaatttattttccatctataactttttatcctctcaaattttttggtcccaaacactatatagtgcaaatcaattttctgaagctgccttttttttcttttttcctttttttgtcagagtactgtaaataccattccacactacaaatatcctaagaggaattcggaaatcccattagattgcactgcttacaaccataacggaacatgtccctcacacaatcccattacctacaacccccaagagcccgatcaagaccgttcatcggacgccacgtgtcctgagtacttccgatggatttatgaagacctaaggccgtgggctcttacaggaatatcaaaggaaatggttgagagagctcaaacaatggctcacctaagactcgtgataataaagggaaaggcttacgttgaaacttataagaagcccttccaaactagagacatttcttctctgtggggtatcctacagttattacgtaggtacccaggtagagtccctgatttagatttgatgttaaattgtggtgatcgtccaacggttgagtcaaacaaatacagtgggtcaaatgccacgtcaccacctccattgtttcgattctgtaaggatgaccatacacttgatattgtgttccctgattggacattttggggttggtaagacatctcaaacaatattctaagtgtaattttaaatagaaatcttttaattagtattacataaatctaatctaacctcttttgatcttttgtttaggcctgagataaatataaagccatgggtacctttgttgaaagagttagaaaaggccaataagaaaaccaaatggttgaacagagcaccttatgcttactggaaaggaaacccttatgttgctgacactagaaaagaccttctcaaatgtaatgtttcagataaacaagattggaaagctcgtctttatatccaggtgatcaagaatttttatatattctttatttaattgattttcttgtatagttaattaaatttaattatcaactgatttggcctttaaattgccacatatactagtgacacattatgtatatattacataaaattcttgtgtttgattaccatgacaagactaatccttgctcataatgttggcttttgtaggattgggagcaagaatcaaagaaagggtacaacaaatcaaatttggcaaagcaatgtatccataggtatatatgtataatgggcagatattacatgatataattacctggttataactaaataaaattacatgcactacaaaaaaatatttaaaatactaaaaaatatcaatataacaataaataaaaaatatatatattatattataaaaaaattatttttaagtaaatatgattataattataaattaagctttattcttattataaattgcttaaataatcaaaaattatttataaataattataatttaagattaattcttgtttataaattgttcaaattgaaactgaatttttttattttaaaataaaagttattcttattatttttgtataaaatttttataatatatgtttagtgtactgtcaattaaataattacgttataaatttattaggtataagatttatattgaaggagcagcatggtcggttagcgaaaaatacattcttgcatgtgatgctgtgacattactggtaaagccacgttactatgatttcttcactcgtggtttattaccaaggcaccattattggcccattaatcccgatgacaagtgcagatccataaaatttgccgttgattggggcaactctcaccaaaaagaggtaacactataatattttaacatattcatccctatctcatggtgcattactatgacgtatttttcaagcctatttgttctctaacttggtttctttatggttcttaatggattttcatgaataggagttttgtgtaattaaaaatttgcattcaaaaatttatttcctaaccaaattgttagccaaccctagaggctccatttgttactagtggacaaatttctcctggtttgagcttgtaaagataatagtgcttgtatagtatgacgtccgttgttcatagaaattataaaactacaagacttctatctattttttattaacgaattaactagatatatttgatacaacttacttacatttaattttagtagcacatttagtaaatcaggtggaagcacttgcactcaatgtatttc

SEQ ID NO: 29393 - DNA, 2720 bp, Cannabis sativa
  modified_base (2208)..(2210): a, c, t, g, unknown or other
tatggaggccagccttttgcaagtagaggatagctttgtacactatttacttgaagaggtcaggttcccttggtcgaacggagtctccttagggttcgaaagtcagttcttggccgaccagcttgtgcacacatcctgacaggctatatcttaccctggctggcttataggcttttcttggctggccaaggaggttggtatagctctttgtgagctcgcttcactctctttggtcgctgcttgatggttttgctatatcttgcatggaggctttattctgctattggcggggctgaactccacctgtaatctatctttggcttacatggacatgccacgtcaggtggacaaaatttgggataaaatttgcccccaagtccctgttcgaacgtctggtcagatagggattttctagccatcgtcttgtctgtagtagtctctgttgagtagccttatctagcaaagtgttggcttttttcctagcatgcttttggatattttatcttctctctttatatacatctcatcttcttttcttagatatatcttcttcatacctaccattaacaagtggcaagctttttaagcttttggaaactttttgattcatgttagtttgtaatctctttggtatattgatcctcatgatggttttggaatgtgtaatgtgtgactttttaatagaaaagattcaattttttccttcactgtgattcttgactcgttgagtcataaagaatacaaggcacataatcgagtttgaaaagaaaacacacatcgggattcaaaacataccttggccagccgagggggtcatgcttgagacctgatcatgggatttgggtagctttagggatttaccctataaagcttacttgttcatgcctgggttttgtgaccctggcaagttattgtttgagtcatgggaccctagctgcaaggcttgtgaaccttggccgtcgtgggccttggttccaagtagttggcaagttttctatcctctcttaactttgacaagaatcttgctttgtaggcatatacaacctcagtttcatgtgtggtttccttggatattctgtatgaaacttaatggtgagtctattatagtcgaatgttcaagttaagactcaacatggcttggttcctgtaacgaacactaccctagtcgtagcccagtacgtggccccaataggagctttgtccaagtcttttctagctatatggttctagcagggccttggcctcattcatgcaaatcgatctcatatccggcctcaaggctttcatgttcttagtttggcctataggccctctattttcgaacactactattatataaccttcaagccatctatgacggacatacgatcatcctggctgtcttcttatggctttgataggtaagggtctggatttactttgtcaagccgaagtatgcctgtacgacttagaggtaggtttagtagcatattttaagccttaaaatttctttgcataagttcattgtgccagttcgaggggttgtatggtatgggcacccctcaagcaaccatgtaggcaagtctcttggtcacttgctattcaccaagtttcacagactttgcttgggttcttccttggggtggtgtccacaatacgcatgtggaactgaaagagtaactttaagaagttaatcttataatcaagtggtttagacacggtcggtctaatgtgtaacaaaagcttacaacttagtgttcgcttttaaaatcacgcagtggctacctctgcgtagcttagagaagtagaggccaccgttgaagaacagtgggagaccacgccaagaaggtcgtgggtactagcacttttacgggttcatgcacgatgaaacgttagaggaacttaattgacaagttggccagtgagagtacttattgagatattccctatttcagtgtttggatagacgttctgacttcattttctcgtcgtactacccagacttgtgtgcacctttactgttatcttgtaacatggtgcacaccttttctgtttggtccgaacatgcttgctacagggggtttgctatcaaggaatattcttcagtgagtaattctcttgtgaggagtttcttttctcgatctgcttgttgacggacctggtaactccttgtgcacagccatgctactttaagttggcttggtctcttcttctttcccttttgtcaannnatcctgctagcaagatgttgtgtacctcttggtcactatagactataagtatgaaggcagactggaggtggatcgagctggctagggcaagaccaagtggctagccatattaagggagcactacctgggcgattggataagtccatggcaagccagcatgtggaggtggtggttggcctgaatgtggattctatggctggccagcttgttgaggacatggtcggctaggcctataaaggcccaattggtgttgtggttggatctcctctgcattcaattggctgtgcccctagcataattgacatagagcctttgtccagttctgtcattagctatacaagttctttcttggaaacgctttttactggtgttggagtaccacttctgtgtgttttgttgtgcaagattagacaccttgtagtcgtcctcccagtccatgccctctcgcaaggtctttgtttggaggtaagctgcgataggtgtcatcggttggaaatattttaccaggat

SEQ ID NO: 29394 - DNA, 2379 bp, Cannabis sativa
aaacataacttaagtattattactgtcaaaaattaaacttatatatttatttgctaccaaaaattaaacttatgcatttatgatgcatattactcaactataaaatacacctaaaaacatatatatatttttatatatatttttacattttttttaaaattattacaattttgtattatttcaacgttgttattatgctattgcaatgttatactatatttttgcaacgtgaaaacaactatttgtagagaaaaacgtgtaaacaacggtcaataagaaaaataattgtagaaatattaaaaaaaaaaaaacttagaattccataaaaatataattttttttattgttttttgatatttatgaaataatccgaaagacttgtgaacaaatatgtattattatttacactaggccctaaaactaaggcctaaagtatacacagaaacccaatcaatcaacgtaataaattgctttcccctttaaatataactaggcccgacaccaagtacttggactaaaatgaaacgagcaacaactatatggcctaggaaacttctagtgggcctgagcttattctcgagcccatgcagtccagaggggtggggatttcgggatagtagaatttacgtggtatatggcttttttaaaccttttatgataaatatggcatatttaactatggacccctttatatggcttttttcaactttggcaacagtttatggaattttaaagcccatacggctggaactattttgccaaaagcccatattgtgtgttttgtaatttctttgggttattttagtcattttaagtgtttaaattttttgatacaatttttttttacgataaccgtttattgtagaggggtttttgcatgtaatcatggtgatgtgatggctgcttccccattttaacttcttttttcagttttcaagtaacccctataaacctcataaaccgcctacctcataatcaaatatcactctcattttccctctctcctctgttcggtttccttcttcttccttctggtttttcatttgttttttttgctttttggctaccgattttgggacgaaatcagccaccttgtgttttgagtttttggttcttcaaggtattgcttctatctttccattttattaattttcagatgttagggttttttttttcattttcatttatctgttttatgaagtttttttggttgttcgtagagttttttttttgtttttttatagtgtttgttgttgtgttaaaccgacattgtgggttgatttgaaaatggtttatgtgttgctcttctcccttatttcccctcctgccacctttgtcttcttctatttccataaccgaaaaatttcaattcaaaatgtgtggaatacttgttgttcttggttgctccgatgacactcaggccaaaatggttccgtgttcttcagctttcacgcaggcaattaccattgctttatattaacttgattttgtttcatttctttttatatacaccgaagaaatcccttacttttgtgatttgggcgtttgtgtttgtgttaaacgttttgaagcccttttttcctatttcccaagatcggctttcctttttctgcttttctcttttttatttttatttttttgcaattttaatgaacattcacggtctttggttgatgtgtgtttgatggttatacgagaagtgaagctttgtttgatggttgatgtggattattaaagtaaaacatgattttattttggattttggctgtggttggactacgtgagctggtttttcaaagtgggttttgctctttttattattactattagctacaggatgatattgaagcttattataacataattataactcattgtgctggctttaatttgtttaattggaccaaagggaggatttttagtattgggatggaacacacaaataggaaaaccactgccaattttcctgttttacatttcagcgtctatatgattatgtttttcattccctgttgtattactttaggctaccaacgttttacgtggtacagtatgttatatatttatgatcaactgggcaatactttatggtttatacacacagtgtttaaaaaaaatatatatacaataaatgaaactgtactgtaatttatatctaatttgaggtacacattagacggattttatgcattttatgcaaatttgggtttaatgaacattcccttttttttatgaatcattcatggaagtgaactcgggcattgatttattgcaattttacttggaactttcctttttcctttgtttgtgaatattcactaagtcctattaagcgttgcattgttagtggaacaaattagtactgtgattatcatttgg

SEQ ID NO: 29395 - DNA, 994 bp, Cannabis sativa
attaacatatgttttcatggtctcagactccccgagcaggggaggctcgacgcccttatgaagggcgtccgagttgtcatccagctcgccacgtagagtggcgcctgtgttggttcccgcaagagtgatgatcctaacaccattgtcatcgtcgtcttcatcgtcgttattttggtgatcatggccttgattggagctcattttgtgaatgttggtaaggcaactagttatggctgacaccatatctctaacttcgcgatcgagtttgttcttttggtgttggcctcctcctcctccttctgaggatgagccactaggcttgactgtctcagccattggcatattttgtaagttttagaatgaaataatatgatacaataataacaaagtaattattatgagaaaagatagagaggaatggagtagtagtcttattaagacaatttattaggatatttgaaggagggtatggagaataaagggtttgccttattaacaatttaaggatataatgagtggtgttttttcttttagagttaaaagaaaaagagtcttatgtattatgagaacatgaccaaggggacataataaaacaaaaaggaaaagtaaaaggaattacttggtgatgggttcaaactatatatgtaagttgatctagacagagtgttaaattatatgcctttagtaactagtacgcttttctcttgttaattatcctttttttttgactgatcataacatcttacaataacatgaaatttgaaatactacatgtatatgaacatgtattatgtataaattgaatgttctgatgtattatatcagtatgtgttaaacgtgtctatggatacttaagccaattataattgatcttcaaactgttaaatttaccataataaatttattaattaattttattctaatactttttgttggaattaaatccaactatcactttcctaactataagtcggttacaaagaaaagcaacttg

SEQ ID NO: 29396 - DNA, 3763 bp, Cannabis sativa
  modified_base (2197)..(2198): a, c, t, g, unknown or other
taaatttacagtttgggttgctgctgtagttgctccagtaatttctatatagattgctatgtgaattttagttacaatttaagttgctggattactatgtagattttcataaaaatgtaaaaataactattttgaaatgtaaaaatgaaaaaactccaaaaaaaatttaagtaaataaggaaaaaaggattttttagagaaaaaaaaaaaacaattgataatttgttgttattttaaaaatgacgttattattattatctttttaataattaaatttcattatttttttaataattaaattttattagtttcttttaactaaaaaatttcattcaactaggcgagttcaatctcaataatgacagaaacatcactcgaaatattagagctaaaaaaaaaacaactaatatttaaacaagaagttcttgcaattttttaagcaactcgattaaccggttgtttaacaacaattaactaaaaaattcaaaagatttttgcaatcttccacaacacctccaaacgtagatagaatcatcttaggactacaaattgattggactaacaccaggcaatcgatctcgacgctactaaccattgggaaaactcgcttcaatcacgacaacacctccttcagagctaaagcttcagcaaccataggaagcacaacacctgtaacaccctatcccatagagacgccacatgtgtgattttataaactagtttaatactaataagttaattaatttattaaaatctgtgatgatattaaaaacttcaccaaaataaaattttaaaaatagacatcataacaatactaaaattgtgttctagggatccctgttgtaaaagatttacaaaaaggctaaatacgacaacaagtcaaaatacatggcaaatgcaatccaaaaacaactcttggaaactcggcacgcaggccagtagggtcaatatgtacattgctggagaagattgtcacctcatggatgctctagcttttctttgcctttacctgcaccacatagcacccgtgagtcacaatgacttagcaagaaaggtaataaaaaataatacatggaataaccaattattcatttcactattatggaattattgaataataacattcaaaagtgaataacataaccagccacacgtatggaaataaaagcaatcatatattacattgtctaatcatgaaattccatatcataatctagcatcatatatgatgtcgctgcattaactaattagatgagctcgtgccacaatctgacaccaatgtatcgctttgtctaaccagacgagcctgaccacaacctgtcaccaatatatcacatcgcctaaccaagtgagctcgtgccatatccaggcacctatatgtcactaccgcccgtgcctaatcaggatcgtcaacaagaagaaacctaacaacaatttcagtctgtgccatagcctggcacctatatgtcactgctgcctgtgcctaatatggatcaccaacagtaaaaaacctaacaacagtttcagtctgtgccatagcctggaactcacatgtcactgctacccgtggctaatcaggatcgctgacaggaagaaacctaacaacaatttcagtttatagtcatgactttataacagttgcctcacaggcacaacctggatataggtatccacatatctcatagcctactctggcaaattcatgccataacctggcattcataaatcatatcacctaatcaggtgcgcttatatatcaccttgcctaatcaacaaacccatgccatagtctgacattcttatgctgcattgcataatcaggcaaactcataccatagtctggtattcttatgccgcattgcacaatcaggcaaaatcataccatagtctaacattcatatatcacatcacctaatcaggtgagcttgtatatcacattcacattattattgcctaatcagacaatcgataattatgaaacctgtcatgccatgtggtacattatatttttcttacctttcatccatattcatgcatgttggccaacccaagtggagaaacctccctgatgatcttgccctatgtcacaacaacgataaccaataagtgtttattccaaaacactgcttaacacttgtgtaagacaatctagaattttctatcaaacccagcggtacaaatacactaaaataaaacnnatattttggctctaaaacatacaccatattgtagagctcgtcgcaagttttgaaacggtatatagaacatccaaaaccgacaccgagtgaaaattatgacaaaaatatgattcccgatttccccaaaattcccagaaacagcaaaccggttgggaaacggttaaccgtttcaccgcgaaccggttaaccgtttgcaccaaccggtggaccggtttggcagtaacataggtcaaaacttctaatttttgcactcaccgaaaacaccaccaaaacatatccaaatcattccaaacttcacaggacacatatataccataaatacaacaatccttacgtaacaaaaattaaaatcaagcccttaaatggaaaatgctattaacattcagatttaagccttaaaatattccaaactcaatttctaactcaaattcaacaagtaaacattggaactaatccccatagctacccaagaatattaagttagaatattcataactactctaaattacaaagccaatatataaaactaatcgtattaaccttaaaataaagccaatctttaccttaaattcttcctcttcaatgttatactatcgtgctactaccaaaattagaattaccaaattttgagttaaaaatcgaagaaaataaattaaagggaggagggtttcgtcgcaccgaaaaaaaaattgtttcgtacagttattatttttgaaaacataatagaggagtgctagggacactctctcttgcactctctctatagttaaatgacaaatgtcaaacttttaaattaacttatttgtacctattaattaaccataatattactatcttattataattatgccatcttaatcaaattaatacaataattattattctactaatttgattttatatacagatgaaaagttatcttttaatcttttcatcttcatagatattttctcgtataaaaaacaaagaactattcttcaatgaaataaaataggtaattagtactcatttcatctttttttcttcaatatatgtattacctcttaaatattatctaatgctaagttgctaacttctttttattattttacagttcaagctcagttaaaaaaaaaaagaaattgtacaaagtaacagaagtatttcaactcctaatggaaaatgtatgttttatttatgttatgtatatgttagttaatttgtagaactcttctcttttttttttatgtttgttatataaatacataaaaatacaatgtcatgagtttttttgtttttttctagcatatatatatatatatatatattaatttagaatactttatttatagataaatgattggtatagttatatgtttttgttgaatggtttatttaggatgcaatgaatttagaaaaaaaaattcagatataaatttggatgaatgcaacaatgaaaatgtggaaggttcacttaatgaaagtatggatgaagaaaaaacatatctagaaccttgcaatggtatggaattccaactcacacaaagaagcatatgaatttcatttgaaatatgctaagattatag

SEQ ID NO: 29397 - DNA, 2427 bp, Cannabis sativa
cggcccaaagtatttttgtaattttttttccttttttgtatttttttgtttttttccctaaattatatttattttcaattgtttatttattcttttattatttataaaatattaggtttaaaactgtatattatttttcatattcccaaaatcaatattttttttaatttgtttattttttttttagttttttcatgtgtatattttaagtgttgtatatataaatttatttatcgtataaattatgtttattttaattttttatttattattttattgtttttatttaaaatattgtgtttaaatctttatattatttttcatagtccagaaaataatatttttatttgtttacttgtaattgattctatttgttttgttttgttttcttgtttatattttaaggttgtttttgtttaaatttgctttatattgtgcttttatattgaatctagttttaattgatatataattggtaaaaattttgttctatattatgtaaaaattaatttgaatatcactatggatcatgttccattattatagtatgtcaatgtgaacatagtatatattaatgttaaaatcaatttgaatatcacttatgttttttgttattatatcaatgtgaacattattatgtagtattttaaattataataacgtttgttatttaggatattgttatatatatatttatgaatatttttttatagtaactttgcttattagtacataatattatttaatgatcagtttgtatgattttttatgttgtaaatatgccctctaatgtatacatttttaaaatagttttttcttacatattttttgtaattatgttatttttattgtacactaataatatatatataaaaatataggatcaatgccgcaatgtgacatcaatacaaatttcaatactagcattttttttctcaatggtataacatcgatctctatatattttgtacttaaattgttcacctcatcaagcattcttcaaaatgctacggagtatatagatactactacttggtaaggcaacaaaattagtgatttgtacattatttaatggggaaagaaaaatcagtaatatcttgcgtctccagttcaaccattttaaaaatttaacgttagtaaatattaataagcttccataaataaataaaaaacataaaaaaaaaggttaataatataataagaaagctcttaattcatgcatgatatttttttttaaaggaaaatccattcagcaccaacaaacaattataactgaataggcaagttactttcggcaagtttattaagaggaaatattcacattctacctagaagatgctttagtataaaaagccatgtaataagctagctaaacaataagtgagaaggttcgcatctattaattcatacatgatagtactagagatgtttgttacaaatggactcaaatgagatgaagtagaagattaaaaaaaatgatattgtctctttataattggattgatgataaaactaatatatttttatattaacacttttttttaacaaaaaattaatgttgttacttgttattgaacttgtaatattattttgggatatgtattcttcttggatgccgtctaagggctttccatattgtcatcatgctactatagttatgattttatatatttcaagtattgatatgtagggaaaacttttgaatagtagtacgtacgtagcttgaggtttcttctctaattttttgatactatgttagtttattaaaaacaaaaccaaaaaggatataattagttttttttattttatttatttatttattaattttttatagagtatagctaaaaagtactaagacaccaatataaaatcgtgtcctataattagatagcagtaatttataatatttgttaaagtaaaataaataagacttaatattgaattacaccttagactattttaatgaacgatataaaagttgagctatatttagtacaaaaaatagttttgtaatatttttacattaagtatactattgtactccaatacataattgtaaatcttgatgtaaaattaaacatgtcattttatgctcatgaaataatttattaaaaatataaataataataatgcaaaagtaaaaatataaaataataataatgcaaaagtaaaatatatatataaaaaaaaagtaaaatgttctgatagaaattgatagtttggtttgtgttcaggctatctagagtgatagagtgagttgcatatgcagtctgagtttggttcattggttaatgattgcagaattactttatcttctttgagtcatgttactattcaatttgttgaacgatctgtgaacaaaattgcccattttttggcgcgtagctcttgttttttctcaggtcgtacttttcaaaattatcagtt

SEQ ID NO: 29398 - DNA, 1076 bp, Cannabis sativa
aactaacttttttaaacaaagaaattatggaagtgaaaaattagaaaaacttaccaacagtggcagaattgaaggttgtgctcccatcaacaacattcctactggccgtgataatggtgttttctcgtccatctcccaaaaacataatattcttctttttcttagacacatccacattctccctatacacaccagccttaattctgatgatgtacctcgtcttactattatccggcgccgccttcaccgcctccgagatagtcttaaagttcccactaccgtcggcagcaacaacaacatccggggtaacactagacgactgcaaaagccttctgtccgcggccgaaagccactgaggccagccgtgttcgtcaacggccgtaaaatcatgatcttcacggagtttacggccattaacggtaccggtaactctcattctctcggtggcgatgtcggtgtcggtcatgttcttgatcatagcaagtacgttactacacatttgctcaatgtgtatctcgcctttgagcaaagcctctcgcacgtgctgatcagctttatcgtgcgagaatccatccaaacacgtctcctgattggtcattgctgagctaagtagtgtcttcagatcgtctgcgtgttgggctaacgacttcttgttggggtaatcttctagatcctcttgaacttcgtgaagctcgtcaagagtctcgtcaatgttctctaaacagtcgtggagagcagctttctctctcttagtcagtcctttacgggttttgtaaagcttactcactgtgaagtagctatgttcaactgcagtgattgtcaggtttactgaggcttcgattacatctttttgtgacgaaacctttttggaactacctgccgctacggcagagtagcagagctctggaaaccttgttatgctacatgagctttttagtatggcgtgagtttttgggtcggtgatgaggtcaccattgttttgagattttcgggaattcactccggcgacaatgccgactacggcggcgactacaactagtgttgcgaaaagagctagaaagaccttcttgcccttt

SEQ ID NO: 29399 - DNA, 3595 bp, Cannabis sativa
  modified_base (3190)..(3191): a, c, t, g, unknown or other
tgagtcggagctaaccaggtaagaatcagcccccaaatgctctaaagcctcctcctttttcttactagaagagcttatcactgtcacatggtgtcccattgccttggctatgataacccccaaatgcccaactcctcccaaccctaatattccaactctcaacacatcctcatttgaataccctttagtgaattgtttcaaaggactgtaagctgttaccccgccacacaatagtggagccgcctgttccggtgctagtttgtttggcatccgtacaacaaacctgcgagaacagtacacatagatatgctcttagtctcgataaatacctaacaagaaacatgatttgtttgagattttgcttacgcttggtgaaccaccatggtagaggagaaacctccatgggtgggagctccatctgggtaggtgccgccagtggtgaaaattctatcggcgcagtagtgttcattgtttgatttgcaggaagagcatttcccacaagacccaattatgcagcctactcccactttgtccccaactctgaattttttcacttctgaacccaactcttcaacttctcccactacttcatgactacaaatacaaagaacaagcaattttactattcaagttaattttcatagtgagatggtaatatagtggattttttgtagtataaaaatggtgagttcttaccctggtaccaaagggtaattagttgaatgaatctcattcctcatttgatgaagatctgtatgatcaattccacagtacaatacctttatcactacatcttctggacctgttttcctattcatttgggaaaaaaacattaattattttttaggtttaatatccaatttaacctatgaagacaaaaatcacctgagattgaatgaataggaagacagaagcccagttgtgtctcttgcagcccaaccaattactcttctttctcccattttttttccaagactcaagatttgtaataagaataattgagcaagtttgtgaaatttggaagatggtgtgacttgattgatatgtaaatgcaaggttttatagtccaaagagtcaaatttcatgtacatttattcaaagaaaaatacaataatggaaagtcttctttggttcattacttcattcaatgttttcagttatgttttccgagtagataatgttgttacaaatatacattaaacactttatttatatagcaaatacaattttgatctttatattttgtaaaagttattaattagattgaactttctgttttgttaaatgataaattggactctgtatttactaaaatagtattaaatagtatactgaattattttttttgtaaaattaaacttaataataaccatatacagatgtattatgacaaaactcattacgtttttctacaaattgagctaaggtcttatttgtagtattttaaaaaaatattaaatttattttatcatgtaacaaaataataattctaattaataatttttacaaaatataaaattcaaaataacataagccttattaatatactatttgattaaaatgttccacaaaataataatgggaccattaatattttgtgttctttagtggatattatggctcatcaaatacgtcatggcttatattgttatagcccccttcattttgtgcataagtaaaattaatatttaaaattaccaaattaatcccaatataatacaaagttgtttggtccaaccatagaatattgtttttaatatgaagtggaactccataacttcaaagatcttcaacatattataatctttgtttgttgaccaacttaattagtattattttaattacatgtcccctaaaaagataaagagtattttattttatggtatatgctcatcaaatacgtcatggcatattaaatatagtacatagctctcaattcttacctcattaattatgtctacataatattattagattcctaactcaagatattttacaattagttagtaatatttataaaaactattatatttaattatatagaatttcatatttaattttaccaatagtgatgtgatgttttagaaagtgctaaacatcactaatgtattttaacatttctctaatagtacattagtactaaggttgttcattcaattcaatctgcactaagtgcatatttcatattttagatccaatctaatctacacaaaacctcaaattcaatctagtccaattctccaatagcagagggtcatatcatatgtgcgatcatttatttcccttaactttttgttcatataaattttatataaaaatttttaggtattgtacaatttgacctcataaaaatagattcttttttttttttatctgtgtccttacatatttttatttatatccttttaaaacttgtatttttatttttattcttacaaaatttgtattttttctaataaaaattatatatttcattaatacttaaaaacttagttcaatttttccaataaaaaaattgtcaaataaactcaagtaggaattttaagtggaatgaaaaacatttatttatttttgttattttgatttcttgaagtataatccataaaataataaaatatattttttaaaaagtaaagttttggtaatgtattttaaaaaaagtgatgtatggtgtaatgtaaaataaagaaagtaaaattttagtgatgtattttaaaataataaaataaaaaagctattgagaattcaggagtgctcttaggtggcagctttgcgagctttccaaccaatcaaaatagtcccaaattgttggagaacttgggatgcaagacatccctctttaccatatagattagaagcaatttttttagaaaagtcaaattacatatactataaaaaaatcttacgttacaacagttgtgactaaaagtaaaaaaattgcgactaattataaattatcattctaatgttgtgataaaaaaatatgtaataaatcacaaaaaaaaattgtaattaaatgtattaatcacaaatataataatttgttgtgactaatgtgactaaatatatttttaatcacagtatttattgtgatcaaaactaaattaataacttgtatgtaaatatcatgttttagtcatataatttttttgttgtgactaaaaaaaacatttagtcacaaaaaatttannttgtgactaaaaaattatcacttatgtaacttgtttttagtagtaataagagttgttgaacgaaaaaacagaagaaaagaacctataaatagtagttaaaacctatatatttatacaactagcagtctcctataagatctacattaatatataataacataataaattaatataactatttaaattaatcaccagcaatatttttatatatatatatatataatttcatggccactttctttgaatccaaacaacccaataatgcaactcagtaactaaaatcactaataagaaatctcactcatgactcacccttctactacatagttaagagagagattaagctaaaaagcagaggaaaaaattaatccaaaaataaaattttaatagtaaactaaaaatta

SEQ ID NO: 29400 - DNA, 7629 bp, Cannabis sativa
aaaaaatctaacttattaattcctcatgactcaataaagacccagaatcacactcctaatttcatagaatactctttatacataatctagatacgctataaattattcattatttctatcatatcaatcaatgaccctctatagattgcctataattaaaagggattaaagttaccattttattcttaaaacattaagttcatataatgatattttagtaaactaatttaaatttgaaatgagcgctctgtcattaaatgcttcaaccaagctcaaagaaaattattgttttacttaaacataatagaagtcatagatgtccatatctattactgacactcccacaattatgctactgagttcctaaaatataagtataggctagtctgtagggtaatctagtaacgaacaagtcaaagaactcaaataacataattaactcaaagcttaattatgtcaggattcatatcaaattgatttataatatactaagtgatattattggctaagaatagatataacgatagattatgatatatgttctactgtcaatatcagtcaaattcgatataaaactttttatctgattcaaataattttattgtactgataaatctcatgacttgaatatttgaatcatataatcacacttattttccaatattatgatgatatcataataattgtgaataattatatgttttgaatttaatagaatttaaatattaaacatataattaggtaaaaaagaaattaatgtgtgaatcaagtaattgacaaagttataaaagattttctatttttcttactgaataagtaatgacattacattgaatacttatatttaggacaaaaaacctaacaacaacttcctacgtacactcataaagaaaacaaacgcatggtgagttgtttttcacttgattctcgcaaatagggcaaaggtcatcagtacggagaccatgatgagacaaattaattttagtaaaaatccatcttgaagaagctttccaaataaacatcttcaccttatgtggaatattgaggcctcataatttcttccaccaaccgaaaaaactattagaagtgaaagtatgtcccaaatcaagttgacaaacaaccaataaccattacccacttttaactgtgtacaacctcgaattttcaaattttaactgagcttgtcaatagtaggtataaaaaggccatgaaataaaaagaattattgaaacctcattaggtaaataaaaaaaattatgtacaaaattgccagcccatttacttgtgtccattttgagagaagaaaccacactatcaactcccatgaaaggagaagatgcactaaagacacctaaggcaacggtatcctattggaaaaataaatcagtgtatctttactgtttctaacttgccaaatagaccctaatcaaagagcactttaatcccatcaattattcatacaagcaaaagagtttgagaaccaagttgttgatgctttagccaattgggctagagctacaaaggttaacaacgctgatttgttaagagaaatgcccctttgtggttacaaatttggcttggttttaattaaaaaaggttctacttatcaacaaaaaaaaaaagagacatgattaaaagacttagaaggatgataagtacatcaaattatttagttatacgcgtgtgtccctaattcaaattcgtttcttctttttatatgactattcaattcattgccaataaaaaattaggtttataccttacatctttttgactattataattttctcccttttagactttaggaggacatattagggaaagtgcacttcctttgaattccttgttaatgtttctctaaaaaaaaaattcctccctattgtcatatcatgtgtataatatgattaaagaatgtcatagttttcctttttcacattctcacttacaaaaatcaaacacaaaatagaaatgacaatattttaccttcaaaccatttacttgtaagtattcacccgtataaatagcatattaccatttaaataaatgtttaaagtagtgtagtgtactctgcctattccctacataattacccgatcatatatatttatattattttaatttgtttatagttacattatttaaacatatatgatacattcagtttaaatttacatattttaattattacttatactaaattttacataattttataagcataattaagaataattagtagtatacagttactttagatttggtagctagggttagccttggctgattttatgctgcaaaaataataataaaatagtatgagttttgctattgaaaattagtaatgcttaacactttttataagagatgctttatgattagttaatgatattttttaaaaattattattttaaattatatttatatagatatgacaccagtagtactttttagcatttattgtagaccatatatccactacctacctatttattctgatctctaccaagaaaataatgagataccatttttttttcttgcattttctttttcaaaattttattaaaataacattaattgaactctaaattataaattatacatcactttttataagtgttgaagaattatagaataaccactataaacgaatatgtttgattaattaactcttcaataatttttttctttcaccggcctactgcaaaattttcaacaaaattatcaaaatgatttcttaaaggatcaaatatagaaataattgactgtaattgtattttcaagtgaaagtcgttattgaatgttaaaaaaaaaaattcaactgattatcaatttatcattattttcccaatctctataaataaataaaaaaaaaattgcaaatagcaatgaataattaagatactctaattatttgaatcaatgcttaaaattattattgaacctgatctggaactatttaataaaaaagacagcatacattactggatgaacacgatatgatcattaattaataatataactgagcacaagactcttacacttgttgaaaccatcaaaatttaaactcactgatgagtaaaaaaaaatacaataagtatatatattaagtaatatataattatgcattttcaaaaaatataattatagttctattggcaatttatatcttggacaacttttttatccaaattaattgtgaaactacaattcatctcagaagatctatttctcttgatcaacttcatgaagtgaaatgtcccattcatcttggccttactagtcaaagttaaaaaccccgattcaatatcatcatccaaaatcaaattttttgtcccaatctcagctgtgaattgaatcttcttagttgaccgaggtttgacttttccttcctcaactaacacatcaccatcggccaaagcaagatgagttcccctgtaaaagaatccaacttgggttttttcgaaatcgaaatggccaaagttggtgttctttatgccaatttcagcttcaaatttcatatcaattacattatttgagctactcttagtagtgagctcatcaatggtcattgatcgaattcgaaacttgggagtgtggacatggaagattgttgttgtaaacaccaaaactacaacggtaaagagcagtacgattatggttgcgatgcataatcgtttcatacctctcttttggtgtaactccttggaatttgactcatccattgaggctgtttcgacgtcgtcgttttgagctggatgaacttgttcagtattattccttgacatatttgcatggacgtactatataatctctctctctctcttttgcaaatacacagaaataatcgaaacaaaactactatagtctagctttattatttttgttgagaattaatttggtgacactagcaatggatttagctatatttatagtcaaattggaatatggggagtaatataataatattgttatattatgccaaaattttcaaagcgtggaaattaaaatgtattatattttgcatagggtgacttggcgagatactcatcctaggatttggaccaaagactagtcaacttgtattgattgagcgtatatatataacgtagatattatttaacttgatttccattgtgatattataacatgaaatttaaattaattagtaattactgtgagcaactgctaattaatacttaataattacagttatatatatatatatacaatattaatttaacatcaattattacaataagttcaacctaatataaatacttaaaaaagataacctacttacttttttttccttacattggggctaatcttatacataaagcttacatttaaaatttacagaaaaaatatgtatgattaatatatgttttatttataaaaggaaaaacaaatattaataattaatttgttaattatgtattgacatcatttgcattaacaaatatatagttagtaatactaatcacaaatagttggtcgacatgatttccaaaccaagatatattaaaggaaaatgaaatgtggtcctagtccagttaatcagtgactctacacttctcttgagatcacaaatttgaatttttcttcctgaatatcgaaaaaaaaataataatgaaacgtttttttaattaaaatgcagaatacagattatagtttttcccactatattacacaggtgcttgtttaatttttactatctttattttcttagagggtgcttataacaccataacaaaatcatgatccacgagaattttgtattgtgttttccatcgttttcaaatagttggtattgttttgagaaaataatttttaaaaacaaaaacttttaaggctatttttctttgataatcatcatttttttttcaagttacttatttcataattataacaaacttttaaaatatttatctttctttgaatatatttattattattttattgatcaagttttttcaaaataaaaatctaaaaaaattaaaaaggattaacaaattttttttaaggaaaaaaaagtagaaaaatttctgttcttgtattttaaaaacaaaaaaccagaaaacaatacaaaaatgatgcttaattatttctttttaagtatattgtggtttggtggaatgaaatggtaattgtaatggtaatagcaatgtaatgaataagaattgtaataggcattaattgctatgattggtttgttattggaatgaatattagaatagatagtaaattaataaaattatccttactttagtaagaaaaaaataatggtaaaatagtcattttaagtaattgtaataaagattcatgaagtataggagtgtaatcacttttcatacaagtagccgaatagtaattacactagaatatcattacaagagtttaattaagggcaaaccaaacatggtaggaagattctattacaacaaactaaagattctattaattctgtctttctatttttactgcggaggtggtccaaaggaagacccaaaagaaaataggcatatgcaaatccttaaaaacagaacactgtgtcattattttgttagacttgttggaaaaggatgtatacttgtaaattcacattcaatgtatatggaataaaacaatgtacaacatatgatttttcgcaacaatacttctaagtagaatctctatgggcttgagtaataattttgactgatcagaatattccacaattaagtattagtccaaagctttcatatagatatatgtattttcacataatatagtgttgaatggaaaattgaaaatctaatagagcaatttttaaagacactttgatggtgtttgacaatttttttttttttcaaaattgtgtttttagaaataagaacaaaaaataatttttaaagttttcaaaatacaaatggtatttggttgatttatttttttaagaaaataaattattttaatttattttttaaaaaacaatctaatactttgagattctgatatgaacaagacacgacttggatctagactcaaattcggacccagacccaaaccttaacactcgacccgacccggcctcggacatggactcagacccatacctcggcccctaaccccatctatggcttcgacactggcctagaacatggattcaaactctggcctcagacctagacccgtaccccaactccagagacaaggacccgtaccccgaccccaaacccagctctcggtcccaaaaccaaatcccggacctcagacccaaaacaaaatcccaaacctcggacccaaaacaaaatcccagacccagacctagacatgaaccctggcctcgaccacggaccttgatgagagagaaagaggtgagagaaaaaatgaggagagagaaagttgtgagaaagaatttcaggagggagaaagtgatgagagagaaagtaatataaaaaatgatgagagaaagtggtgagagagaaaatgaagagagaaaaagtgatgagggagaaactaatgtgaaaaacgattagagagaaaataatgtgagacaatgataagagaattaaatgacataagatatagtcgataaaaaaaaatattgataaaaagataattgtgttattaaaatagaaaacaacattttgttgttctcacaattcttattttttgaaaactgtttttaaaaaaatattgtccaatgcgactaattgttctcaaaatataattttttttagtcatgatggcaaacatgtatttagatatttggtattatgtttatttttcaatatttaaaattaggttttcaaaaataagaaaaaataaatttatagtttgtaaaatataaggcgtgtttggttaattttttgtaaacattatttttggattttttttactaaaataaataaataaaacttcattattccatatctcgacgtgaacccaatctcacctggaccccagcatagactccgaatgagccaaaaattttggagcattgggataggggctgtatttgcaatgtgtgagagaacccctcaatgttgtgaccttgcaattaaagatcaatatggtgccttatatcagaagtctatgtgacattgtgatggtcaggcgacatgttctgttgatgattacgacagtacaagatggagatctagcgacataaggtggtttcactggagggaaggccacgagtactattgtcattggttttaggggagaattgttggggtatcaacccaagtccaatatctaaagaataggaaagagttgccttgaatataagtgttccacatactcctttagtacgagggtttttagaaaagtgtccaaaaacaaaaaatcatgaggatttttaggcccaaagtcgacaatatcatactaatgtgggagttaaggtgaggtggcagcccaaccaggtcgaaaaataaggcccaatagccacagacccaaacatagacctggacttcaaaccctaggccagaacttgactccagtctaatctgagtctgggatcggtgcttagtctaggtctggggtctcggtcctagtctgaggtccaagctagggttaaggttcgggtctaggttagggccaaatctgggtcctatagtccaggttggggtgaaagtccacatattg

SEQ ID NO: 29401 - DNA, 2278 bp, Cannabis sativa
ttaccttattaattttttttggttcccatcaatgagtattacccattaagaagtgttccaatagtatatatatgtattaatgatttgttctaaaaaatattaagaaaatctttaaacataagttaataaaataaaatgtggttttatttaataaaaacttaagaatatgaaaatatttttccacacaaacttaaattaaaaagaaaacataaattaaataattctctaattattttcatagtaaaattaagtttcaattttggattgaggttggtcgtagggaactgaaggcaatagaaatgttgttattgattaggtagtcaaacaaatagataattatataagatattaaaaaatttacactttttttttttttttatatatatatatttttatggtattttataaaaatataaaaaataaattacatgaaaataaaaaaaaaaaaaccatcaaaataatattaaaacaacataaaaacaatataaaaatgataaaaaattaacaacaaaataacaaaaataaaacataaaattattaaaatactgtattttatataaataaaatctaaaaaatcataaaaatattgaaattccttccagacatttgtattaaatttaaatttgataaagttaataaatttaaaataatgtttaatttagagtaagtaattaattttgaacgaaaagataaaccatatttagatgcatattaggttgggattttaaaaacactccgtctatatatatgtaccttttcttttacatacattctcataacaataataagagctcaaaataatggatcaattatctgaggacgtaattgttaagattttctccaatttaaaggccaaaaccattcttacaaatttaaggttggtatgcaaacaatggcgtcaaatcatcgatgaaagctattatggagtccaattagcagagaatctcttaaataaaggtgttgatgaacaagaccctttactattacttctcacccaaaaccctaacaacaacaacaacaacaatgatgcctccacagtttgggatgaagtaaataaaagaagaaggattaacgccatcattaataacatcaataaccttaacatggtttcaaacgatggaatatccaaagaaaaggtgttggagattaattttaaccaatttccatggcccgaagaagaagacaaagaagaagaagaagtcttcttggagagttctttgcatggcattctttgcttcacaaaaaaaactaagactaaaccctatttggctaacccttcaaggaaagagtttctagaattaccatctataactccttccaaaattcgttattgttcttacggattagggtttgataaatcatctagaaactacaaagttgtgagtgtttttctcaattcttctaatgataaaattgaagctatgatctacacacttcatttacgtgatcatgataagaaaaaatcatcatcatcatcatcatcatggaatatgatcaccaaatcacaacctcaatgtcttccaataccaatgccaaagtgtgttaatggagttatttattggattggtttgcgtcaatttgataatactaagccttacacttacaacactcctcttaacctttgtaagatcatggcttttgatatagagaaagagaagtttggattggtttctttgccaataactaatattgattcttttgaattggctcatcttaataatggggttcttagtttggtggattcttcggataagactcctaatcatcgcgttgagatatggaatttgaaggattatgagaaagaatattggattaaaatgtataaattagaatggatcaaattagcaccacttgatcaatctcctttctttgctaatccattaagagttgtggggccatgggagaatggtcaaatattactatgttatctctcaaagtgttttatgacttatgatccaaacactgatacatttgaaaaactaagttttccagatttacttagtaatgaattagtgaaccaatatcatacctactttccaacactgctttctctctcttggttcaatcaacatcatcaacactagtctatattattttagatttagattttgtctttttcttcttgaagcaactattatgtagtagtggctcaacttggaatttatgtcatatgttatcaagattatgataatgtaatattcctaattcatttgattaatagattttaaaaaaagcatttttgatttgattatgcaattcatcgatcatatgtagttgt

SEQ ID NO: 29402 - DNA, 1465 bp, Cannabis sativa
agcatcaatatgacaaaaaacaaaccaaggaggaaactcaacgtacattgcactttactttggtaataagagaactaaatgtaaaacaatttcacaataagtgccattcaacaaaccaaatctcagtcagaatgttttgaaaccaataattgacaagcaaggcataaaaatccatgttgattaattttccagaatattgattacttttctttaccccttataattctacacaacacttgtgatgactttttttttttacataatgagcagaattaattattatgaatataaaataagaacatagaaaagtgctaagatcacttagatttaccaagaatattaaaatataacacatcacacacacaaaagcaaattggaaacttgcgaataacagtaaatacagcaagaatgatataaactagtacctctgagatataaattggaacgagaaccgtgtttacacctattccaaggccaacaagaaatctcccccagaggacttcatacaaggaatgagcttgtgcactgtcaccagatgaaacgaatcaataaacaaaattacttcaagaaagaaactaacacataagaaacaataagacttaagattggtactatgcatcaacaaaaatgaaactatttcaaatgagaatgacagcacacttatgactctttctaaatctggctaccatggaaattcaagtactatccatcaaaattactgctaggcaacatatttaaaaccttaaaccattgacattcatattaatatcaggctcgggtgctatataaggtccaataaaattttgacagattaatttaatcttctttaaaatttgacttataaatataaagtaaaaattgacttgcatagacagggtggttgtataaatgtcttattgaattgtgtgcaatttggttatagtattctgtggcaagttcacagacccttatttttcattttcctttatttatttgaagtcaatagtatcaaaactcaaaagcacatccccttcccaaattttccagctacaagaatataaattcttggattttctagaacaaaccatgtctgttcagttaacaaatatatttatattccaagagagctttcatcttatcacaaaccaaaaatcaaatagagtagctccttcagaaaattatgaaacaaacaataccttattaacgcgccaagaatcaaagggatggtaacaagttgaaaggtccggcggcacccaagtttatcaactattgaggcagagcatgcacttccaagaaaagcaccagctatgaatatactcacaacaagtccttccagaattgtgttcccttcaaaaccaagttctctcgcaacagaaacaatggggccgttcatcactctgatttttatttatttattttttttttttgaaaaaaaaaagcaataaaattaaaaacccacatttaaatccaaaatttttattcccag

SEQ ID NO: 29403 - DNA, 1268 bp, Cannabis sativa
tcaaacgaaagctcagccagaatggtggcagtgatggtaatgaggttgagactgttgatgaagtgagcatggaaaagggagagaatgtgttggctgaaaagaaaaagaaaaagaagaagttgaagatgaagaaaaagaagacaaaggaagcacagaaagttgaggatgttgattctaatgctggtgatgtggctgagagcgaagttaatgagactgaaaaggatgaaaatgtggaacctgaacagggaagtgagaagactaagaagaagaagacgaagaagaagaagatgaagaaaaagaatgtgaaagaaactcaggaaaatgatgaatccatgcctggttagtgatttagtgttttgctctatgtttcagatttaaggtttattagcatctctattgtgtgttttttcttaagtttttattcacaggcttcatgacaatttaatttttcttaccaaaaaaaagaaaaaagatgatcaagtcattaatcctctttagagttttaacttaatgttgtcattgtgcttgcttggtctatttgaaatttgaagccctctctcactatggtaattatttgatgctaatgtttacatggtgaacagtttgtggtgaataattttccttttccaaaattttcatagatttcaaatttttgtaagttctgttctcaaacttatatggtggatctttttgtgccgtagtgatgaaaattttgataattttaattgagttgaggaaaggaagaaagaaaataaaataaatgatgcccttaatttaatgtgtgttgcctgtattgtagtgagcaatgcggaagatgatgctgaagcagagcctgttgatgaagctgattattattcatggaatgagttgagactccaccctttgattatgaaatctatatacagacttggattcaaggaaccgacacctatacagaaagcttgtatacctgccgctgcccaccaagggaaggttagttaagactcctgttcaatttttcaatgtggacatgacagcagcaggtttatagtcagcgtgctttcatgacaggatgttattggtgctgcagagaccgggtccggaaagacactggcttttggtttgcccatttttcagcgcctcttagaagaacaagagaaggctgcaaatgtactcgaagaaaggaatgatgaaggagaaactattacccgcaaagggtttttacgggctctcattattactcctacaagagaacttgcacttcaggtaccttatcaaatttatctaat

SEQ ID NO: 29404 - DNA, 2949 bp, Cannabis sativa
  modified_base (1344)..(1344): a, c, t, g, unknown or other
ctctgattttggcagttttgcagtttcaaggtacatcaacattaaatgaccatattttccacttctatttcaaactttgttcgcaggatcaaacatctctctgatccgacgaaaatgatttcaagagtataaaataagaaaaaggaactacctttgcattatttcttccattttagaaattttgaaaaactctcaagctcctttactgaaaaaccagcactgaatttgcttgagaatttgcatgccatctctgtccctgatatttttttttttgtgagtttcctccgacttaaattctgacttcacacgctcgaagagaccctcactgcatccaaggatccgtagaccgaagagttgtcctcaaaccctaactccgaagagtaagtggtttttcttcttaatatcttatacgtttgttaagctgcatttttgggtgttattgctaccttgtttgtatatttcattgccatctcatatgattttagtaatttttagggttgaactgtatttgggcaaatattagggtttagacaatacgtaagtcttacagaacctccaattcaccaccttctggtttgataaaattctttctaaggattgggattgccttcttcttacagtaatgtcccaatctggttcagaagtttatcatccagaagatatagaaattgagtttccagcagaaattgtcgtcccttataaacccaacctttcaaaacccacatccaaattagagttaaacgatgataggattaaggaacacttagtgaaggtccactaggaaaataatgctagtcgacataggcgcttcttgcaagaaataaccgaaggcaaatgccgtttcttgcgagatgaagcttggcccgaaccccacagtgtgtcctctatacctttggctaagcctttgtttttacccgaagtcacgattgcttttgaacaaggtgacttggactttgaaataatgtctcccaagccacgtaaatcaaagactccacaggatcctaacgtcacttttgaggccgagttaatagaatcgaaggtgcgaactatctcaggctacacagccgattcactaaggacatgtggaatcgattataagcagtgaatttagccgttacccgcctgcgcgtctcacaagcgagacgtctaagggggccaatggcgagaccaatacgagtggctcgactggtataggtgcttagagttttgaacacatcaagacaggggccataattcccctccgtgattatttaaaggattacttaaaccacctcgggcttgccccattccaactaaatcctgtctcctacaaaatccttgctagtttgaaggttttgtataaanttctgaagtgggagtgccctacgcctgtaaaaatcgagtatctctactccgttaaggttgttctagtgaggaagaatgtcgcaagaggcttttattatcttggtactcactctggagagcctaaaattattgtggacttgccaaacaaaatacctttcaaagataacttcttttggacatctggcctcttcccaatcgacacaaccaccttctacaaaattcgtaagtgattgttttcatcaagtttggttagattaatccatgtcttttcattataagtcatctaactgaggtttttttttttacagccttcttgaaaagacctgtctctactcccgagatggccaactggcgcaggctcttgtttactcttcctcatggccttacagacaatgagtttacttgtgattacaaatttcccaagtattcttcttggcagcagattcccgttccagagggggataaggcctaggattgcgtggctcgagcataataccttcgagacattgccccttgggaagccggtgaaggagcatcccgaggtaatcaatgtggttggtcacccacaatatttagggctgagcgtaccacactagttacattttgagataactgccttaatatttacatttggcatcctctcctcatagaccgtattactcataggtttgacagctgataccctagattccatgtccaaattaattgtaatgagttgtattatggcatagccgagcaatatggcaccatgacaaataaggcaagtcaattaggcgcgagttgggatttaggaccaatcgagccctttgatatatacaagatcacaggttgtaggaattttagaggatactacggtccttctacctcctcttctagtgatagctcaccttctagtggttttggtaaatttcttaggtggaaaattatactccacactcccctttcatctgcctctaaataattgtaacattttatcttgtcttgcagatatgcacttcgaggacgtcatgcaacgaaaagggaagaagagggcaacccactcagggtcccttcagacactgaggtggagcctctaaaaaggcaaaaagaaaactactgctcataaaaagaagaaagtctctaagcctatcgaccttaaggtctctgaatgaacaacttcctcctctgctaatctaagtaccaatgagcctcctcccaacacaactcacgcctctgttttctcgagccaggccatcaaaacattgtctaccgcggtggggaagattggtttggaattcacccaggagtttgggtttgcctgttggcgccaactgaaggctctcttccctcatgattgggattcaatcaatcctggggattcagaagaaatgcttatgaggagcatgtatcataccctcatggtaatttattgtcttagtccatatatttctctcatttttccccttcgtctcttatatgcctttgcttgtgaattttccagacttctttcatcacttttgtctctcatcggtgaatcctaggtagagatggaaatttataccgcggggatgggtaaccgtggggacccgcccctaatggggtggggatttcctgtcttggtggtta

SEQ ID NO: 29405 - DNA, 2968 bp, Cannabis sativa
  modified_base (653)..(656): a, c, t, g, unknown or other
ttttttttttttttttgggggggggtgggttttttttttttttttttttttttttgttaagaaaaattgatttttgtaatttaaaaattttataagtatacttttgtaaataaaaaggttaggttaaataaaagttagtattttcaaaataaaaagtaactttgtatacttgtattttttttttttttttgaaaaagatatctctttctagccttttattcttgaaaaatgctaagagcattatggtgcctaagtcctaacacccttgtgaggtgtaatgtcgctattagtacaactcaatattgggttctacctgttttactttaataaatattatagaaaattgctaaccaattatagggtaatactttatcgtagtgttaagcatcatgtgtgtcacatagcaatgctctttattctttatagaattttagtagcactcacatcaaatgctttaaaataaagaaacttttaaatatttaaagaaccaagctacaaatacactttctaatcttttttcattttaactatccatccacgctatatatacattgaatattattcattattctaaacataatttattaattatttagggcttgaataattttttttatattagtatatgtatatatattaatattatatatttnnnntgaataaaatatattaaaatttaaaacaagtgagattttaataatgtaatttaaagaagttagtatttttaacatttattaagaaaatatgtatattttttaaaaagtaatttttttttatttaggcctctaaaatgagtgggccttaggcgcgggcctagcctgcctatacttagagtcgaccataggacctattacaaagtctcaccactattgatgataaaatattgctattagacactatatttgtcaacacaatactaaggtattacaattttttttatattatttattaaattaaattacgtgaaattcaatattaatttataatactatacttaataccataataagatgataaaataatgtaatgggatctaataatttatttctaattataggatatgatagtgtaatttagacaccactactttaaaccataattgttttgaataaataataatttaaattacattacattagaaatttgaaaatgcatgactagaattgggtagtaaataaatatgtagtaggatcatataattcattcatttaattgattactatttagccattattgccttcaactcaatcaccaaatccaatatgaacttatcttgaattttcttgtccaacaaaaaactacggcattttccatgattcaatctcacagtcttaccaggctcctcatcaaaatccaccattatcttcttcaaagcttcataaatatcctctttcccaaaatacccatcctcatctctcctattaacttccacaccagctttcaaatccaacccaatcagcttcgagttcataaactggtctcctttaaatggcagcaaagtcaactgacaatcgttgaccaaagcttcaacaatggaactaaaaccagagtgacagaggtaacacccaacgctttcgtgggcaagaatctgctgctgctgcacccacccagagtgcactacacctctgtctttcactctttccttaaaccctttaggcagagctcgttctagctcggttccggcgtcgagattcgccgggaaatttagaaccaagatgaatggtaatcctgtttgttccaatccgagtgttagctctctgatttgattgtcgtcgagaaatgtttcgctcccaaatgagcaaaaaactacagattttggcgggaaacgactgagccaagtttcccatttttcgtcgagctcgccggacggtggtggctccgggaccaggggaccagtcatcatgattggttttttgaattgggttttcatgaaatttagatatggaccttcgatttctttgcaggttttgtatatgatagctgagcaaccagttaagccggaaactactctgtcgaaaactctccggtcgccgtcgaaggttcgaaacatgaacaagtaatctctggcttcgaaggttttgagacgaatttcagagctttgaggaaaacccaatggaggattcttcagatcttcgacggtgatttcttctccttctacgccggaaagtctggccggaactgtaatgtaagcaccggaaatggcacagaaaacagagaaaaacagagtcttgatacccaattctgaagcaagagaaggaagccagtactgagcaaaatcaaagacaatgaaatggggtttgagatcagttagaagagatttgatctggggttgcattagatcaatagctttgatgaggtttccggcttcagatgggggaagatcggaagttccggcagttgattgagtgaggccatgaatggatgggatttgaagaggaatgatttgggttttgggagagggaatgagtaaggattcgattcgtgaaacaaagccaggaatggtgaagaatgagattcgaactccatgagaggaggagagcttgtttgagagttgaacaaatggacttatatgaccaaatgcgaagaatggaaacattactaagtgaagttcatcactaaaatctttggccatctttggaaatataatgtcaaaattgccaaatttaagtagagagtgtagaaatatgtctatctatatataaatttaccaacacacttaatatgataggtaggtaatgcacttttattttcatgataggggaaaagggtttggtaggtagagtttccaaatgaagaccaaggtgttgccatgttggaggggtccaacctccattctttatttctcattccccccaaaaaaaaaaaaaaaatgtggaggtttccaacctccattccactaagtaactaacataggagtattgttattagactagcacccctttaaaggtaaaatcttataattaataag

SEQ ID NO: 29406 - DNA, 8950 bp, Cannabis sativa
  modified_base (54)..(57): a, c, t, g, unknown or other
  modified_base (984)..(984): a, c, t, g, unknown or other
aaactctgcctaatcgaaacaaaataaaatattggtgtaaactctagaaaatannnnataaaaatttacaatagatataattctaaattttgtatgtgtatgcttcaaatcatattatttgctttaatccataacatagataatattgaaaaatctttaaagtaaaaagtttcaactccaaattctcacaatcacaggtattgaaatatttgaaaagaggaagggttgtcactcttggaattcgaaagatatattaattgacgctcgaatagataaaaaattttaagacgacaatgtaaacaattattaacccatagataggttaaaacatccattttaaagagatgtactatagagttacctatgatttgatactacatgaaaggataataatattacaattttaaacaaaaaaaaatgaaaattgtaatgtttcataggtttcaaaatcaaattttatcgtgcctcaacatctgatatgtttgtatcgaaagtgtaagatggtagaagtttagtggtggaggaatgatgatcttcccacaaatctttgtgtgtgaaatagcctggtggttttggctgaggcaaaacactctcactactcaacatcataataatagatggcacattaggcctatcaatagggctttgttgcacacatagtaggccaatgtgtatgcaacggattatctcttccatgttataatatgaatcccttaagcccttctcaattagttcaaatatgttgccttccttcatcaaagtaaatgcctaacaaatataacattgaaaaacaaaagatgcaagtgttattctacttagacatatttaagattacttttagggtaaatactattttggattctgtattttgtaaaagttatcaatttgactatctgttttgtcatataataaacttgaccctgtatttttcaaaattgtacaaataggaccctgagctgaattttcaacaattttattttttantataaccaactttaagacaatttttaacacgaacagattcagaaaatataacaatttttgtgataacatatttagattggattattattaaattttattttgacaaaaaatcagttcaaggccctatttgtacaattttaaaaaatacatagtctattttgtcatttaacaaaatagagagtctaattggtaatttttacaaaatacagggtctaaaatgatatttacccttatttttattattatatattgaatgtgtacacttacatatccgatgagggtgatgccgctcttttcgtaataaaagcctctgcttttctttccactaataatctccaatatcaatgtgccgaagctaaatacgtcagatttgattgaaaataatccaccaaaagcgtattcaggggccatataaccgctacatttgtagaatattttatttacacaagaaactatattgaaataattgatatacatatggttttaaagtaaagacttactaagttcctactactttgtttgtatttccttctatttggtctcctccaaaactcttggccaggccaaaatctgaaatttttggattcatctcttcatcaagtaatacattactagctttgagatctcgatgtataattctcaatctagaatcatgatggagatacgaaagtcccttagcaattccacatataatttgaaagcgcttaggccattctaacagtttgcctcgactttcatctgaaaattttgattttgtaattaggaaataaaataatatgttggtgaagatatactacatagaaacaaagtaaaaaaaaaagtaaactctaaccaaatatgaaatagtcaaggcttttgttgctcatatactcataaattaacattttctcttcttcatgaacacaacaaccaaaaattttgactagatttcgatgttgaagcttggcaattagtttaacttcatttctgaactcgtctactccttgtccagaccacattgctaatctcttcactgcaatttcttgaccttcctccaacgtaccctaaaattatatgacatttaataatattgttttgttattttaaatttgtctctcaacaccaaaattaaaagtgtttttgcaagttgggttcatggaaggcttactttgtatacaggtccaaaaccaccttctccaagcttattgttctctgaaaaattattagtggccatactaatttcatgtaggtcaaacaatgggagctccaactcttcttccttccctttatttccattattaataacgtttctatctgtttttgttttccaatatatgaaaacaatgacattttagtgacaatcacaatacttagaataaaacttaaatgttagccaagctaaaaacatcatagtaacatagatgaaaaatgaagagtagagaatattaccataaaattttctccacttgcaaatgtaaaacccaattaaaatcatcccacaagctaatccaattacaatagctgtaattatcactgctctctccacaaccttaggatcatcaactcttgctttctcaccaaagaaaaccaaatattaatgaattgtgataaaagaaaaaccatttgaactaaaaattttcaaaaacaagtaatttgtacctatttctgaagccgaaattcgaacaaacaaatcttgcccacctgaaggaaattgtctaatatcataaaggtttccaaaccagatgacacaaccactaccttctcctctaatatctgagtttgtataagccatacaagaacaatttctaaggcatttatccttacactcccttagattcatacccttattcacccatgtatattgagtatcaggcaatttcaaaccagaaaatttcaaaaatccatctttccctttaccatggcaactcaatggtttacttcttacacaccctttagaccaatccattgaattccaatcctgtagagacttgggcttaaaaccttttaagcattgacatattggattctctgttattatacactctgcatttgccccacattgtccatacttgtcacactgatctctaggccctgaatagtaaggcttccaaattttctctgtttcaatccatatcaaacgttgacgagaatttgttgtttggtttatgacaactttggtgatcacagacttatttttaaggctataagtgtagtaaatttcatcatcagtgtaaacaaactggtaatcgtaaagagtgtttggtctcagctcaggacacccactgtaacgtaggccattccatggaccagttcgataaaattttgtatacccttttcgaagaattggttcagggtatgtatggtgttgttcattgtactcaatcccataactgaaatctccattacaaggatcatttaaactcttccatgatgacaactcccaagtgattcctctcttcaaatccagtcccattttcattccaggcaaaaaagtatcaccagggtagtcaaagctttgccacaaatagttgtctttgttctcatctttctcatctcttacaaccaagttgccattttccaagagctgaagcaatggttcttgggcttgttttgacaagtttgtagaccaaataacactcttgttattgtgtaccaaaagctcaagatttcctgtgttgtttagtgtaaacaatccagaggaatcgttgatcggtttacaccggtttgcgacccaaactactgtggaatctggtatgtttcgataccagattcccagataacgattgtttgaattgcctggggtgaagaaaccaagttcaaaggttccttcacttgaaatcaaagttgtgccatctctcataaattgaaaaggtttaagggtatcaactacttcacctaaggttggtctaaaaacaagaaagataaatagaaaagaaatgaagcccatgattatatctagaatctatagttcatgtcatgagagagacacagttaaactctcaagtctctctttgctcctctctttctattcttcacttagtttttagtaaagaggttttgtttttcattgagtggtttgtgtgctataactttggagagaaaattgagttgttttgacttgtgtgtagcgtaagtatttgggagttgagttgagttctcactttgtggatgagtaataaaaagtagtagactttgggggagtttgaaaaattttcatagatgaaaatgatgtttgtttcttcaagaaaagtcttttcttcacaattttgttgacttaaaaaatgaataaaaaaattataaaggttagaattttaccagttaaaaattcccaatatctattcacattgttgaaatatagagattttgctaagttttattgtcccatgtgtgtgttttggcttgtgtgtgtcattatcacgtatgtgtcaaatatatagtttaaataaaaattaatttaaaatttaacaaatctattttcttatcaattattgttatataaaaaaaaaatttaaaattgcaacatgtggtagtgttatgacaataacacatattgtgttaggtacatagtataaaatgtagaaaagtcagcattgtaaatagttcagatagaattttttataaaaaaaaaatacctctcttccatctcaaaacaccctattcaatctaactcacatcacatatctctctttctctctcattgtaaaagggacccagctagacctctagaagaaaactattttttattaaggataaatttcatcagtaacactaataattattaatggatcgcttgtaatatccaaattaatcttttctcttgtttaaatttcagtaagactttcgaaaacatattagcttgtgaaactgtaaaatcctaacattcccacttcatagattgcaacattcaacacttggtagcgtttgattagagataataaaatagaatataatggaaataaaataatcttcattacatttctttgtttgttcgaagtattagaatttaatttgcaaaatgtatcatactattactttttcaaagaaagcctccacatttgtcatcaaacatcaaatgagagaaaacaatagagtttgcaaaatacccattgcatggtgatggcatggccttcagttcagcctctcacattatatcaccactaaaataaaataaaattacaccacaacaagacacatccaaacagtttcttacctactctactctaaatctttatcaagttaaagatcctcttcaatgtacaactacctacctttcagaggccatctcatctcagcactctaaaactctaataattagaaaagcatcagttcttgcatgacacctaactctcaagtaaaaattagagaaatcagtttttctgttgagccgtttcattctcctcctgcttattgttagcagtaattttgggcttcaaatatgccaaaactacataattaaagagaccgcccaaaaactagtcccttgatcatcccgcaacgacagcatcagccctcggatttgcatccaggagttgatgtagcttggtacctgggtttgagtttttctcatacgtgccgttgtcttcctctgcagttctataatggaaccagagttattaactctggacaggaaattttctgtacttataggttgagtcctcttgtcgaccttgttcattacaatctcttcggtacgcccaagttttgcttcttccagcttaccctgtttatcaaaatgagactcgagtaataagcattgatatagttgggaaaatttatcagttctttgaaggagtaattcaagaaaagtactagaacgtaccactagtttagtgttctcaagcctcagcttctccgagttttctgttactcgatttaattctactttaagtgctaagttctcagaagtcaacgattcaacttggcgtgcaagatcttcagcctcagcctgagcatgaaataaaaaaattaagccccgtaaacaagaaaaaaataatagtcatagaagactagaatatataatctaagaagccaattccacgtttatctcatacctgcttcctcaaccttgacctcctagcagattctcggttagactgtttccttctttcacgcttcagttcccgatcattctgaaaacattttcccataactacacaattaggattttactggaaatggtgatagaacaatatatatatattgacaacagaaaagcatatccaggcaataccggcacccaggagtccgaaggcaagaccgtacaagtttggttggggctcaagttactagggtttctgagatcaaatgccgtggtcataccaggggaaactataggtccgactaactttgctgatacgccagcagcagagaaagatgcacccattgtcttatcagaaactgagttgatctgcttctcagttttctcatctcctattgttgtatattaccagatacataaatcagagcattccaacacaacaaaattccaattccaacaaggttcaagtactagtattaaaaatccatccttgtggacttgtgtataaccaactaatcccccattataatgccgggggttcagaaagaccaaaatttgataaaaactaccactcaaatgcaaggtgtgatgatcatatttgccattgcaccaagtggtaatttgtgtaactggataaaaggtaatgataaaatacccttcatgttattattaataaagatataactgtaaagggggaaaaaatacctgtagttggtgtctcctcacgatttctttttctactgatttgatttgcctgaacacaacacaaattaaaattattgtcaaaaaattcaatccatcaccaaattatatatgttctacaataattgatagagtcaaacagagatgttaataaaaagggaaatccctcaccccagaagtattcccatcactgccatcacttgaaccttctgtctccgtgctgtaaattattcatataatttcaaattagcagacgaagaaagaagaaaaacatcctacaaagtgccatttaaaaaagaaagaactcctggacacatgaagtcttccagtttattgaacaccaccagattagccgcaacaaatcatttaggatatcaaaaattgggaagagatactttttgaacaaacctttgtgacagcatctgttcagccctactctcgacattaccattgcctattgacatggaaagtgaatcaaaacctttcatctttttctccaactctttctctgaatttccagatgattttgtaggcatttccacacttataggagtaacagcctgctgcattgtataacaagtaattccacatttactaagaatgcattcaatgtacaaacatgaagtaactaaaagatgaggatatacttacagcaggcaatgatggaaacccttgaccatgtgctccctaaatggaatggaaaatggctaagtaagaggaacttgaggatacaaatgcttgaagtttattaggcagaaaagaaaccaatggaacaagaaaattggggtaaatcaacaatgagggaacaaagcatatatctatttaaagacttctggtagatatgctagttttcagagaaggggaaaattacagacttttacactcaaactaagaacacctaggggatagtgtctcacccttaccaaaagaaagaaaacggaagtaccgatatccttttttttttctttatggaaaactctgtttttactctgatagactcttcaaaaactatttgtttatctctagtccattttcatttacttatctctcatttatttttttattttatttatttcattgtttagttcttaggtttaatcaacatttcatcatttgttttgttccaaattgtttagtattagtttttgcataatattttgctaatcaatccctgtgaagtgtgaagatgatactcatcactttattacttgtttgcctattgtgtaaacttgcacatttatattgctatcttatacgcaaacttctaataaagagtattacatagaagtgatacaaatatcgggagtcaatgccaaactccaatagaataactcttaattctcattcatttcattgataatccatttgagaaatagcattacatatttatactagctaggcaatactaacaatttactaatttatatcacttccatgtaacaattattagacaacaaacacttacaagagggactccaggatgtggatagacattgccatgtgggtagagtgccgcataaggtgtcccaaaagggggcattataggctgggaaaattaattgaagaagtcggattattaatcacaacacgaagaaaaaatgataaaacaaaacattcaaggagagaacttcaagaagtcagatgataatcacaacaccaagaaaaactgataaaatgctttggaaaatacctgtggtggaccccatagatagggatgaggagcatggccagaagctacagctgcgttgtagtattgggggagagcaactcttggaccataatatgcctgaaaatgcaataaatattactgaaatgattactaggaccaatgcacataaaatctactaataatttgattaagcagatacatgaaaggcagatagatagataacctgcatagcagtccaatcagggtatacgtgaatattggcctgattagtaggagtagtctgatcctggagatacaaaaagatataccaatagtaagaaaaagtctcaattaatcatgcacccagaataaaagaaacctagataataattaagcaaaccaccagcctacagctctttaatgtttcagatatgttgagacaattaaactcataacaaacaagactgatgctttttgtatatcggaagggaaaatttctggcctcaacttaccggggttgcaggcggagaagttttctcggatttagcagactttccctctacttcatttcccatagtccagtaccgacctggattgtt

SEQ ID NO: 29407 - DNA, 3838 bp, Cannabis sativa
accaatggaagcaagtagatcgaccaatcttttgatcttgagtaggtaatcaccaagagatccttgcattttggcattgcaaagcaaagtgcgatattgaccaatattagctctattcagtgttgtgtaatactccttgagtgtgatttaaatttgagaggctgtatcacaaccaaccattcgtgtgagaattttctcagacattgatgatagcaaccaagaaataaggatgttgtcctgctgctcccaatcttcgaactcagggctaacagtagtggagattcgatcagctttagtaagaaactttggaggagtgagtagtggatcaagaatctttgtagtcgacttccttttattactgtaaacacttgatgaatccatgacagataattgtgttcatcaagtcgaacctagagagagtgagaaaaagtaacaggggattattttggaagattataagaggatccaccggccagagatgagccttcattgttcttggaaaaaaaactatcattgaagctagatcgaggaataagaaggatgaagatgctctgataccatgacaagagagagagagagagagagagagaaataaatctgtgtattcaaccattaatgaaaatgttacatttgtgttcttatatacacaagtgattgcagctaaaacacaaaacagaaagttcttatacagtaacaaactaacaaacttgctatttaactaactttaactaccaaaactaactaagtctccttaacaagtacctttcattagtcaagtgaaattcctacacaacataattagaaacaagtaaatccaatgcccaaaataagaactaagaacgtggcttaacataaaaagaagaagaagaaagctacatatttattcaagttagttttttttttttagtcctcaaacttttctgtaacttgaggcagatccaaatccatgtccattctcagcttctgaggctggtctatatcaatcaaagacatctgtttctgtgcttcatttggatctttagcgaaactgttggtatgctcaattctattagaaaattggaaggagaaaggtgtaattgggattggtgttcagcactggaatgatgctgctgctgatgatgatatcctagaatagttcatggtctggtttcatacataagaagacaaagagatgagagatacgagggattcaactgagtgcacaggtaaaccataaaatatggtatttcaaattttttttataaaaatatggcataagttaacccatacaaatataaagatggttgaaaatccacaacctaagtgaaaattaaaaaaacatgccataaaaaaaagcaaaccgttaaatttatcctataatttgtgtaatttttactttttttttttggattagatggatccaatttaatctaatagatactggatctaaaatgttagatgaatccgatccgatctaataaataatagatctaaaatattaattaataaactcgaattaaaccaatagatatacatgaaatacatctaatgcataacaccgctctaatccaacatctattggatgttggatcggttggatgactagaattaattagatcagatcggatggtaaaatttaacatctaatatatagttagatcggatttagatagacctaaaaatattggatgtgttccaatgaacacttataggtgttgtgtttgaccatattttttttaaaaaaaataattttttgaaaactcaatttaaaaaacaaaagtctcaaaacgtaaagaatgttgttttctattaaataattttttttgtcgaacttatttttctttttctcatattttttctcacatattttttttttcatcattagacctaaccttgtcaagggctgggttcctcgtacagatcgtctggggtccttgtctaagtctggagtttgagcttgagttgggtactggaccgagatcggggataacgttcgtagttcatgccgaggttggggttgggttcgtgtctaagatgtgaaagcttgaagtttttctttttttttttccttaataatctaaaatcaatttttgaaaacattaattaatacgtctttcattttaaaaactacaaaaaaatattttctattcttattgctgaaaatacatttaaaaaaaataaaaaaaataaaaaacaataccaaacactcttaaagggttagttatactattttttatgttttttgtttggttgaaattccattttatgttggttaaacacaagtttcgtgctctcacaagtcacaacatatatgtgatgaggtttttgttctttatggtttttggtattatttaaaatatactttttttttttctgagtaaaatatacttttattgaaagcttttaggtgtatctataaatgtaagttgatgatgatacggtacttttatggtgcagtatatttattacttaattgctacctgtacagtaattttttaatttttttttatatttatttatagtagttattatttgctgcaaatcatgaattaaatatcgagctctttggttaggtagattcctaaaaatatatgaggtaaataaatagctttgtctttaaaatatttttagaaagtatccaagttagatttaacatgaagtcatgagtcataacaccaaacataaaattttcactatttgaaaagaaaggttgagtattgttctatgttttaatcttgaataaataaaaatactatttttattttttcataaaagaaaaaatcctacactgtttgctatcggtcaacggtcaaccaaaagtcaagaattagagccttccatcgtcgactccgtctctaccggcctttcatcttgctccggcgccgaactccagccaaccttataaccacgttagcgcttctaccctttctttacgtacgtacctttcaataacactcgcaacattttcactagctctacttgtttttagttttgagaattatttaaatgattttttaattggtaatttattacttttttggtgcagttttaagaatatagttatttaacagtttcgatattcgtgatttgggctctgttttctttcttctttagttacataatatgtttgtgctttctgtatttgataggaataaactctgtttagtttattcagctgatgatttgggagttgggagaggtgtttatgtgtttggtatgttttacagtaacttaattgcgtttaaattgtttttgggttcctttaattcaaattctataatatatatatttatatatatgttaaggtagtttgattacaacatatattttataaactgatagtacgggtaaaatgaagcagcagcaaatttagtcaattactaatttagaaatttccataaactcatggtgttccaactattttttgtattttctacatttgaataatagtgtagatagtaattttttatttttacatattataaattgttaatttttttgaatggataaattgttaattttttttaaataatttataatacaaaaaatataaaatatgcttatttaaaccttctagcctacacatctataacataaaacataaattatttagtttttgagtctttttaatttttacacttttaaatatatatatatattttttttttttacatttttacagaattttatataaaaactagtattgcaactagcgctataaaacccctattgcagctatcactgcaatagaaactcaaacgataaatttaaaaaaaaaataattaaaaaaacagacaattccctttaatttgggccttttaatttacaatatattttaaataaatatctgaatataaaa

SEQ ID NO: 29408 - DNA, 4210 bp, Cannabis sativa
  modified_base (592)..(594): a, c, t, g, unknown or other
  modified_base (1108)..(1111): a, c, t, g, unknown or other
  modified_base (2691)..(2694): a, c, t, g, unknown or other
  modified_base (3076)..(3076): a, c, t, g, unknown or other
  modified_base (3758)..(3761): a, c, t, g, unknown or other
taccttgagcattattataggatatactaaagtgcctaatatttttatgatatgacattttataatcagttaataattttttataatctttattgaattataataaatgagatacgatattaaattatatcaataataatattatatctcataaaagtacaaagcatgctacaagaaatgtaactttaatcagtatattttgcaaactgcgctggcaaaaaggtcaaagttttaccagcgcatatttgcagtggctaaattttaatttttaccaatgcatttatgcgctgggaaaagtcatttttgctaacatttttcattttctaataccaacgttgatttgtcaacccctcttgccaacacattaaaagtaaattttattttattagtgtaataccaaacttttgccagcacaaaaatatactagaaaaaatgacatttcttgtagtgaggtacgagtattttttttagtatttctatgtatattcatcatatacacaagagcattgctataagacaccagtggtgcataacaccttctcaacatgttgcgttgcgattggcaagcaatactccctaaaagctattatannnaattatatgggacccaatacttagttggaccaatagcaatattaacacggaggggggtgctactgcccttagcatttctctatacacaatcattgtatattattaatgtctatcttctgcccttctttttctctaaataatgcctatcctctctatcttcattttcaatgcatatgattactaattactggcaagtcattacaagtttcaatataatgctaggaatcgctcaataatttatgtgccagagataacaattcccatgtgtcactgctagttttctttgtgtttctttatttttatttatttgttctcatttcctttctttaaatttttataaattatatatatttacatataaatttgtaggtacttttacaatgcatcttctaaaaatgatatactcatacactttctatcaatttcaatatttaaaaaaaaaaattaatctaattttttcatatttgtgtacgttataattatttaagatattctataaaattttgagaaattnnnnataatttacaatatagaaagcaatgttcaaagtaatagtctatttcacatgcgtataaaataaaatagtcatgtatgcaacacactgtttgaaccttattttcagcgtgttaaatatttctagatttcttaaaattttaccggatatcttaaataactataacataaatgaccatgagaaaaaatatgactaaaaaattatttcggataccaaaacagataagggtgcatcgattgtagaattttcttaaatttttaaatgttttattaaaaaattctacaatgcacccctgtcttattcgacatttggaagaaattttaagtctaatttttttcatggtcgtgtacgttgtagttatttaggatatcctacaaaattttaaaaaattcaaaaaaaattaacacgcccaaaatagggttcaaacaatctattttaaacacgtataaaataaaagagtctcgcgtgcaacagaatatttgaaccatatttttcgacatgttaaatttttttgaatctcacaaaattttgcaagatgtcttaaataattataacgtataagacaaccatgaaacagattggactaaaaaaattctcctacaagctgaaacagaaaggggtgcatcagtggaactgctctgaaaatatgtttgaatttgtgtcaaaccaattgttaatttttgtttatcgatatattcggttgctaccatgactttatcgaaccctattgtgtcacttttatatgacaacaagctttttggagctaacagttagttttatggtactaaattaagtacgcaatagaataattgaaactgattatcattgtactatatgtccaagatcaccatatgtatatatattaaacatgaaagtacatagatgaaaataatatttacctctctaagtctattagggtattctcaagtcttttcgtatgttgtatccttgaaatggtgacgtcaaactcacactttaatctttcagatttttcaccacacacaagaactagtgtgggctagtatgataaaagtgtatgtcaagttcttgtactctcaacacataagcaagaacaatcttgttgtagtgatggagagaaaaaggttagcatattaatctttttagacttttagaaaagttacgtacaaattctttttttttaatttagtttatacggtatattaaataaatctaatagtcttttttaattaattatttaagttcaaatctttttattaaatcattaaattatttgaataaataatataactgaattttgttatagatatttatattctataacagattgtgagaatctatcaactgagaatatctcaactacttttcaaattcaaattcaaataactttttatcttttgaattaattaattaattaattaacccaaaaacaagtccagtgggaacaccctatataggtggcgcctacattgtgtttgaacacagtgtagggggcgcctccctctgtcttaattaagataatggacgtgtcttttgtcttgacaacttttgtctttttccaatttattcaattaattaatttaaaaataaattatttattacannnnaaataattactattttgacaattcaaaatagattttttcaaacttttatatacaacttttatccttctccttgatcaaggtggcgatccaaggactatggacctataactctaagttccaataaactacattatttattgaatctcatcaactaaataattatatttattaattctatgattactccactataaatatgaaattgaattcttagtaattatagaattatatttactgagttttactgcaatataatcaattctagtgattggccctcattatgtcggttcgtaattagttttggtcaactgttttaccattctagttacttcattatcctttaattctgttaattcattagtgaaagtataatttagatccnatctaaatttgtgcgcaacttttcagttctagaattaacacataaagagaaccaacattcgatcctttagaaaaatcaagatttcataattgtagatcatgttcccggccatccacattattagattttcaaaacaaaagttgtaagaatcaacttctctgagaaactttaacgagtgaataaaaaaaactaataacatgaacaagagttcatgattactcaagatttaagccgatctaccattgatcatcattatgatataaattaggtctttatagctaaacggcatgtttgataaagacagtttaattacatagcagtccttgtcatatataatctctattatatacaacactttcacttagatgtcatgctacatcagtaatccaaatcgagattagttgtaccgaataacgagtatcagtgaacctagtagtacttttcattgtgtaataaaacaccaaagggtcatagaataagggagctgattggtctattaatgacagtttgtaaagcccaagattcttaggagttggagaagatggcttgataatctcaactgagattgcttcaacttcaatattcatctttattttcagagtgatatatcaaagtataatggtcaggtacttacagagttctaaaaatataacttagtatattattaccgccaaaaattaannnnaggtatttatttgcaactgaaagttaaacttaggtatttatgccacaaattactcaaaaaattatgtttaaacaaggacatagtgtgatataagttcatttattgaagctaagatcatcaatcttgtataaatgtaagcccatgtgatttgttatacatgtaaaaaaaaattacatcaagttatgcaattatacattggaacataatgctaaaaattaatgcaatatcacaagtcatctttgtgccaaatacagtataaattttacatatcccattagagatgtacgcaaacttattataataataatgatgcgtgtcgtaagccacaacaaatttactatttttttaattccatactcccaattattttagtataatcgtaagtaagggtcgatcccacgaggactatgtttattcaattattcacaaattagtaagaattaggaaaa

SEQ ID NO: 29409 - DNA, 1706 bp, Cannabis sativa
cacttgttgtggtagaaagtttgtatccaggggtcataggtgtggtgcaggcctttgaatcaagcatgttagttcttctgagaatatcatgggcatagttagcttggcataggtgaagattggaaccaattttggatacttcaaacccaaaaaagtagctgactggaccaagaatttttaaggcaaattgctgatggagattctgtataagttgttgaatgctgttggagttggcacctgtgacaagtatatcatcaacatagacaagaaccataataaattgattgtctttgttgagataaaataaagaactatcataaaccgagttggtgaacccccaattttctaaagcttgtttgagcttttcataccaggcccgaggggcctgcttgaggccataaatggctttttgaagttttcatacatgattggggagttgaggatcgtcatatccttgaggttggtacatgtaaattgtctctttaaggtcaccattcaaaaatgcattgttcacatcaatctgttgaatttcccaaccaaaagtgacagcaagagtaaaaataattcgaattgtactagcctttaccacagggctgaaagtgtcaaagtaatcaacccctggagtttgttgaaagccttttgcaacaagtcgggctttaagtttgtccaaggaaccatctgctctaagcttctttttgtatacccatttgttttctaccacatgcatgtcatctgtatagggaaccatggtccaggtgccatttcttttcagggcatagtattcattgtccatagcattgtgccacctaggagactttaagggctgctgcacagcttttggttcacagaaatcatcattagtaacagttagttcagctgcaaagaccttgggtttggtaatgcccttcttggatcgggtttgcataggatgcacattggtgtgagaaggcaagacaactggaggtggagaggcactagtggactgagagctaggaaaggcagaactggtgttggcatgagacatgctagagccagggaaagggggataaatgggatgaggaaatccaggaggaggagaaatagttgagacagatggagtaggactggtgtgagttgcagagatagttggagttgggacaggaaacatagctggggtagaaagtggttggggcaaaggcagtgtttgaggcatgtttggtgacacaggtgtgtttgatgtaggagtagaaaacaaagttctgtaaggaaaacattgttcatcgaaggttacacttcttgcaatgtatagcctacccgagggatgtaggcatcgatatcccttatgggcagggctgtagccaagaaaaagacatgcagaagttttaaaatcaaacttatgtgatctgtatggccttaagaaaggaaagcaaacacacccaaagactttaagaaaattatagtctggtgtggtgtgaaataaaaattcatagggggttttgtaatcacgtttttgtatgggaagtctgtttatgagataagctgcagaagtcacagcatcccaccagaatttcagtggtaactcagcttgtgctaggagggtgagggccatttcagtgagatgtctgtgcttcctttcagctttgccttgttgttggtgggtatgtggacaggggtgtcgaaaaacaaagccaagtttgagaagaattggcttgaggggtcgatattca

SEQ ID NO: 29410 - DNA, 1617 bp, Cannabis sativa
aatactactttttagtcacaccaataattccttgtttaactatatatgttgtggctaaaaaatgtcacagactcttttgtactgtcaaggtgttacatacaagtcattataactatactgattaatattatattatcattattaagtacataccttgactttgtccatgaaaaactcgggtgcaacaatcttcctttgttgtgcccataaatggccattggatctcaaaatgccgttgccaagcatgggcgcaagcctcttggttacgtaagtaggcttacccaattccaatgtaagactttgattcatttccttcactagctctggctggttgatatacaagtgttgcctcatcccagttgaatatgtatataataaacctataaacatacatgtaattaattatttgttaaaataataattataaatatacattattaaattaagttacacaaacaaaaatagtataaagatccataatttattttttctcattttatatgtatatttattttcgagtgggtcattatgtttcctcatcaaacaaaagcagctagcaaaagagatcgatgtatatgatataatatgtagtggacccagcactcttcaaattatgatatgggccaggagaactgtagaagtgagctatgcagttttggacttcgagagtactctgttcgacccaatcagtttcatgagaaccatcgatctctttcttttcttttatcttcttttatcttcttttttatttagaagaaaataatcgatctctttataatccaagtttcaaaaacacaaactaattagccaactccaggaccacactcattatattattatatttatatcatatatatgcattcgtataaaatttgtgacgtgttactataacaaagatattaatatatttcacttggattttatatattggaaatgccgttgatatgccaccaattatatttccttttgtataaagaaaacttctataatatatatacttcaaacatcatttaaagcagtcaatatcaccaccatatatatatatatataaatatattatgacaagttgatacttgttagaatatccatatctactaaatcagtaagaacttgacagcatataacaataaacatagttaagtattcgagttgccatcgataaaagatatataatcgagattagaattatccaaaattcattgttaaggaaaaatcattttgtactactaacttttcaagtcacacctcaccgacaccaaacctggtaattattagttcacattttttctttttttaaaaaaaaggagttcacaaatttctaagggaaataaaaaatgaaagcaaacaataaccaaatatgtataaagtacttaataattgttgttcatgaaatgaattaaggcgcgttgtcttttcttgacaaatacgtaacatgttataacttctaaaaaacaagtagctatatccattatgacaatctgtccgatcatgactacctaatatatattttaattacttttataagtaaaacttatcataatttatatacatatttatagtatgtaatacaaaattagaaaataacaataatatagagatgcaatatataattatata

SEQ ID NO: 29411 - DNA, 1414 bp, Cannabis sativa
gacgcctaactcaacaaaatcggcatgttaggggaggattgccctcaccttattaagagtgtatatcaccaaccaatgtgggaatttaataagttataacaagataacaaactaagtagctcagtttgagcgtgtgtcttgtcttggtatgatgaataattgattatacaggtgtaaattaatgtaagtacgtttttaagatgtatgatgaaaattcatttttatttcattactaattgatttcaaactgaatagtccattccattgcttttgtaagttattgcactactgtgtatacgctttttttcactacaatctgaagtgtaattacaggtaggtagtgcagcttctctttttcagacgggcctattttcagctggtcgttattttcttctttttgtttcctccgtttttattattgcatggttaaatttaaggtaagaattcgtacatatttttcacttgtttgtgtatttcattattctcaagatgtctagctgttgtagtgttcatgcctttgaggttcatctatttagtcaagatttctaagacaaattgtgatatcacatcatcatagtgaccattcatttgatacccatttggttccttgtgatcagtgagtgttcagggtaccattttatgcagatttttaaattacgggtacgtgtacccaatgatcattatgaacatacggtaccaaaactgtatatcgtcaaaacacaaagtaccaaataattatattttcattctaatatatgatatctataatcgcacaacataagtgcaaccaggaattgtaatgacttccacctagcaaatgtatatgcaatcattttattgaaataaaacttgactagacagagctttacttgttcctttcggtggagtttggtaggaagtaatgtggaacaaaatggaaaggaaataacttttatttcatttctttgattggttttattttaaagtattggaatgtcattcttattctagctatatttttattccttccaactaaaggccacctaatggagttgttatgtgagtttgagtggagagagtacagttggagggagtagacttagagggaatatgaaactcaagtgttggaggggattaacattaccacaattttaattcaaaaagtagaatccatttggaaacacaaacttcttggtcattaaaatttaatttagtttgaccttctcattcccattaagtccaaacctcataccaaacgttccttctagttttctttagtcaacatataaggcgcgtttggttgggaggaatgaaaatatagaaataggaatggaaacgtgaatgaaaatataggaataggaatggaattgaatgaaatttaaaatgcataaaaaaaaattgataaaaaaataattaaattttttttcttgttaca

SEQ ID NO: 29412 - DNA, 5704 bp, Cannabis sativa
  modified_base (27)..(30): a, c, t, g, unknown or other
tatgatatataatccaattcaatatannnnaatacaatacgacctaatacggtgttccaaacgagccctaagtgtatacaaatatacaacagtgttcatactccaatttaattcaacttgtgtgatctaattcacgccaatcagcacttgaattgaaaaatttaagatccgcacggacgtattagatgttaattgacatataaaaataatagatccaatcgaatatatatttaaaaaaaatattatatatgcaattaatattttaatataaaaaaataatttaaaaatttaatatatacaatacaaatatttcaacacttacgagatcaaacatacattttattattatttataagaaaaatataatctaaaataaaattaaacatatgctttattttattgttagctatgtgaaaaaaatttattttaataaatattaaataattcaatagtaaaaagtatctaattcaaaataaccaattcaatctacacatttgcgaattaaattgtatttatcgaaatttttaaaaaccgattaaaataagagttgcgagattaaataaattaatagagaataaagatggagattattgatgagaacctgctgctgttatctttctcacacagtagcaatttccagcaacaacaattaataagaacaaatagatgcaacagaagagtggagaagtagtgagctgttattgattcaatgaaaatagagaatatatctcttacagtagaaaagaaacaataagtattaactcttacaatggtagagagcaagagccctccactgatgcaagattttactctcaaattgcataactaactctcagcaacactcatacaataaaaggcagctcactatacacaaattactgaaaagccctcagcccactagcttaagtgtgtttaccccttctcacatgggtaaatcttaccttaggcctctggtgtccatcgtttttccatggttcagtttttaatgaatcctagtctatgagtcaattgtatttggccgaatggcctttatgtattacaatgaggttctacaagctcaagaacgctagcttcttgctataatatttttgcaatgatttccccatcatttgcatgaaggtataatgtagtatttataggctaggaaccagatttgggtttatttgtgacctgctagggttttcatataaacttcgcccactaatggggtaaatacatgcaatacatgactatgggcccattagctgaaacccaactcgtggggtggaggcgttctgtatgtctggggaacacgtgatccttgacagatgtcctgcatggtccgtttatatgtaatgttgtgtcaaaatcatgttgttggacaaaagggtggtttccttttggtggtgtgcgcactcttaggctttgacacaggggacaaatcccaaatcctatgggatttggtgttagagggcgaccatgtcatcttgtactagaccttcgaggcagcacctcttagaatgctctctctagatgtatcacaaatgcacatccggagggcttcaatcacttcttctcaaaaaggtgggatgccttttcgaatccggataactcctatttcaaaagtgcatcctttgggcctaggatgggcttgggcccatccctctgtgtgggttaggcctcctctgttggtagggcttttggccagaccttaacagattattcttacaatcgggaacgtcacgtgtcacccttacgaaaacacaaataaaatttatcccccaaactttcgagacttgagagtggtagaggcttgaaatcttctctccgaatcgtcatggacacatggataattcaaaaaggaatgaccttttcggcttctatagttcttggtcgtggatgactagagacctttgagttatagctaacgtagtacacgcgacattggcttcttggtctgtgaactttatgagcattggaaaagtgtgcggtgcttagggtaatgtactgacgattaatttatgttagcactggcatcaaggtgaacgttatgattaaaaatgaattagtaccaattatatgcattaaatgatgacccttctactctccaaccattaaatcacttttgcgttttttgagacaccatttgagccgttgatcgtgaaagtaaacgggtgaaaatctctcacttataaatagggtgaagaaaaaaaatttcaccacttataaataggcttattttgcagtttgagtttaaatttttcaagagagaaaaactcaaacttttcccctagtgaatgtccaatcctttcgacgattgccttagtcttctctttgagttcgagggagagaaaaaccaggagcattaatactagacttgacaatgaaccgtctaaatccatcgaggctactgaatattcaattaaagattgacaatttacttgtgttgtcgtacgaatttcaggctagacttcatcatcgtgtaagagatcctactacggttataccaccgcaaatcttgccactcccacaactccttgcttgagtaagtatccttctcccctttgaactattgatttcttttgcgttgaaatgcgtgtttagattttgggcaggataggcctcttctctgttgagggtttaggtgattatttgcatgtgggtttatcttggtatgaatgccgcctatagtcgagattaggatctgtgaattttgctcgtaattcattatttgcattgagcgagttcaagatacctttaaacaatcttaatctccaatttcctctatttggggctcttatggttatagacaaatttcttagaatctacaattcactcttgagttctcgatctgatcgtcttggggcgaagttctgcaagggctttgcttctagacaatgggtccagcagagacctcttcaagcagttttaggggaggtttcctgtacccatgctatttctcttagtgtgggtatttaactacttggttgccatttttttttctttctttctagctaccatcatgttgggcgtcatcgatctcaaagtagtggagctaatggatgagccagtcaaaaatgtagaagatgaaatggttttcagacgtggagcaacccaacaaggtggccgtggaggaaatatacaattattcccagtgggagatgaggggttcgccacatccccgatctctcttagaataggctctccctccacgtggagtcacctatcaaatgcacggatgggtttggagcttggagctgtgggcgcacactgcatgcggagcacactttccactgtgatgttattttccaaactccaagaattagcaaagctaaccttcgagatcagtcaacaattaacccgatgttaactacaagaattagcgttgacgattctcagagattagtccaagcattttggagaacgaactcatggtcgcccgcaagcaaagtgttgggtaagttgggaaagcacaaaggaggatacatcactctatgaagattttaaaaggtctatcatgcatgtgtattgtttgaggtattttcgatggaggccggtggacacgagtagagttagtaagaacaacttactaagtggaaattggccgagggtttttcataatgatgcatttagaaatagatcttgtcataaatataaaatccatacatctttcttatctttccaatgcattttaaatggtctgattccgaaataaattgagaaagttatggaaaaaaaatactgagaccattgaaatgtgattgtggggtgtttgagccagtgtgcctttgcatgagtcgatgtgcatatgtatgagctggtgtgcctatgtgcgagccagtgtgcatgtgtacaagcaggtgtgcctctgtgcaagctagggagcatttgtgcaagccgaggagcatttgtgtgaatcgtggagcctttgtgcaagtggtggagcatttgtgcaagccatgatgcatgcgagacatccatacaagctctggaatgagacatgcgtgcgagacccacatgcaagccgtggcatggaaggtgtctggggctcacatgtgagcaatgtgtggtgtgtgaatgactcacatgccagctatgtgtagtgtgtgtgaggctcacttgtagggttagtaagaccaagttcttaagttgaaactactggaggagtttcataatgatgcgttaagaattagatcttctcataaaaataaaatccataaatctcttttttatccttttaatgcattttgaattgtcaaattatgacatatatcgagaaagttatggccaagatactaagaccattgaaatgtgacaatagggtgtgccaactggtgtgcctttgtgcaagtgagtgtgcaagctagtatgcctttgagtccattcttcctactgagccaaggtttcttaagacaactcttgctaatcttcattggatcgaatacaactatgtagcatgaacttatctttcttatcaaagcaaaggcttgaaccttagtactctattgttcctgtatgcatgtgatcatgtgaaaatgaataaatagagtcaaactaaattcagatgacactttaaatagatacaaatcatggctagtagataaatgttatttgtaaatgaatgggattgacttttgaaaagacatccagttttgctgtaaagcccccaactgttcacattgtgatgtgtgtggtagtctctcacaattgggatgttactcaattggatgctaacaatgcattcctgtatagtcacttatgtgagactatttttatgtttcaacaaccaaagatgcctctaatcctatacatgtttgcaagataaataaggccatatatagcctcaaacaggcactgagggcctgaaatgagaagcttcaatcccatgggggtttcaaggttcaagaacatacagttccttcttcatatatggttttggttctagtcttataattctgttagtatgtggggatgatatagttattacatgatcaaattttactcttacttgaaaacgcatcttggacctaaacaagtctttttctctaaaagacttagtgtagttcattattcctaggagtagaaatatacagagacaatactggtatgtactatttcaaacaaaatatattactgacttattagtcaagttgaatatggagggaacaaactcttgtctaaatccaacaagtgcctctgcaaaacttttttaattaagggagaactatttacggatattacgctatatagaagcacctttggagaagtttaatatctatctcttataattgccttcatagtcaacaaactcagtcgtttctacaagctcccaccactcttcactgggaagcttgtaagagacgactaaggtatctcaaaggaattattaaagatggtatttgcatcccacttgcctctgccatgactcttactgcttacccaaatgcaaattaagctagttgtgtcgatgatagaagatctatgggaggttatttggtattttttggtgacaatcttgttagctggtctgtaaagaaacaacagattgtggcaaggtctaacactgaaagggagtttcatgcattagctaatgtagttgctgaactaaaatggattcgatcgttgttgtgtaagttacaagtttccttagttcaatgtcctgtaatttgggtggacaatcaaagtgcaataactctcgctgccaaccctatttttcatgcaaggt

SEQ ID NO: 29413 - DNA, 1961 bp, Cannabis sativa
tatatatatatatacgttctcgattataataaattaaactgatcccagccccatccccaggtatcagtagtaccatcataattattattattatcagtcgaagtttgagtgttcaagtactcgctctccacactttgagaaggctggccaccactgccaccgccagaagaggaaggagtggtactcatcatgtcggtgagtagtggcggcggcagctgaggaggaagggaagacggttggtgttggtgatgatgatgatcaagtgtggtggtggtggtggtgggattaatagttatgatttcttccctagtaggccttctatcaaatgctctcaagcattttgttttcttgtaaactctgcataagctaaactcttgccttaactgcatgcacatataattatacatatatatatataaaaaattagcaacactctagtatactaaaaaataatgttgtattaatgatgcacgtaaattacacacaaatttaacataaacttatagaaaagtaaatttaattaattatttgtttttaagattagttccacttattaaaaatgacttattagttacatattacttaggtcatcataaaattttagcaaatgcacgtgcatatatgtttttaatatgtaaaatgatcttgatgattttttaaatttactgtcaacaattatagtttattatattaactttagattcaatatatctcacttaatttccacatggttatatgtatacttaacaattatttaaaaaatataatttatatatgtgcatacggcagacactcagaaattttgttcattaattaggagcaaatttaataacaaaatttagatgggacataaatatcaaaatttgcatgaaattaaaagtactaaattgcaacatatgaaaatgatattgtataaatgccaaaatatacacataaaagactttgaaaaaatatacattaaactttgtgaaagaaaagaaaaatatataatgagggtgggcataagccctaattaggcttcaattaggttcgtctgtatatgcatatatgttatattaatatatatatacgctcaatgattgtattataaaaaattatttaatttggtatacagcatggtattagaattgtataatattatattgtatcatagatattatattttaatatagtactgtacttaatattaaattatatctacttaatatttggatattataatttaatatagtattgtataaaatacaatatataatacaatttaagataatactaaatacaatactatatatataatacactacaagaaaagatgaacatcagatcatgatgtgaaaattatatattgatttgagagaagaaggatattggagaattaaggctattaatgttttgtagaattaataaataatattaattattaataattagggcttcatatttattctaaaaatatatatatcaagaatcttgagatgatttattataatcatgggattatcataaaataatgaatatatatatatatatatataaattgggtgtaattaattaatattagtaaaaatagaaacatacgagaggaagatgagatattgttgcagaaggagtagtagttggttctccttgaatagccttatactcgttcatcttccattgggttttggtaccatgaggcgccctcccattgtagaataccatggtccgtttgagtccgattattcggtttctggaagagtaaacgtagctgggagagccggtggctttccagtagccactctccgttagccggctcggcctacctcctcttgcctcactctcttgccttgctatgaagaaaaaacactgttctggatctccttggcatgctactcctgaataccctgatcaaatattaattaacacaaaattattaattaatttcatacaatatattaacaaaaattaattatatatatata

SEQ ID NO: 29414 - DNA, 1679 bp, Cannabis sativa
atggaatgaaaattgttttctttccattccattccatttcattacctctaaccaaacgtcacctaagtgtttgtatttttattttagtattatttataattttttaagttattgtttgtataataattactataataaataatatataatactttaatttttatacatttaaaatttataatatgggtttgtatctttttagtatattagtatcattttcataattttttaagttattttcttataataattagaattttgaataataaataatgtgtaatattttaatttattatattatttaaaataaattaatagaattcttatataccaggtattagaatcaatatttaagatgtatttgttaatcattataaaagtaggttgaagatatcatacctaattctaccaaaattttagtagtataaccactataatttctgatcacctctagttaaccaaatacaaacaccatacatatacccaaatttacatgtatatacacacgcacaatacatacaaatacatatatacccatacacataatttatgaaaaataatttcacaaaatatataataaataaattaagttacacaagaatagaagtacagaacaaggtgcttgatacagagcaattggtcggagttccaatctcagaaaatcttaactatggggaaaaaaaatcccccaaaatataaatttgctgttctaaaatattaatagtaaatttaaaaaaaaaaaaatcaaaaatagtttatagggataaataacaaaaattaaacccgaaacaaaccaaaaaaaaaagagagaaaactaggcttgatttgttggaggaaacccagcgcagagtagaaaaaaaaagaagtatgcattttatatatatatattaaatggttttgtcgatgcaacaattaatgctagttacacctataatcacattaatagtggcaaaagtggtcagtaataaaccctaaaacgaaatattatcgtttcttaattgacagggttttcatggtgccaaaaattgtactggtaaaactactcccacatttttatttccacaagaaatttttcccaaaagttttgctagcgcgcgtcagttcacgctcgctaaatccagtccccttcccaccaaaaattcccttcttcacgcaaatcaaaggccattgatgcaacatttagcttagaaagtcaaccaaatatagtttaacaacatagaatacatgtagaatgcacaatctcttaggggctattttttaacaatattttatctgtggtcttcacaattagacgttagtaaaaataacttttgttggaacaattctgtaaccgcaccaacaatatagtctactttcttgtagcgcatcttgtatagtattcaagtagggaccatttagcaaaacaaaaacaaatgaaagcaatggtaaaatacgaaagaattagtctatactgacaatcaaaggaaagaggaagagtaaaaaagaagagggtaataagtcttgtcttttgacatgataatttagtttggtgcttatttgaacgttggtttttgctgttttgggtcattgtttttttttttgtacgtggtgttatcgaggaacaatacacaacctgcataacgccctaatgttaaggcacgttacagtgctttttcaattatagtgcaatctttgctaat

SEQ ID NO: 29415 - DNA, 1591 bp, Cannabis sativa
tttttgcattaaataataacaacaatagaaaaaaggaagcaatggcggagctaaaaaattttgagacaactcttgatgatttactggcacaagaagagacttattagtagcaaagatcacgagtgaattggatgtagaatggagacccaaatacaaagttttttcatgctcatgcaacatcgagacggaacaataatgcaatcaaatcatttaaaaatgtagctggtgttacaaaaaattcaaagaagggaaggacaatgattatttcatcttattttgaggatcttttcactgcatctcgctttgacacctcgacacttcagcgcacaatagacacctttcctacaacagtcactacttcaatgaatgaaaatcttacatagccatttacacctgatgaaatacttgtggccttgaaatctatgagtcctaataagagtcctggtagtgatggtatatcagccatgttctatcaaaactattgggaaattgttggacacttagttactaatgtggttttgggagttctcaacgatggttaggatatggatatgctaaataaatcaattatcactcttattctaaaaatcaatagcccaactggaatgagctattataggccaataattttgtacaatgtcatttacaaactgatctcaaaagtgttagtcctcagattcaaagatgtttttccatttgtcatcacagagactcaaagtgcttttttatctaaccatcctattatagaaaacatcttggtagcatttgagttagtccaccatctcaagcataaaaatcaaaggaggagaggctactcaacactcaagctacatatgagtaaggctttcaatgttgaatgggcatatattgcaactatgatggaaaaatggagtttgaagaacgatatatatcactcattatgaaattccttttttcaacaagttttactttttctttaaatggtgaaattgttgggaatgtcattacagggagagggctgacatagggtgatccattatcaccctacttatttttgatatgttatgaaggattatctcacttcttgaatcatgaggaagctattggtaatcttgaaggatttcgtctcacaagacatgccccatcgatatcacaccttttatttgcagatggcaacctcttggtttttcatgctacaaataaatcagccttggctatacagagagttcttcaaacatatcaccgaacatcaggtcaacttttcaacacccaaaaatttgtcatgtccttctcacccaatacttaagaagctattcaaatgtttttccatcaaacattgaacatgcctataagtgattgtcatgaaagatatcttagacttcctgcatactcttccagagaaaataagaaatgttcagtaacatcaaagaaaaaaatttagaaattgctcaatgcttggaaggaaaaattattcttcacaagaggagaagaagtgctcttgaaagttgttgtccaatcaatactgacatatgctatgagttgtttcacaattccaaaaaaactctgtaactaacttgatgttgggttttgtgccctaaataaaacccattac

SEQ ID NO: 29416 - DNA, 1616 bp, Cannabis sativa
agactcatgttgaatttttatgtaggaagctttggcttctgcgagagaagactaaagttacataaaaattcaagcaatgactttgctggaaaagatcaaagggggtgaaagagtccattacttcaagcagtccttccattctaggaaggagggttgacctttcagacatggaaagcgacacgcatgcatctcttgagctctgggaagccccaagagacgcgtgcatgcgcccctagatttcttgggcaatttgtttcctccaatggattacaaggtattcaacgacttttggggcaaagactcggaccctcagtaagatatacaacactctggcagagacttcctaattggtttataatgtcttgagttgctttctctgatgtaacttcggggttgtagttacaccatgcaacagaaaccttctaagcaaactttgccaaaaatggcctacctcaaccaacagtaccataacccgcctgactggaggtctagtagacgccgacagtactgatggtctcctctcaactactacaattataggatcagtttttgatcaacttcacggctcagcgaaaaggcaagggaagtagccgtcggtaatggatttttccctcgcgttagtagtggcactggagtcttgagctggatagagttattatacctaacgacccttcatgagttagttgtcataatcgcatgggtcttagcttcttcacctggccccaacacctcttgcaccttgttgtatctgcgtagttaggctttagtggatggtgaggaagacgagcttgaggatgccagcgatcggtcaccccagagagttggctggccaaatttgagctttgaaagatgaatgttgatatatcaaatgtttaagacttcatacgcttgtttgctgtattttccatatgcgggcgaacgcatcggccttcactttgggccacacctccaacctacacgttcttgaccatcggccagacctcggcatgaaattaggcagtcttccttcttttctcacgcgcgttctcttgttgataggattgcgtcggtaaccgtcgtgcatatttcttttattagctcttaatgaaagtaccaaaatatttaccaatttttttggcaactaaatatttttagagctttggaaactaaagataggatcaatgttaagataacaaaatagagattttttcgtggttgaggcgttaactatccttagtccacgagtccattttattaggctcatctaccgatgactatttatacaagtagagatacaatggactaaaacacccttctactgtgctcgtcttgaagaagaggaagcttagtaggaatattctagagatgatagtagggttacaaaatgtgttttcttacgatgatgatgaaaaggagtcgtccatccgaaaaaaaaaagatccttttccttgtgcttttttggaggtatttataggccaacttctttgcatgtgcttcattggatggatcatcgttggagtaaaatttgaccgttggattggtaggtggcatatttctcatatggcatttaagggcgtcagatcgtacgagctgggtcacggacgcatgtcacctcagggcttctcctttttgaattt

SEQ ID NO: 29417 - DNA, 4111 bp, Cannabis sativa
agatttacaatcccctcatgagtattcacaacagagccatcctcagttttaagaaatttgattgtattcactttcttcctaaaagaggtatgtttatgaaaaaaatttgtgtttctgtccccagccttcaaccatttagtcctagcacgttgtctctaatagatctcttctttatacagcagagagtctagtgcagacttcaaaaaactgagcctacgggactcctcagaattaagagccatcttactctgaagttggtcaatttctaagttgagttgagaaattctaatcttaaaaagagaattatgttttttaccccaagatttaagagtagtttttttaaaaaagaaatgaaagagtaatttaaacatatagaataagaatacagatcacatcatagatttatttttattttatgaaactatagatcttgatttattcattcaccaactttttcattttcattcatatgccccacttgttaccgtaaatgcttagaccgtgtatgaatcactttacgtgtttagatctgcaatctcggccgttgatgggcctttcaaccaatcaaaaatcacaatttgttgaatctgacggacaagaatgaacacgtcttaagcaagggcccacttgactcacctcattcatcgcataatcaaagccacgtgtcatgacatcagcaaagctacagttccaaatcccaaccaaagagacaccaagaaaagtcagatattctagatttttactcctttagatcaacccaacccatcgcttgccacgtgtaactaatctattcgtacttcacacgattacccctcttctctctctttcttcttttttcttttatctctcttctcagaaaatttcccactttctttcccacatacccaagttttctctggatccaaacactctgaattccagacctaaccgtctctttccttctcattattccaacgggaaacatagaaatcttgggggcctttcctctctctgtcattacagccaggtttgtacttttaattttgattttgggattataattgtgtatcttataagtttttgtaatatgatttgctctgtcttcatcttaattactatttttcggtggaattttcgtgtttttgagatgacggataattggatctggtgttactttttgtgtagaagtggttcatactgttcaaaattgaattcctgtatctgggtttattagatcactcgatttgattatttcggtaattgctgaattagtattttcatttctatctgtgttatagatcttaattgagaggaatcggtttttattaaatagagtttatgtttttgttagttaattgaagattgagaatttcgtatattgaattgattgactaccccaatttcactcctcactcggaataagtgatgggtcgcttggagtttttgacccaattattgatattggacaccaattttactttgtcatgtttcagcgatgagttttccttttaatcggaaatggtttggttactctgttttctcatttctattttaggtgaacgatttgtaactttttttgtttccgtatttatcttcaatataaattgatttgaacccttctgtgctggtgtttcagaattttacgttagtgttagttaagggttatgtttgtacaattttgaaagtaccaccattcttaaccttttttttttttgtgcggaaggcaaaggttttgttcttgcttctgtgattatagtttttggcgaagtgtacttttgtttttgtggctgatgcatctctcttctcttatttaatttatattggttggataattgaaggttgaatactgcttcctcttatattgatttagttgtataaatatatatatatatatattattaccaataccattactacttgagtgttttaattttacaatgacattcagttttatcatttttctctccagcagggaaggccatgtgagctgttttaaactggttctggttgttgccgtacaactttccacagaattgctcttgatttggcattcttgacatgggtaaatgcaagggttgtgggaaattaggaagaatggtttcaaggggtggatctgtgagtgcttaccagtttgctcttcttttgtctcctgttgtttctgtttgggattgcattgttcgtaaaatgaggtactcgttcagacctgagtgggtgtagttttgaggatcgtaacattatattagttttcaataaggaaattgattgaatttacttagtattatatagaaaaagaaggaaacacattatagggtaatgtatacactttagagaaattctctctaaaaaggaaaaaagaaagttgagtaaagccaactgagtaggtagagattgttagtttaatggataacgttgcgtgtaataaaatgcaaacggttgtgagaaaagtgaagaagaagcaagtaaaggacgaattggatcgtcaaaagcaggccgagaagaagaaaagacgcttggagaaagcattggctacttcagcagccatcatttctgaacttgaaaagaagaaacagaaaaagaaagaagaacagcagagacttgatgaagagggcgctgcaattgctgaagctgttgccctgcatgtcctgattggtgaagactcagatgattcgtgtaagattgtcttaaacaaagatgaggaattcaacccttgggagtgctctagcagtattgattttttcatgggtggaaggagaacaggtttaccttgtcaggattcttccatatgttcacttgaaggcattgaatgggtctccaatggttacagatctggatgcaagtggggtggtttgggaaaaagcgaatggtcattttcaactgggcattatggaagagatattcatgactcatttcttgaggaagaagcaggttggggaggtacaggattctctgctgatcttattgcggctcaggctgtttcctctcttcatatcgcagaggaatcagatgaagacactattgtgcttaacggaatgctaaggcggtagatggacgatgaactcatttgcagtcgtattatctagtcactggaaggagcctttggccatattttctatctgtatataattcccgtaaatgtgtttttatctgattgtcagttacacacatgttgcttcttctgttcggacagtgttgtagtctgtctcctcttgctcttgttttttttttcttttcttttgttagtccatcctttgttacagctgctgctactttttcatgcattgatgtttcaccacttatgagacattagttaaaccaatcttcctatcttgccacaaatattctaatttgacagactataataaaaactcatttttattgtgttgagtttttggtagttgctagttggtatgtttgtattagtgggattaatagggtgaaacaaattcaatcgacttgtttgatactacttagatttgtggtgtagcctgtaaaatttcatctttgaatttaaagctaaatctttgtgatttctgtttgtgtaacgtggtcaaatatttacgagtaacgtcctcttctgcccatgtttgctcactggttgtcttttacaacaatattaatttcttggaaaattgccactagtagagtttcattgcttaatggtccccttcatcacactacacaaaatattcaaatttagattatgacatttcaaaattggtaattttctgatgcctttgattcgcttagtcattttgactaattcataaagagtagtggacgactttggttcgtttagtcatgcaagtacaatagtcaagtggtagtattgggaaaaaaacagtacaaaaaaagaaaaaaaaaattactaaaatactttgggttggccatttaaataattatacagctcttaaaaaatatttacaaaaataccatctcctttaaaccttcagccgcacgcaacaaaaatatctacaactgaaattacgcactgattttcgattttattcgatcaaaacaactcctcctaatatcaaaattcaaattcatataatgtaccaatccaaaatcaggtataatgtgaaaaattaaaaaaaaaaaaaaaaaggttatgaataatagatttaaggtatat

SEQ ID NO: 29418 - DNA, 3249 bp, Cannabis sativa
gtgttctatgttatatacaaatagatcttgggttaattgttaatttatctaacatatacatcaatctcaaacttttatatttacactatacaaaacagaagagataaaagaaagaaaaaataacaagataattatttctaaatttatgaagcaataactctagctaaaatacacacataccatttacctcatctgctaataggagtttgctactgttttcttcaaatatttaaatatttcactacttaagagtagctgcagagatttccttaacttttatgggttacttgtttataactttatatcatgctttggtgcctcttcatgaatcaccctactgaaaatctactcttttccactagtacttaaaaaattattttgttttagtgggtttctatatttggttgatgttttcttagtaatttcattagtttgtttgaggtggatgtggcacgttttctatttgtttgcacactagtatagtaatgggaatttgatattgctgtgcttcttgaaaacctacttcattgtttttcttttttgtttgacaaaatagatttgaagattttgttccatcaacctgttaaatgttataggcaattgtatttcaacatactttctaaaactaatcgaggcgcctcaaggtgaggcagtgcaaaagcgtacacgaggctacgcctcagctgtttccattgaggcacacacctctaaaccgagatgtactgaggcatatgagacgcatgcctcagtcttgagcattattttgtgtattagggttgttgttttgtggactcacagggctcccctgtttttaagctttcaaaatgacttgattaagtttttgtctgagtttttgttaacagatttttaataaatagaataggaaagataaatgaaactatagaaaccttaaaccatctatgcacattacaacccttcagcctctaagtcacaaaggtttttaataaacttgaaccctttatgaatttagtttatgattttaagacttaactataatttttaagaatttcatgattttgttatggaattatgtgtactttcctatgaattttatgataaatatttacgaagttttattttatgcccctctcggggctaagggaaaacgccttggtacccaattccatttttcaaaacctacttgattcaaacaacaaatgatcataatgttgattgtttgtatttatttttgaaaataaagaatgttttaattcttaacaaatgtgcagatgcaagagtgaggcgatttcatactatgaagccaaaatggggctttgctagattcatggatctccaaacatttaacaatccttctaatggttaccttgtcaatgacacatgtaaatttggagcagagatttttatcgtcaaaacggcatcaaaagtagagcgattatcaatgataaacaatcctttgacttgcaagttttcttggacgtttcataatatttctagagaaaaccttgaacgttatcaatcttcttcctttgttggtggagactacaaatggtacatgtgctactattagtactaattaagatgagaagttgtagaaaagtagtttttaataatatatatgttgatttagtattttaactcttggttctcaggtcgattgtgttttatcctaatggtcgatcaaatgagaagagcaacaataattgttgtgtggtgggtctagcattggattcaactctccctccagacactagtctgtttgtgcatttaatgtgtcgtatgagggaccaaaagtatgccaaccattttcgaaaaactggtgagccctctatttatctatctataaatatatatatgtatcattgttttcatcttatatgcatgctaaataatataacattatggatcttatttttatgtatatatttttccagatagcaaaacgttctcgtctaaaagtttggccaggggttttgaagattacatgtcattgacgatattgaatgatccagaaaatggttttttggtaggtgatagatgtattattgatgtagagtttaaagtgcttggtttagttactctagaatagattagtggaacactagtgttccttttcgtttggtccaatactttgctctacttagtttgacctgggtgaacctctctatctgttaattttaatctttttttataccctcttaaatttcctttaattaaatattttttttgttaaatgtgtcttaattggactttatcatgattctccattgaaactagaacaactccaacagagagtgccatgatggcttccaagctttaagtaggtctgaagtgaactaacaattttttgttttttttttctcaatatcagtgacatcaataaattttagctgtgtttctaactctgttcttttatttaatttattttttaaatgatgatcgactaaaactaagtgaggtaaaggaaacaactttataactttgtagtacattttgttatgtaagagcaattattcatcgccttgtgaactttgctagtttgcttgacatgaggtgttagttcttaactcttaagctacatcaaagagcattgggtggtgcctcgaatagttactaatattttataataattattaaattaaattatgttaattttaatattaattattgtaattttgaaagtgcgataattaaaataatgaatataagaagaatatagtaatctgttcattttaatttatgaatattattgttttactgtgaggttaaaaacatcttttttataactaagagggggaagatataacaactttctctcttgtgttggggttttgttttgtgaaacttatataaaatgggtcaaactttaccaaattactggaacacaaaaaatttaacatttatactatcccagtttaatttgtcttttatactgtgtgtcagccaaatagtactaaacctactaaaaaaattttgttggtcagtcaaaatagttagaatatcctcaatgacactataatacccacaagtaataattttggaatagtaatgtttagaacgtaagtattcaggactccaatcctggtacaataacatcaaaaccaactaaaacaattgttaaacaacagcaaaactaaaaaaataaaataacaaaaaaaaaatcacaaaaaataaataaataaatactatccttaataacttttttatcagactggattttcatatcatcctgagaggaaccttgcctttggaaaatttccccaaccctaa

SEQ ID NO: 29419 - DNA, 1000 bp, Cannabis sativa
gtcattaaactacgttgttttccaatcaaagcaacaacaattagtgaaatttcatatgataagaagcaattcaaatgacacatcatcatcatcatcatctacggttgagaccacaataacatctcctgaggacgcaacaacacaagaagaagaagattctattgaagaaacagaagagtctccttctttgatttctgctcttaatgttgaaagggctcttcgtggcatacgtaataattattctatttattttttaattattaatttattataataataattaatgtgtattttaatgaattaaggactaattattgaaattgttttagagtacagccattacagatgtagattattatggtaagcttggattatcaagagactgctcacttaatcaggtcattcacataataccattattatttattttctcaagtttgtttttttatttttttaataattttttgttgtattttaattattttcttttcaaacaaaaaaaaaaaaagtttacttgattgatacatagtactaattgattatttttatatttttctagtgattttttaaaatcatattaagaaaataagattgtattattaatatatgagtaaattacatatttttctctctcaaaaaaattatatatatatttgctcataaaacttataattttctaaagaaaaatatgtataaggaataatagacaataaaataaaacatttcaacttctattcctatgtttcacttctatttacaaaactcaaaaatcaaatattaaattatagggaaaaaaaaggataaatgtgttcaaaattattatttaaatttaaaaataattttttatattatttatttgatttatatactttgaataggttaatgatgcctatagaataaagagtgaagaattaaagaatagaggcctagaagaagaagaactcaacaaagaacttcaactcttaaaggtaagtaagtaccaataaaaaaatgtgttatt

SEQ ID NO: 29420 - DNA, 964 bp, Cannabis sativa
tctctctctctctctctcatgagttgagtatacactgtgatcaaaaaattatattcatctaaattgaatctaatagctcactctattcttggagtgtcgaggctgacttggaagaccctggtttgaactcttcaacaagtcttactggattggatgatcatctctttaatatgaaaagatagcaaggaaatcttgataggcaacaagaggtaaaagtcttaaaactaatagttattgtgttatgtataattgtgttgagattcaaaatttatagtttatattggtttatggttcataacatttccctgcagatggccaccaaggccaaggaactcatggctatgacaatgcatggaagcctcggtcaagatggaaaggctgttgggaaggtggattaccaagtaggtaagagtacatgagagaagtctttgaagaaataccatctgtgaggaaagagtggtaatatcctttagttgcttgcatcagtaagaatcaaggaggggccttttggggcaactccattagaattttttatgttgttttaattccctacacatttcaaatgtagtatcttgagaggtcactgaaaggcctttgaactcacatgaatgaatattagaatagtttaatcatgcctggttgcttctccaaattaatgttctttttcttgtttgaagaagagaaggaattcaagtgtacaacgccataaataacactatacacttaggggcaaggaagcaagagataaaaattctcaaattagcaaagattagctacccttggttgacaaaggaaatatactcctcacaaaagccattagcggccccaagagtcacaaagtcactcgacctcaagagtgacgaagccactgttgggctttgcgccctaaataaaactctattgcaatgtaatcttttctattcaattatcaataaagaagcagatttaatttcattacttgttt

SEQ ID NO: 29421 - DNA, 1570 bp, Cannabis sativa
gtcagggggtgggccaaagggcctagaactccaaggtcatgagctaacttttcttctgtatgggaaggtcgccctgaggacgagctagctcaaggctgtccaccaatgttcttaagaatattcttggtcttggccaacagacccttaggtgaaggtccagggcggatgggctctggttgatggaccatcggcgcgactaacctctcacccgaggagcgaccacccgaggtctcacccacagctcaggactatagacgacccgcagcaacattattcacaacatctacagctgccccttccacctctccctcaagcgcttgtgaagaggcatggccggacccaacgtcatcccgagctgcctcttcaacctcactagggggaagtggtacagagtacaacctgtctaccttcaacttgtcacctacctaaattttttatgaggcgaggtaaagttagaagatgacggtagagcttcttgttgtagtctgccctgaacaacttcagcaggccagaggaatactcctcttacgtaaggatgggggggacgtgccgctacaaaagaaaaaaacgaggagttaaggggacattgtaagaagctcaatgttagacaattaatgaggatattagtaaacgaatcacttactgggcatctggaagacctcctgtactccatctttctttgacacgaagaagaagttctctttccaatgcttccccgcattagagaggacacctactactgacgcatcaaaagtaactttcttatgaaagtaatagcaatccctgaacgaggagttatgctggaaactgtacacatagagcacctctctggccgtgggggccctgccaacagcctccttgaaggctatgtaaaagcaagtcagtatgatccacccgtttggcgtcaactgaaggggagctatgccaaaatagtccaagatctctacaaagaaagggtggagcagccaggccacacctgcctcgagaatagactcactaaaagccaccatgttcacaggtggcaagttggcacggtccttcgataggggttcgaaaccccgctccatggcatattcgttgactatcctcttaatatcggattgtgttatgatactcttgacgtcggccatcccatatgggagtgatgggtcgcgagttggaagaggcgtgctaggcttgctcgagtggcgtggtctgtccatatctacaaaagtgcaaggaaagttagaataggacacagtgcacttcatgtctttcattcgacatgcgagagccttcctgtaataccctagaattatgaaaatggattagcaaaaccctaactagataattatgtattattgtgaattatattattatataatttaatatatgagaatctacatgatttatgacatgttaagacccgttggtgagccatgggtattttagtaattttgatccgagaaggaaaaaaataataagattaatttatttatgtgcttgtggaactatattattatatagtgtgcctgtgttgtcctttttaggtgtgttctgacaggttggcgcggtataatcacaatcgggt

SEQ ID NO: 29422 - DNA, 1733 bp, Cannabis sativa
gaaagaaatcaattagtaaagtctcaaaaattacaaagacaattgacttatacaagtttagactccctctaaatctttgccgcaatcctttgtaacacacttcacaaatctaatttctaaaccaccatcaaacaacaaactcccatcgtctttgaggtgtgagtatttacttcctcccaaagtaaggcttgaacaagtcttctcccaaagatctctctcttgttcaatcaagttgttctaactgaccatgagactagtaagataacacatatacaaatactaaaacctagatgaacaactaggttttcacaaaaagaactctctcttcaaaatgaaaatatgcaaaaaatgaaagctagaagagttgaatcgattgactgctctctaggttctatttatagagcacaggaaccctagatacagtcacaaagtcgattccacaactgtacaaattttcttaaacaaaaattctgttttgcaacatcatagacaggttttgcagcagcaaaccaaaccagaaaaaggaaacttgccaagatggtgtgcgatcatgtacaaggtcttgatacctgccaaaaacagtgtgcttaatctgattttatcaagaaacaatcaaacacaataaagagaaataactatagtcaaagtttccatgtaaagccaactttccataagagaatttcttctcttacaagaagtttccaaacttagaaaaaagacagctgaaaaaagatttttttcctttgatagaaaagaacattaaaaacatattattaaggtgggaaaatcagtttattaactcatagaaatcacaccataaataaaaatattttgacacctaaattgcaaaaaaaaaaggattttacacaaagcttaaaagaatttttttctctttttataatgaatacaaacaagttgttaatagattttgataaataacaaaatttttcaaatatgttgtattatgttatttctaacagttagtacaggttgttagttctttgtccacttgtactctgttttgacagagtttgttacattctgttatcagccttttcttgtaatctttctctatataaatgaaaggttcagctcataagttttcagagcttttacaattctttgtgtccaattctatattgttaccagttaggaattgtattgataaacatctctttcaaattctaatgagaataaaaaagttaaagaatactaaccttcaattgtttggacaaagcaatgactctgtgttttcagctgtgattttttctttgctgaagactattaggttttcattatgagaagaatatggaataatctaccataatataacaatcaaaactgtaatttaatatttttttagaaaaaaaaaaggtaaattaggtattttaaaagattgattaaactaagaaaatagcttcccgtattttttttagaagtctttcctaaaaaagtatgtgagtcattgcttctctaaaaagctcttttaaatcaaaaaagctcttcttatattttattaaaacaaaactaaaagtagctttgagacttcaaaagctcttctaaagccatgccaaacaagcccacatccagctttggaccagattatcaataagacaatataagaaaagaccaactttcaaccaagtacactaaggttatctaaccatatgaaactgaaagggctatataacatcatcttactaattttggaacttttctttcttccaactaat

SEQ ID NO: 29423 - DNA, 3169 bp, Cannabis sativa
tccaagatagaaacatcaaccactggtgcttttcctatcatctgcatgacctacccaatcaacatcactaaaataaaccaaattagaattaatgtctttagaaaactaaatcccaaaatcaacagtgctatttacatagcaaatgattctttttacagcaggaagatgagattacatagaattttcctaatatcatgcacaaacaccaatactgtaacaaatatcaggacaactagcagtgagatagagcaaactactgatcatactttggtacaaagtttgatctacctttactccttgttcatctttagatagtttcaatgttatggtcatatgagtactgctatgttttgcatttttaagaccaaactttttcaccaagttctttgcatacttatattgagagacaaaagtaccctcatcagattgtttcacttggagacctagaaaataggtgagttcacctaccatgctcatttcaaactctctgatctgttgagaaaacttagctctttgttgttcttgctcaacatgccaattcttaacgttccccaaatgctctatgaaccaactttgaaattattcatgttattttttgacaaaatctcgcagttgttcttgcagaccagccactgtttggctaagatattccacctgaggatcggcctcctcgaggtcttatagttccacgcgtggttccccaagtggaattagttcattaggctcagtactagtgtcagttggtggccttaggggacaagttgtggagcttgtttcgaggcatccacctggcatctaagatgcagatgttgtcccatcaccagtccttgtaactgacgagcccctagtctgttggccaattgtagtacttctttccacactagttgattatgttgaaaccatcttgtaagtgatttcttgagttgtggctatcaatgaaagcacaaaaatattgacgctaaaatctggccaactcgctcatatgtgtagacgagatgaaagttagaagtaactaagtcaaaaagagagcacacacaagaatttatagcagttcactcactgtgtcgcgatagtattagagctacatctactttgagttataattctcacgagaatgattataagaaaatagctaagtctgaaatctctaatttctagagagagatgctctgaacttatgggtacttttctaaatgtgaaaaatgagctagaggagctctctttttctagagaatgaggtcctattgaaataataaaatattaaaaaaatatgaaaaaatatgtttaagctaccttttaccgttgatgatggtctacggtgaaattaactccagagctcggttgtcaatttctggagcttaaatcgcattcgtggggtcttttttcatataagttgtagttaaaatttgtaacactcttgatgtaaaaatttggattttatctctttagaattgcgataggagtgtgagacataagtttatagaacatttaaatagcattgaaacgcaagttgaactgtgtcaattgaataattattgagttatggctattttacggaagaccgctctaatacctacgccaggttgacatatatgcctaagtgatattttgacatcagttagtcaatttcttttttatggtgaagacgctcgtctgtttttaaagatgttgctatttcgtgaaatcaggaggctcaaaactacccgatttgcgactaagtcactttgccgaaaaagtgaaattatgaagttatgaaattgacttacctgagttcatagctcttatttactatgagaaagtatacaaacgctcaagatgaaatcaaaatcgaataagaagtacccaacgcactaggtcgtacgttaacctgggcactaggtacccattttagagcttctaagatgttattttgatgcttccaaggtcttcaaaatcaaggaagagatctcctaccccattttgaccatgttggagagaatgcttggagtagaatttgcattcaaggttaattgtcaacttgagcactgggcgcagttcttggccctccaggattctcattttctctctgagtttacttgaatctttcttatttattttttttttttttgaagaaaaaaattatcagaacaaatttttagaataatgattggaaatagcccaagttgacatattgtcaacctgggcgttgggcctagcaccaagtgttaacctaggtgtgtggtccagtttctggccaccaaatggctgtgtttgattcctagaattactagtatcttaatctttgaaaaaaatggagaatatgctcggaatacttcttaaaaaaaactccttagaaatggcctaggttgacaaaatatcaacttgggtattgagccccgtaccaagtgtcaatctgggcactagctccccattctagcctctagattgatctaattctccatcaaggcatatgtttcctcgttttggatgaaggcgaagaaaattctctggatagttattaagtatgatgattgaaagtgccctagatgtcaacctaggggttgggtgtttggggcacctggtgctctgggtgctcaaaagtgaaagtgctctaaatctgattttgatgcctcaaatatgtttgtgacatttataattcatgtcccagtacaaagtttgacctatttgcgctaagacgatcctagaaactgaaaccttagttggaatatcaacctgggcacttggtaaaactctaggcacccaagttgacttccaagatgctatttcatgtatttttagctctcgggcctcgaacttggattcttcatgtcttcatggtataggatgctgaaagatagtgagttggaaataacttggcagaatttaaacacatattctggagtccccaatgtcaacctgggcacagggctagggacccttctcaggtcgactgctatgactcatgactactcaaatttggggtgttttctttcttaccacgtgtcaaacattgatgtccacatcaccaagatcaatttccaggttaacagggtattgatgaaaaaatattacacaaagtacctaaaatcacacctttttcttttcacattttctcaaaaaaaaaaaacaaattgtggattattttagtttcatttttatagaaaacaatattgttttcacactgcaacaa

SEQ ID NO: 29424 - DNA, 2006 bp, Cannabis sativa
tctattgtaaaagaatatttttattttataaacaggggatccccatattacgacaatattttaaatgaaagtctttattttgaatttaattaaagatgtaaattaaaccacactttcaaaaaatttatagattagtgataataagtttttttttttaaaaaaacacacacacgtggcgtccctgaggtttcgggcgctacacttagtctcttcgacaatgcctgcggcatgtagaagagagggcgagagagagttagggtttcagacttagagcttgagagcttagaatgcttgagacttagggaaattaggtttaggtcgatactctttatataggagagcttacaagagaataataggttaatatcccttaaaaagaggaaatataatatgttttttacataataaaacaataaacaattaatatattaattaatctccaataataggtaaatagctgatatttataccttattttcgtgggtggttgaagccctatgtgcacaaagtgcctgctaggatcaaggttgcacaccaagtgactgcgagggtgtaagctggtcggctaagtgcctgtcaagatgtaggctggttggccctttctttgctagtggtgagttggcctaggctggccaaagggccagctaggggggtccagccagaccccttaaggtggcgagttcgttatctctttatcctgctgaagtattcagacttcctgtcaactgatatattttttacgatgacttggccttctttttgacaagtttattccacgtgacattaatcttgcccacgtggacatgccacgtcatgtgttcaaaaattgggataacattttctcccaagtccctatgccggcatatgtatggatagggactttccagctttagtttggacaaatggagccttaacaaggaagcttttgtaatatattcagttatgaaacatttgctcttgcttttctaatcacattccttagcagaaattttataatattctgcatattagtttttgcatgctccatggtaaatgagagagggacatacaataagctatataacttattggtgtaactcattctcattccacatttctcattctctctcttcaaaaaaggaaacaaagaaagctcttcacttcccattgaggtggactcaccttagtcctccaacacctgatattctcacattgtttcgacgatctaagctttccaccatcttcctaaaaagtttttactagtgggtaagctttccaatcccgttatctacttattttcttagattttccagtattgtgttcaagctttccatgctttaaaaattctttgattctcatgttagattgtagtctctttgatattttgatctacatgatagttttagaatgcataacgtgtgatttctcaatgaaaaagatttaatttttgccttcattttatgacttgactctttgagtcacgaagaacacgttccaatttttaaaaacacacattttgatctaaaaactatccatagtcagccttaggggtcttgtttaagacctagctggccctaggattttttcatggggctggctggttcaatggtttcactctaggaagctggcccattcatgcctgggtcttgtaaccctggccagttcttgcatgggtcatgggaccctggctagccctctcaaatctttgggaccctaacaagcttaggtgttggtcccaagcaggtggccaattttttgtcctcttttgacctcaaaaaaaaaaaaaatcctctcatggccttatgggcatatacaaccttagtctcatatgtgttttccttagaaactctgtatgacacttaatggtgactctattgtagtcaaatgctcaacttaagactcaacatttgtctaagttattacacctaaaattgtacttcactgatacccagccttgtacgatgaaattttttggcaagtaccctctggtacacttgactagagccttggctaaaccttgtctcttt

SEQ ID NO: 29425 - DNA, 2716 bp, Cannabis sativa
ggcgttggcagccgatagagatgcggattccgttgtactggtggtgctctcgtctgtagtactacaactgcttgttattccatccatatcgtttagtctcgatggagaaattgttttgtaaagagaggaaataataattaaggagagagagtaaatggggatgaagttttgactatgtccttggttaagaagaaaagatagaaatggaatgaagaagactcatacagagagagagagagagtgttgttgttgttgttgttagctatttggggtgagtttgaagaccgaatatatatagcaaataaacatagaccttttttaagaccattagtttttaataatataaattatatgcgtatgacttgtatgtacgtatagcagtaacatttttaattttagttttaattttaatttaaataattgtgtgtttttttttttctttttcaaaataaggtgttggagatatggggatgtgggtgtggtgggtcaacccaggaggaggaggggatggtaaggaactaggaagattcatagtgagagagagagagagagagagagaataatacttatatattgtttttttttttcatatactataaaaatggtatatatgaatatatttagataggaaggaagaccctagggaataggaaattaaaagccacaagaattttattttattttattttttttgaaaaaaaagagagagagagagtggggaagggagtattagagagggaggggaggcagaggctcatagtatgtgtgggttgtgggctgtgtatgtgaggtgggtcccacctaagcaagttgatggggttcacatgattgtggaccgtgttttggttaaattcatcccccctgaaactttgctgcttctctgctgacccccaagcatggcctcatctcctctcctaggccttctttttaattcaaattatatttatgcatatatatattcctcccatttttttgcttacattttcctaaaatatataaatcttatctgatcttgcatgtttcatcaaaatctgctctattatttggtgttgcttttattgcaccaattggaatgtagataaacattaggtacttgggaacagagagagaaggttttgtatgaataattttttatacatatatatatttgtagtttatggatattactactactgctacaactagtagtactaaatacaagtactaaaaccatgccactaggatgggaatgtggggctaatgttttaataaggaggagagggagaggtatggatatattggataggcattgaagacaaactactaaggctcatccaacaagaaattccctctcttccttttcaatcttacctggcatgatttgattcgtccatctctacttttgtttgtcttattggctaggttcaaccttagtatctcaaatttttcatttatcctttaatatcatctatttatctatttttattttcttattcttcttttatttatatattcttttatatttataatcaaataaaaaataaaataaaaataatcatgcatccctccataatttccaaccaacattgacatttctccctccaagtgggggtggtttccctttgtttctctttacccaattcattgttcaattaatccaaccctttgctccctcaacgcaaatgcaatgtttggaactgaatctcaattatatgtttcatccctcacaaaaattaaaaaacaatgatccaaaatcggataagtatgaagtacactatcccgtacaaaattaataataataacaaataaaaaagaaattgtagaataaggattaataacactaaagagtttgttttaatctccaccatccaaattttttcaatgggtccaaggtaaagatcgcaaataaatttgtgggcaagagaaacttgtcatttagccggtaattattgattactaataaacaaaaactttttttttattaaaaaaataataataataataataaatcggtgtattgtagttatagaataaggtgatctcgtacggatgagtcctcggtgtacaagggggcccttggtagcaacttgtagcaaaaccgagcgcttgagacggtggatttacaaaaccttataaaatttatttgtttcgggatttttaatttcgttttcggctatggtggttttttttttttaagtatttttgtaaatataagaagtgggtcctactcgtaagtggggggattccaattatttttcaaattagattctgtttaattagaaagcgattttaattttcaggtgttaatttaataattaataacttttgttttctaataaaaggaagggaataccttataaactgtatagtagatgtacggtattgtagtttgtattgatacggaagagggtgaaattctgtaattgccactcctcacaaatgggaatgggaacgtgtacctacgtgcgatgcgagtgcactagtgagttacatatgtccatgtgaacacatcgcacgtgtcaaatagctataaccccagttcccattcatcgccttcatgtttcattcttaccattttctaattgaattattaccaaggatttgaaagcaaagagaaccaaattttataacttaatattaaataaaaattttatagcatatatttatgttaaatattaatgttatagtgagatttctctcacctagaaattcgagaccagactcctctttaaaggac

SEQ ID NO: 29426 - DNA, 3456 bp, Cannabis sativa
atatatcagtcttattgtgtacttgtcactttgaaaaacaatacacataaaaagtgattgcatattataatgcatgcatggattaatctctttaggtgttttccactttaaagctttctaaaacataaaagctttcaaactttgatgagtcaaaactttgggagactatgtttaagatatttaacaaaggagtaatgaatactcgatatcctctcaaaattttatactttggtactgtagatcatgaaaactttatggacaaacagcttacatgatcagcatgtgctttatccttagataagacaaggctttaattcgtttattctttctatttgttgtctaattataccttagccaccttcaaaattagtagcaacaacgatgcgacatagagtacacatgcatcaattcactatcttgaatacatcgtgtttacgagcattcacaaataacacgattattacatcacaatagacaattatgatcatacatctattgtaatattaatacaaaaatttgtccacttatgatctatgtcttatcttgatcctcaagcataagaatgtagtaatagaagattcacaagtttcaccgaaactattcctaggcacaatgccaacgtgctagtctcctgaactcatcattgtgaaacgaacataggaatatcatgcccagaaaaaattccgaagcgattccaccctcataaaaaaaattggcaataagaatcgatcgacacatacatacctcactaaaatcaactgacatccctcgcaatactcccactgagcatgcagtaacttggcatctttaaattcaaatgtgatttcaagatttattagtttcgaggcttagtcaaattttctaatgagagattgatatgacaaaacatattacagtcccatctgacaactaagtagtagaggtcttaggatttcttaaagctaaaagaaaatatcttagagcagtgccactatgtgaaaacaaggactatgcaatatgctcgttttcttagctttctcaatgatctatcaacagattcgatcaggtcatgctagagtcgttcaaacaaaaaaaaatatgactcttatgaaagtaaggacaactatttcaaatgtcataacaaaaaaaaaagcagttaattcactactgatatggtagaaaagattgtgtggttcatgacaactaatgcgatcctacaccatctaagcatcctacctagtaataaaatcatcgacaggatgacattgcatgtatggatcttagtattaattataattgatacagaaaaaactattaacatgaatcacaatttttgataattgacatatgaaaacttacgacaagtaagtataacacattcaataaataattttaatctcgtaattatcaaataaagccaattgcgcatttttaaaatttctaacatcgaaaataaatgtagataataaattctataatatatgcgctaactataattaatatgcgctaactatattttattacacgttatccatagtgtatgccgaaaaagaatttataataataaaattcacaaaattacgaaaggaatactgctgcctcagatttttcccaaaatacgtggcagcggctgcgtgcaacacgtagatctcaagagcatccactcacaacaattggttaagtcatagatagagaagtgcacctcacggagtgagcctcccggggaggagcataaagcacgcctttactcttcgggagctggaaatataacaatgcatctccgggaggaaaaaagcttgttcgagcagtcatttcgcatttaatgctgcatgggggaaacgtatcagaacctccataagaggatttgactgatggcgtacgcctcttttacagcgattacacgataatcaacgagtctagtgacgactccattatgaaaacttacatcaatcaaggaaggataaaagattctattcacctaatccttaagatacctacgacataggtcatgtatgtcctattttgtatctgctaggaatttgtgcccctaaggggttgacactttaagacaagtgatccctttctagtgattctcccaaaaaaaactataaattaaataccccaaaaatagaacgtaaaaggggtcgatcaatcaattaaggaattgaagggagtaaagaagagagagagagagatttactaagaacattctctgtaaaaaacactctcataaataacaaagactcgtggaaagtttgccgccttgagtcgattcatttcccggtcaactgacaagtgcatcccgttcttcaatattttgaagaaatgtcaaaaattcgcgtggactaaagaatgcaaggaggcattcaaaaaactaaaagagcacatggccaaaccacgagcattgtcaaaaccagttcacggagaggacttgttattatacttgtttgttttttagaacgctgtcagtgcggtcctggtctgggaagaggacaaggtccagcatccggtgtactatgtaagcaagcgcatgataggagccgagacgcggtatcctttaatcgagaaatcagttttttgcctcctgatggcttcgaggaaattgagaccctacttccaggcccatcccattaaggtacttacaaatcatccgcttcggcaagtcttgcagaagcctgaagccttaggaagactccttatatgggccatggaattgagccagttcgatatacactacgtcccgcgcattttcataaagggacaagccctggcagacttcataacggaatgtaacgaagcagatgccagctccaatatgtcagccccacgaatgccggcatggaaggtgttcatgggggcgtcaaatgaaaatggatctggagctgggatagtaatgatatcaccagacggactccggctccaggccgccctgcgcttcacgtttccagcttccaacaatgaagctgaatacgaagcactaatcaggactaagattggccaaagttgtggggcctgcaagggtagaagtattcagcgattcacagttagtggtcaaccaggtatcaggggaataccaaacgcatggagaaaaaattgccgcttacgtagcaattgtcagagaactgctccaagagttcacagagtacaaagtggagaggatcccatgagaaaaagaacgctcacgcgaattgtctggccaaggtagcctcggacagtgaaatagaaaaactgggggtggtacctgttgaacacctcacggagccaagcattaaagccaaagaaacggtagctacaaatgagcaaggaccgagttggatggactccatcatcaaatacgtaacgaaaggagaattgcctcatgaaagggctgtattcaggaggttacagtatcaggcacatcgatacgtaatgatggataatatcctttaccggagagggctcaacatgtcgtacttaaggtgtgtgtcggaccctgaa

SEQ ID NO: 29427 - DNA, 2239 bp, Cannabis sativa
  modified_base (416)..(430): a, c, t, g, unknown or other
tatattaaattatatttcatgtaagatttttatataatattatatgtgatattgatttttatgactacctaaatatataatattttagtatataaattaaagtttaacataatattatataaaaatatgatatataatctaattcaatataatacaatacaatacgacttaatacaacgtaccaaataagtcctatatgtattattatgccattcattcaattcgttaacaatgattcccaaattattttcagtgttgtaattaaaatagttatttttattaagttttgttacacgtggcaatgatgatagacacaataacatactggcagggtcgcctttagttataggtcggttaggcctccactcattttaggggtctaaataaaaaaatactttttaaaaaatatacatatnnnnnnnnnnnnnnntaaaaatatcatttatctttatagtaaagattcaaatttttcttttgtctataactcattttaattctggaccgatactacaagcttgaatgttttgatcatgtcagcaccacatacacaagtttaagataaaaataataattaaaagtttaatatatgtatttttaaacaaatttattaaaaaggaaaaaccttagtctgagttcccaaaaatggtctctgcgtgacccttccttaaaaatagtctactgggactgtatctcatgattgagttcttattgttacttgggctgatgatggcgacggcggatactgtgaatgtggaggagattgttaatatgactagcagattggaaatggatcaggaggaggtctgggaggagaatgaagatgcagctattacgtttggggaaaaatcattggtgggaagaataatttcccggcgtgatatcaaggaaaacttattcaatacaatttttagtcgaatgtggaaaggaattggggattggacagtcaagttgaatgatgatgatagtgaggggaaacttgttcggattacattcaagaatgtggaaaatgccaaatttgttctggggaaacagccttggctgtttaatggtggccttttactgcttgagaaatggcctgtttcggggcattggggggatgcgaatttagataaagtctattgctgggttaaggtgaaagggctaccaattaagctttttaccaaaaaaaatgctatacgattgggggagatggctggtgaagtggcggaacttagatggggggatgagagtagaatgtttcttcagggttatgtgaggatgaaaattggctttccaataaataagagtatctttgtgggtcgatttattcctaatagtggacatcaacactggattcaattcaagtttgaacacttaccattgctgtgtttccaatgtggggcttggggccatgaacagaaagattgtgaagctgaaattgtaaaggaaaaagatgttcaagggagcttggttccgaagtatgggagttggctgagggatgatgatccttgcccgaatggttttgtagctgcggctcgaactgctcaaggggtcatggaatcgggtggcgctgggacggagaagcatggtggtgtcgacggtcctactgtaaccggtatcggcgttggaacggttgagcatggtcggttggcggttcctcatgaaactgagggacgtggtatacagaacgtgtctatggaagttaataagagtatggaagttcaaatgaataataagagtggggggcatttgttgcacgtgccacaaaatgggaaaaatgatttagaggtgggtttgggcttagataatcggactgggcctggattggaagcccagagtgttaatgtaggatgtgttttaactaggggaagcccatttggagaccagtcagctaatggtaagactcatagaatttcaaaggattatgacgttgctgaacatgacaagaaaaaaaggaaaaatgggggtcctgataacacggtggaggctgaagctttgaaccgcgtattgagcaaagggaaacaagtgcagcaagatgaactcgagatcggaggtgtggagaatttctctattgggggaagtgaggttgtgccgcaaggtaatataggcaggactacacagcgtaagaaagtctccataaagtctaaagctcgtgcgaaggggggatgccgaacaggcagagatagtgtttcagtgcaatctttgataggcgagagtaattcttgtggaaatgggaagtctgtggaaggttgtgataaac

SEQ ID NO: 29428 - DNA, 4630 bp, Cannabis sativa
tgcgatgtattcgctcagcagagacgtgaattcctgagatggatggatgactaggagtacatcaattgatctcaccaagcagaattagattgccgcaatagggaggccaatgatctagtaagacggttcagtcagagaatcgaaagaagaggccaggatctccttagggatccacttcaaggaagattgccactaagttcctcaggaactaggacagatcttcccttgaaaaagggaggacatacctctgctcaaaggttaaatagcgagattagccagatcctggcatccagcgacttaaggggccggccaaggatcccttgctcaatagcaatccccagtgtacaaccactggctggccagccatcagcaggaatacccatggtcgaccagagtacagcagttcccccctaggggagcgaggtgcacaaagatcaatctttgaccgacgagtagtgagactggatggaaaccccaaaatggcaattcgagaagtgaaactgatcacttcaggcatctagatccaccaaactctaacaattggtgtaatctacccccaatcaacacacagccgacaccagtcgaccgaggagtcatgggcagctagaccgtgcccaatgtaggtctactgggccatggaagcatcacacgcggccagaccttgccctttgcaggtctggcttgccatggaggaatactgggcggctagaccctacttaatgtaggtctatccggccaagcacagtaacaaggcacaagcctggctggcctaagccaactcccatacctgggaatggccgacgagggtttatagggcatggttgatcttcaccatacactctctaagggtatggccaaccagcccctatctcttcagaatctgtagcctccccaaggaggattagtcaatcaagtccccacaacaacagatccttctgtgcaagcacagttggaccaactcagggacatgatccagggcatagctggcccaaagccttcaaacctcgagcttgatcagtcgaggggatgaccattcttggcaaatataaatgccctcctacctctactaaagttcaaaatatcggtataaaagatgtatatctgatgggaggacccgctagctcacattaaataattcaagatgtagctcgactccagaaggtcactggtgatgtgcgctgttgcatattcccagccacactatcgaagacggcccaacagttagtctttaaactcacacagggagattcaaattttggcttgagttctcgcgagaattctacacaaaattctcatccttaagacttgtaccattgcagctggaagaccttgtcgaagttaaacaacgacaaggggaacctttgaaggattacattcagagattcatggctgaggctaccaaagtcaaaggcctaactaaagaaggctgatatacggccatactggagggcatacttccactaagcgacttctggaaggatatcaggaggatatccaccaacaacatgaaggtgttcctccataaagtagatgactttatcaaatttaagaagccatacgacaggcccaggtggggcatgccaataacacatagtcacgaggcactcagtagcctcatgacccaccaagctcacaggcaagaaccaacaatgctggccagacctctagtggtaaaaacactagaaacaagcgcaacaccaatagttctgggaggaacaatggcaaaaagaggaagtttaacactttttccatgccacaaaagaacaaggaggagaagtacacttgcttcaccctcctaatagagaagcaagaccatcttcatggccactcagggaacggtgccgtaccaaaatccctttccaatcaaaaaggagatgggcaagagggacatgtcaaagttctaaaaatatcacaacgacttgacactaatgagtgtcaaaatttgaagagggagatttagtatatgataagatgcaacaatccccacctatgtcgttatgtgcaagatgaccaaacccagacgcaaggaggcccaaatggagatccaatgccaccacccatggcaggacatctgagggtcataataggctgcccccacattgctggtgaaacgagcaaagccagggagtgctatgcttagacactccgtcacaagctcaaaggcaaaatgctagctgtcgaagaccgaagctctaagcaatagaacccatagagcccatgatctcctttggcgaagaagatgcagcaccggtcagcttcctgcatattgatcccttggtcattactacaaaaattgggaatatgatcgtggctagatgtatggtggacgaaggagcctcctccaacattctttccaaatcaacaaatgaaaaaatagggctccaactcaccgacctggcaccttgcaaccaagtgatgtacgacttttttggccaaggcatcgcagctgtcgagtatatcagattaaccctgacagttggagagaatccaaccacaagaacaatgatgttgtagttcgttgcgctcaatgtaccctcgactttcaacgccataattggacagttggccctcaatgacttgaaggcagtaacgtatatataccacttatgcctcatattcctaataaggcacagagtggcatgttcgaagggagaccaacagtctaactatcactgttacagcttggccttatctaagtctaaaaggagaagatgcttgccagaagtcaagaagatgagccctgtaagaggcaatgaagtctagcccaaggttgggatatagacatagatcctcgctttgatgatcctacaggaagcttcagacctgtagaagagttggaagaagtgaaggttgatcccactcatccaacaagaagaccgaaaatcggtaaaggtttggctctagaaatcaagttagtcttgatagaatttctaagggaaaacctggacctattcgcatggtcacatggagacatggtcagaattgacccctccgtgataacccatgcactcaacattaatcctagcatctggcctatttaacaaaaaaggtaattactggacaaggagcatgcccaaatgctcaaagataaagtcgaatgactaagggacaatgacttcataatagaagcattctaacctcaatgattgtccaatctagtgttggtacctaaacccaacaagaattggagagtttgcatcgacttcactaacctgaacaaagcatgtccagaagactgcttcctgctgcccaaaattgaccagttggtggatgccacggctggccataaagtcttgagttttattgacgcatattcaggttataatcagataaagatgtatccactttgtcaggagcaaaccagattcatggcagacctaggcatatactgttacaaagtcatgccctttcggctaaaaaatgcaagggccaattatcaaaggctggtgaacatgatgttcacagatctcaacgatcgcaacatggaggtgtatgtggaagacatgctcgtcacgtccaaaaaggctgggggtacgtggaggacctaggtgagtgcttcaaaatccttcgcagctataatatgaagctcaacccccttaaatgctcttttggtgtaagatcgggaaaattccttggtttcatagtcaacgctaggggaatagaagcaaatctaaacaagatccaaacccttttggacatgaagtcgcccacaactgtgaaggaagtacaaagcctaactggacgcattaatgaacttatcagatttttgtccaagtctacagaaaaatgcgtgtccttcttcaacattctcagaggcaacaaaaaatttgagtggacagaggaatgtgaaaatgcattttaagagctaaagaagcaattggcccaactaccggtgttgtcaaacccctagacagtgaagagctaggcgtgtacctttcagtcacagagcacgctgtgaatgctatcctcacaagagaagaaggcggtgtacatcaccctgtatactatatcagcaaaaggctagtcgacgtagaaagtcgatacccactcatggagaagctgacctatagcttgctcttagcttctagaaagctgaggccctacttccaagcacaccccatataggtgtacaacgatcaaccacaactggttttataaaaacatgaagcatgaggccgactactcaaatgggccatagatcttggccagttcgagataacatacctactaaatacagccataaagggtcaagaccttgcagactttgtggctgagtgcaccaactcaactcttgagccccctcaagactcaggagaatagcaagagccagagaagaagcgagagcaagagcagcaacaaaatcttgaagatctaacatggaaactccatgttgatggaagctgcattgaccaattatccagtgcaggcatttcccttataacacctaggggtcaacaactgcacagagcaattaaattcaggttcaaggccttaaacaaccaggctgaatacgataccctgatagctggcctcaagctggcacattaagttaaggctaacaacctggacatagcagcgattctcaactagttatgatgtttggttttgtgccctaaataaaacccattac

SEQ ID NO: 29429 - DNA, 2322 bp, Cannabis sativa
taaaactttaatgaagtattttgaaggatagaatagattgctcttagtaactgtcaacgtgacacctcgtatgaggttttatttttctggtcttaaatcaatctaaaataagggtatctgtaaacaatagtgttagtgttgtacaacccttatgagaaggactctccggaactaatgctacactttttagttacagaccaattagaaggcgccacccagcccgtgttgctcattcgtaaattacacatcatctttggcccaagattaacaaaggaatctagagcagcccagcaaaaatgaactccccaaaactaatatgatacaagagtaaattattaacattcagtagtaatttgcagcattgtgactgacttgataaaaactatcagaagctgttagttaaaaggcaatacaaggagaaatacattggtcactggctagaacccccagtgcataagcttaccaagtccattagtgttgagtatagcacatccagtgataaatgccctaagaatttcctatattcagatacaccatcagaaaggtccatattaagcttactttcctctgcgaaaccatcttccataatcaaccaccatgagatgcatccttgagcatcctcagggtccacatgtgcagttaaactgagtgtttcaccctgatctagctcaaatgtcaagctgaggaagtcacgattcacctttattccgaccatcaaagcctcttcgtgtagccaacgaataatttggcctgcaacctgttgtaaagttccaaaattcagttttagttaaacatgattataaatatattcatgtctcgatgaccacaaatataaccttagttgcataaatagaagaagcatctttattatggcatacctgctgtaaaattataacaggaagatcggccaagttacattcatatcttttcattgaagaactttcctgagagtttcctttaaagagaccgacaacgcttggagcaccttccccttctacaatgatggaatcatcagttacaaccacctttgtccgaaactgagacttggtggtggtcttcacataacgcaagtctgatataggttgggtgcctgcaaataaaatagattgaggaatcttcatgaagagagtccatgacgatgtgcgagaatgccaagtgggatgagatagcaactgtaggtatggcaccccagaaacctacagatattattggtagttaagaaaaaaaaaatcaactacaagaaaaagaaaagcaaaaatctgttaagttgaatagaattagaatataccatattttctagcaccctgagaactttttttgaaaagatcctatgagccaaagatgtgcagaaatgaccaagaagactggacccttccttcgcccgttgactagatacacgagggatagcagaaacaggtttgtcctttgtttttgaaaatacgttctcatgaaatatctgttggagatatatttcacagctagtacgatcaggaatgcttgactcccttgtaaatccatcagaattttcctgatctggtaactctacaccatctaatgtgtctaaaggtaagattgtattctctaaatcctggtttcctgaaccatcaactgtctgatcattttgaccagatgacacaagtgatataaacacagagtttccttgacctacactaagttgcaaatagttttctctaattccagtcacattgactccaaatgattggttgaaagcttcacggttcaccaaatcaaatacctaaaaacatacaaaccaaagagagaaaacattaagaagaaacatgaagaaaaacaaaatgtctcacattatagacagtaggtcagctatctatataatatatataaataaatatatacaggaaaattcttaggtacttttgctcctaccataggaacgttttctacttttggcacctatagaaattaaatcccaattctctatatatgactgcgcacaatatacttatattaagcaccctaaagtagtattcaaaccatcagttgcacttatgtgtgcatgaatattattttcaatgccataaattattcagaatttttcaaaaaacaagtaaaatgcctgttataactacaatatacaacggtcctcaagaaaaaaaaaacctacaatatacaacgttatataaaaagtcaggagataatttctctcattgccgaaaatagaatacgcccctgtctctgccgtagggccaaaagtgattccctatctaagaatctccctatatatttacatctatagatatatatatatatatatgaatatataatgtgtgtgtgtgtgtgtgt

SEQ ID NO: 29430 - DNA, 2694 bp, Cannabis sativa
catctgacggttgccgtacatcacggattacaatccgtgaaagtacaataacgggacaaaatcatatccctatatatatatgattacatttaaattattagactattagtcgtatcccctctacttgctacgtacttattaagggtacaattaatacaatatacacacatattatatatgtttcaacttcttgacatatgacatgccatatttgattggtcttttttctttctttataattatgtgtattaattttttttttaattaagtgtttatatattacaacatgttttatttgggactcgaacccaggatttttaacactcacacacccacttatgctacttgagctagccccaagtagttaattacgtgtattaattaaaacttggagatatttataatagataatatagatgtataccatagttattggcatatatataatataagaacaactcgttattaattaattaccttaccaaaaagggaattcaattcttaccgacttgtgttagtttctgccatctcacattgttgtataagacttttttaagctaatatttagttatttacaagttttgaagacccaaaacaagatggtccgcgtatttatagctctatgaactttttgaccaatttagttacttgtatacatattttacgcaacttagttttttttttttctgaaaaattttacgcaacttagttaatgtcaaaacaaataggtcaatttatgacaaattaaaaatatatatattgtcaagggggagaactggtttgatttattttccatgtatatgcaaaaactagcatgaaaggccatccatctattacaatcaacgtggtagttagtatttcgttttcctcttcccagctaagcccttcttagaaaacacaattcacaattttattattttactatagttaccagacattcaaaataatcaaggagaatatagctagaagcttaaaactgtgttttgtaatgtatgaaaatatttaagcagatttcatttaattagattattacattgtctagttgaatgcataaatatttcatattatgtacttaaaaaattaatatttttttaataaaacaaaatattaaccatgttatttataaaatataaaaaaaattattaaaatttcatatcttcttttaaaaaacaatattttatttacgtcgagttttttttattattatttttcataatattgaaaataacatttattttattgtatttttttaaaaaaaaaataaaagaagtaaaaatatgtacaaatttcttataaaacataatactaataagttatttaaatttaattaatttcttcataaattaaatgctactttcgtggtattatatataatggtaggtaatatttcaattccaccaaggtgttaagtgggggtgcctatgaccccaccaggtatgtatcgttggttgagttggaaaattgccaactcaagcgacgtttggaggaggcaaaccaacaaaatgttgagttggaacgggaggcagctgctggtaggccaccttaggaagacaatgctcaaaaccaacctgatcctaaggtaaagaggccatgaggaagacctcgcgactcacgaaccaggttgtaggagacagctcaagggaaccctctgaaaccaggaagaacaacctggggaaactgaggatgcccttgaagatgagcaaccgaataaccagacacatcatcaagaagtgcctcggaggccctgggaatttacaacccaggggaatggaaaccgtgatttactagaatcttctcgcaggaatacgaacaggaggcaacctcagactagggaataggaaatccttcgtgataacgagagagatcttgagactcaacctaagacaggtgggttgccaacgagacaccgtcaacgtccttctcgcactaatagggaaggggcacatacaaatcccaatagagggcatgtatcaacccgttcccaaaggagaaagtcgatacgtgatgaggcaagttctagctctggacgtacaataactcatagttgatcgacgcaaggaggggatagaactcgtcgcagtactgatcgagagagtacgggcacagctagaactgaaagttactcaaggacgaggtttgtaagtaactatgatccacaagggctagatcttcgtaatcaattgaattaaaagaagcctaatttacgccaacaactcgaccgaaagtaagaggatcctatccaattgcgaattaacgagttggaggacaagttcaggagataccaaggtggggaattgggaaaactgcctggttacgactcagacgaggagctcgagccatttgacctagacattatgagagctgaattcccccagggatttaaaaacccccatgtcacgtcatacaatgggactatggatctggtcgctcacctcaacaattttagcacgataatgcaagccagcaacgtaacgaataacttacagtgtattttattccctacctcattagttggggtagcgagcagctggttcaacaaatttacccatcattcaatcacctcttaggaaccgttgtctaaggacttcaagaaacaaatccaggcaacaagagacaggcaacctgaagcatcttctcttactaacataaagcagtagccggacgagacacttaaggcctacttgagtcgtttca

SEQ ID NO: 29431 - DNA, 2892 bp, Cannabis sativa
caaatttttgatcatacaagcaagaatatgtaatttcaattacactaataaaaccatatatcagtaattacctgttcgccaccggaaaccaaaacaggttgctttgaaaaatcccttgaatagtcaacggcgtcttctctttcgagccaggcctcacaaccatccaactccaaattccgatcgacatgtatcaaatcgagaccagagctctcgatctcaaccctcagttgatgaacaggtggagcccgagagaacaagtcggcccatgaatccaccctagcaacgttcttagccatgtcgagacgacccaagaaagcgatctctgatataacaacaagggcaacaaaaagagggaggaaattggaccatttcttcctgttaatcacaggaacaccattagagacaggtaaagcatcttgggtcgtccctgttcttgaccctctttggctagcgaaaatacccatcaataaaaaaagcctcttttgtcttctccaaaagaaaaaactgtaaaaggtttaagaaagaaatagaaacgcagaagaaggtaggctagaagaggttgagattgtataagagaagagccatggatggatgattagagaagtggagagttgtgtatgaggaaggaggaaggaggtggagacatagtaaaaggaaaatatgaatattcaatttatgtaattggaaacaaaagggaacgatgtgcttggcacaacacaacacaacacacacaagctttcttctagaaagactggcttttttttttttttttataactaaaatggggattgatccagattccttccccaccctttcggtcattttgacaatctcgaaaatcagatgtgagttgtaagaatcttatattttaggttttttaattggatcatcggtaattactataagagttttcatcacacaaatggtatcgcttacaatagctagactttttgatccaaccaagaaaaaatgtcaataaaaacaatttgttccactacactacacaatacctagtacaaaggctttagcttggatcaagtattaattgaagcttttttttttctattatcatttgcttggcctttggaggctaaaatttattgtggcagtgtcatcctatatggaaatctcggagggaggtgatactgatagcctagttaaggcatgttgagttttaaagcccttatagctgtgcacagggtcaacctaagcaatttgagagcctttggcaaaaaattaaagggggtaacttgaaaaatacttgttttttgtataagtcaaccaaaattactagcaaattatattcatttaaattatactcacttttataggagattgcctaatatactcccacattaacattaaatactgaaaattaaatcatactgttttgggttgaagaaagggtattatagaaacaataactatgaaagtgggtagaaaaaataaaatattaaaaagagggtaaaaattaaaatagttaacttaaagtgaatacctcacgtaatttccttaaattaaaatttagtcttttattaaaatatatatatcaatcaatacttcataaactcaatttaaaaaaaaatatatatatatatatcaatcaatatttcataaatttaattttcaaaaaaaaaatactttataaattctaaaataaacaaaaaatttagaattatatgtattgggatcataatttttttttaagtgctaagtgcatatttattgttatgaatatttattatgtatattatatatttaaaaaaaatatttactatattatatataaagagacaataaaaagggaccttttaatataagaatcttatgtaatgactcaagttactatatacttaggtcggcctacgtaattctcgagattgttaaaaaagaccaaaagaataagaaaggaatttataacaggtgatctttttttttttcaagcaaagaaaatataaatacatttctattttgttattattctttttcttttaatgtggactgttattattattattttttgttttttataaaataattatttttatatgaaatatttttttttatttttaattttcatctatctattacattttaagaaaagtatatacataaaataaattaaataatgatgatggtgcacattttatttatttcattttgtgaatattattagtctatttatttattatagtgatgcacataatctaaatatcatttgaatattttttctatcattagaaaaaattatttgtaaaacattcaaattacaatacaaacataaacttgtttaatttagaagtctattgatcacaataatgaacatatatcaaacaaactttcttgtattttcttatgcaatatataagataaaactttttaaataaccaaaattatttattttttaaaaaataacagtgtatcattctacaccagaaataaaatgtcaatatccgagtccctaaaaatagggcctagcgctcaggttgacaattaagctgggacgctgccttcaattgctcaaatgacaaatctgatgcaactattgaatccgacatggtcaaaaacgggagaggagaccccattcttaagttcagaagccttaaaagtatcaaaaatagaatcacgaaagctcagtttaaagggtccaacacccaagtcaacaaatggcctagttcgttggattctgcttatcataatctgatgttgttctactgtccaactagtttttcacaagtgcaataattcatgaagtatgaacaaacaaattcacaacttcaattttttggcaaattgactcactcggaaatcagaaatttcgagtcttccgtttccgcaaaacaacgacatctctaagaactagtgactaactttgccaaaacctataaatgg

SEQ ID NO: 29432 - DNA, 1780 bp, Cannabis sativa
actatgacagcaatggatacttagtgacgatgatatgattgtgaaaattatgagattgaattttatcgtgcatatatatggtatcaatttacatatataactatttttttttctttttgaaacttttaattagaatataaaaaaaaaaaacaaatttgaaaatctaaagatatttttctaaaagaaaaaaatagattagttgttcaaaaaaaatctattattttttttcaattaattaatcttgttaaaattttaatttcttaaaaaatagaaaactaataaaataataaattagaaagagagaaaaccacaaaaagacatatgttttgttaatattgagttgtgatagatgcaaactcattatcattagaattctatttcactcacaatttttaatatagatattttaccaaagactatggagtaaaatatagaaaccactaaccttcattatcaactttcatttattttgtaattaatcgtgtcaatcatcctgctcatgtttaatttctatactgtgtattttttttaatgagctataggaacaacatgttaaatccttttgtttgggtaatattttagggtgtcaataataattaaaaattaaattcacaaggaataattaaaaataaatgcatacaaatttaacagggaaagacgtttaaagttagtttgcacacaaaaaataatatacaataatcaatactatatattgcaagtaaaattaatgatcataataaaaaatttatcttcaattagaaattcaagacaaattgaatctaattccaaattatatgtaaataacagaaagataatataataaaaaccacaaaattatgagatttagttgatttagacagtgaagagtattacaatgaacaacaaattatggtttactataacaccttaaaaaacgtcacacgtgtgtgcttttatgaattatttaaataaactttaattataaagattacattaataaatatcttggggatcccctattataaaagtattttacaaaaagtttaatataaggtttacattcaaaatgctatacagatgcggcaccaaaacatctactactgacaactcgactctacaggccggttaagtcgatatgtacattcgtcggagaagactgctgactcatggctaccctaatttacccttgctcttaccaacaccacaaaacactcgtaagtcaaaaaagactcatcaataaaagtaaaagcaataaacacatgctaacatacaagcagtacaattaatcacatatgcgtaacaatctaaaatacacatttatttgtctgataagacaagctaaaacagttacttcataaagtaatctgtagaaaatttagctatgatacataggaattaacttttgtaattctagcttcaagatcacacttaaacaaataaaagttaaattaaaataaacaaattaagaacaaaaatcagcaaacacatattaaaccagaaagataacacagatgaatctagatagctttcaaacacaacaacacacgagaattatactagttctgatcctaagttcaatgtgaacttggtcatactccaatttaaaagtattgccaccaatctttattaataatgagaattagagatatcaatctcagaagctacaagaaaataatcacagtaagtcatccatggtgtaatccctcaacactcattaactcactaacccgagccaacataatcgacaatgttgctcaatacaatttttcaatcctaaatctctcccaatttctcactctaa

SEQ ID NO: 29433 - DNA, 1147 bp, Cannabis sativa
gttgaccaaatctaaggtcaacattttggtgctttcattgagagcattgtttatcattccaactaataatcatggatgtaattaggagaacaactgcctccacttcctcaagtcttcctcatgatcctatgatggatgatcctaacattcaagttcctttcaccataggtggcgcaacaaatcaaacacatactgttaatctggaaaatcttaaaactccagctgataccacaaatctcattgatcctactgacacggtgaatcctagtgatccacctttactgcacagaactgatcccccaatagcacctcgaacagaaggtcttgtccacacggaacaacctctacagagctaaattaggattggtcactagtattatgaaggagaaacagggccaagaatcaacaaacaggctgtcggtgagcctcatatggacttgggaatggacatcaaacttgccaggcttagagaagccatgagctaggtcacccaagctaaagaaccgcatgttgttggttgtgatgcttctgctcaatagagacatgaattcttgaggtggatggacgaccaggaagccatcctctaggcctatcaggtggagctagaccgccttaacagaaaggctagtaacttgataagaaagttcaatgaaagaacttctggaagaggctaggatctaataagagatccttcacaaggaaggctcatcgatagatcaagaaggatccacaaccaagtagacaatggacaagcagtccacccaagtccctcaagcacgaggataaaccttgcccaacctgatgacagtcaaatcctgccgaacagatcttatggtgggagtagccattccctagcataaggtggtgttgggggacaaccaggtatttctaaaacaaaaacaccaccactcggccagcctctggccagtgaacaaggtgatgctcctccctaaaatattagagaataggtcattctatgtcctatttttgacaaattaggtcctagaataagtggaaatgcacaggacatcatcaacacgaggagcgagaatagaagtaactttgttccaccattgaacaacgattttagataggtggatcctattggaaattattttaccaggatcttagatccactcacaagtat

SEQ ID NO: 29434 - DNA, 1917 bp, Cannabis sativa
  modified_base (427)..(429): a, c, t, g, unknown or other
  modified_base (564)..(571): a, c, t, g, unknown or other
  modified_base (600)..(603): a, c, t, g, unknown or other
  modified_base (771)..(784): a, c, t, g, unknown or other
tatttcaaacacctaacaataatgccctgctattaaaaaaattctacaacacagaccaaacttgactctctacaacgtcgctttccaccgcttccaagtatagttacaggtaaacgagaaaatcacatatagcataattaacatttattaaaattaaataaatcttcaccaatatgaaatattataattaataattcaattacattattaaaccctaattatttaataactcggtatataaaacttaagcggtctttacacatatattgtaatttactatattcttaaccaaaactcatataatcaaatattactgtgtttatatatgaactggattcgttattctgatgtgaaagttttttattcccaaacttgtgaatcaatttaccatcactacaaaagactgttacttttagtgacaactttnnngtcacaacataaattttttatgactaaatgtgactaaaacatagcacttagacacaagttgtcactaattgagttttagtcacaacaaatattgtgactaaaaatatatttagtcacaataaattgtaatttttnnnnnnnntacttttagccacggaccttttagccacnnnntaggaataataatttataattaattagtaacaacttatttacttttagtcacaagttagattaataaatttaaaaatatgattaaaaatatctataatattttaagtatttaaatttaaatttaaatttatttatttaaaatgtatatataatttttatttttaaatnnnnnnnnnnnnnntataaaattaataaaaaatattttgttaattaatagcatattctgttaaagttaatctagaaatctaaaaaggtattgttaaactaaatattatgttacataaccacactttatatagaatagatagatatggtaattttattatttcgttgtttagcttaaatattaatttgttgtgttagaataagagtagttagttattccaactgtcttggaatctttatttttttttgtatttacttcttgccaatttgcctaaatctgttacattatgccgttgtactaaagcctacatataggtctgtaatttcagctcaagattaataagaaatcattctcttctcctttctctgctttagtcttaaacctctcatatggtattagaagttaacctgcccaattcaatggcaaggccttccactagatcccaggatggaatccttcctcacccccctgaaaatactagatcacatctcccaactaatgttacttctgcccctacagtagctcagccaacaggaccaaatctcagaatcctactgatgttcacgaagatcaatctccaagaaccgaagatcaccagattcctcaaaggcgatctcactctcttctcgatcgtcatgccaatgaagatgcatccagccccttcttcctcatctccggtgaccatcaaggtattgttctggtgtcaaccgtactcactggagtcaattactagtcatggaaaaggggaatcaccatggctttggcagcgaagaacaaaatcgcttttagtgatggctctctcccaaagcctaaatctggtaactctcctctcccttcttggctttgttgtaacaatatggtcatgtcttggcttgtgaattccgtctctgttgaaattgcccaaagtataatgtactttgacctagctacagatatgtggcatgatttagctgaaagatttaatgagggtaatgctcctcgaatctttcaacttcaaacgcaactcactcggttgcaacaaggtgatcatttcgtcactgcatattttaccaaattgaaatccctatgggatgagctgaaagagtttcagccgaatactattaggttttatgccctaaataaaactccatttcaatgtaatctatttt

SEQ ID NO: 29435 - DNA, 1851 bp, Cannabis sativa
gaattaaaaaatggttcatccaaattattattaccttgatcatttctggcagtgaacaaaatggttccagtctcgtccccaacaaggcactcagcgattcgagtctgacggaggtgttgggacaccgatcggcctttctgtaagacggtggtggaagtgaggaccttaacaacaagggtatggccactggtgccgggtttcaattgatcgacctttgtgaaaacgggtttcctcaaacctggcttggcattgctctgctccgattctgcaaccgtcgacgtcgtagtcgtcgtggctgccatagctaaaattatggagaaagcttaaacctttagagactcttaaccctaaccctaaccctaaccctaacaatccaaattatggaaatggaatttctttctctgtaattttttgtttctttgaaaatatttaggagagtggagaagagaacctcttattatgtcattttcaatttttaaaaaataaaaaattaaaaaaaaaaaacaaatatttttacaaaattctttttctttttcattggttgaattacctttccccataatatttatttctttcattatttattattttggtttattattctctcatttattgattgattacctcttataattaatgaacaaaataaatagaagagtctaatgttcaaattctattttgagagtgttatattttttaaaaatttcttaaaattttactgaatatctttaatatattccttaataattgcaatgtagatgatcatagaataaattaaactaaaaaattctctcagatgctgaaataaattaagagtgcatctgtaaaaaaattttaagagtgcattgtggaagtatcaaaaaaaattatactcatatttttaaggatgtgtatttcttaagtattttttaagcaacatgtgttctaaagttactcacaccaaggcctatttgtaagcttggttgaaggctttgttgtatatgtttttgtaggagtatattatggaagtaatagtagaaaaacttttatgggtctcctttcttgtttgggtcaagagtttgactctcatcctgccccacattgtgagggattatatgttttgctattgaaagtggacttgttgtggtaggccagttttaggatagaaactcttatgaggtttaatagcgatgattcagttaagacaagaagagatataaagttcatatagctagcacgtggtctctaaaattgttaaagcacctaaagattggagaaaagatttgcaccatgtgatacctttattttccataaaaaaatatttgttttttaattattatttataaaaaatgctaaggagtaccttaaacaagaagtaatatatcgttattgatgtaatttaatatcatatctcatatattttgatttaataaataatatataaaatgcctcatattactataatatttgacaacttaagatatttaagaataatgctcatcatttattattttagtttattattctctatttgatggattgattacctcttataataaatgaataaattaataaaaaatacattttttattaaaaaaaaattgtaatcatattttaaggatgtgacattactagctactatattagttgacattttatttttgattaatataccatgtgacacttatactcatatttttattctaaagaatttatactcatatttttttaagtatgttgtatatcttaagttactcatatttcaaaagaatttatacttatattttaaatatagcaagtactgaaaatttattctcttagacattttgcttaaaggtgtcatacccattataaaaaagggtggatgttagc

SEQ ID NO: 29436 - DNA, 2973 bp, Cannabis sativa
ctcctttatttaatcaagttctttttttctaattttaataatgtaagtaaacaaatgtaaatgaatgattaccttactattgattcccattacttattagtaaacatgccataaatgtttttcaaatttattttcaaaaaaaaaaaaatgtttttcaaattttaatttagaaaattaattattaatataatatttaaaaaactaaactgattatttatttcaactatcacgtttcaacttctcctctgcccacctctcttgaaaccccccctttcactcactccgcccatagttacttgccattgcgtttatgctcctccactctattctggcatcagtgatgagattagagtatttcacttcttctttactcgacgagatcagatgcaatggtgactgattccatcaccgttaatgcgcttaggtgaccaacatagtggacctgctacattaacttgctcagtcgatctcaaaccagcactgccattatttctagtaagaatgtgtttttctgttctgtttatttattctgtgattctaaaaattgaaagtaaaaatactttaaaattgaggtgtttgctttcagcaagaaagaaagtattcggaatagaaatcaatttcgacaaagacaatctaattggtgaactgaaatgaacgttgctgatttcagtgaagtcaagcctccaggtgtttcgttcttgatttaagaatagaagttcacaataattttattttattttgttttagtctactcctttcttgattcaacaactgacttcatatgttccatgtttcaaaaagttataatgtggttgtttattgctttggatttaaagttggtgatattggcccttgtaaaacattatacataaatatatacaggaagaacttaaggaaaaactgataatagatgtttctccctcttcttattttacataattcttgttctgtaatgtttaaacttttgataaaatttttgaagtgatgagttatggtagagagatatttgttgaattgctctgtttcataaaagatatttttgggttggtccctcatgttctaggctggtttgtgacttaaatcatgtagtcattgcaaaattaaagatggtttggactttggaccaccacctagagaatggtcttggaagtttggaactattattattgtgctatcttatgatatgtatcattccatatttaattcttcaggctttcaacaattttttgggagaaagcttgttcatttcctatgagaacaaccactgtagtccctactagaaatacttaatttatcctatttatcatggcagaccttgtcgttcaaaggtcactacaaatgcatgagccaatttcaaaaagtcatcttcgttcttaatatactttctttttaacatttgtattactctttatcatatatttgtttctattagtagatatctagaactatcaagctagctaaagatccaaaatcttggtctagtttgaatccacataaataggcacaattgaaggtaggcacaatcaataagtattataatcttatatctcattcatgtttcctccacatatttttttttttttatgtcttgttctaagagattaatttatttctttcttttccagccatgtcaacatgcattgaggtcaaacaaaacatattgatcaaaacagataagtcagcttaggccttgttaggatatgttcattgttgtgtcttgtatagttccattttgtatgatatcgctctatgattttgtacagtaattttctttttcttgatttgtaacagtgatgatttataggtgacaaagcaaaggaaatctcttattatttcttctccaggtaaaaaattatttgatgtcctttaaatataattgctatacatgacggtcatagccattcttaattatttttgctaaatatgaaatttagctgttgttgtatgtatttgaataaaaagatctaactaagatggatagtctcatatttctcattttccaaagattgaataactaaataactttagcatttttcattttcggaagatgattaattactaaatgactttagctttgtgtggttctgttttgtatggaattaattcaacataagatcttattcttggagagcactattggactacttgaacatcaataaggtgaatacttatcattttttatttagatcggtgagattttttatgagaaatctctgccatattttggttgcggcattggatggtttcggttagtaagattacaattataacatgttctagcattatagtataatgctaactacaaaatctatcttgtatcgatttgtagattacaaactcttaataacattgtaaaatgcttaaaatccatgctctccttattgtctcttccttgcatcataacatagatatatattggcattaattgaaagtattgaaaataatgcataatttggacctaaaacttctatgtgtgtaatgttgaaaaattaaaataggttgaatgttttttgtttcatacattaattatttgtattaccacgacattatttatatgattgtgaagcactaaactaatggccatattttttttttatgattcaataaaatttatattattattaagagtacatggtagtttggtaaaagattgttatattatgcatcgtatgtattgtattgtattaccaacattttttttatcactttgatagtaatcggagcgtcatggcctattattcttggtgggccaactcactggacaattggtcttgttgcaaccttaatctctattagtagcatcattgcagctgacacgtatgcatttttgggtggcaaggtatttagtcattcaaagttcctgtaagataccattatttcatttcatggtctcatataacagccttgattaatggagtttgctgttgtagtttcttatttagactttgtatattttaagataggcaagaatta

SEQ ID NO: 29437 - DNA, 2394 bp, Cannabis sativa
  modified_base (1132)..(1136): a, c, t, g, unknown or other
  modified_base (1664)..(1664): a, c, t, g, unknown or other
tgctctaatgctgcccaatgatgaattattggagaagacataaattgactaacaaaacttattgagaatgcaatgtttggacgagtgacagtcaaataatttaactttccaaccaatttgtgatatttctcaagatattcaaatggtttcccatcacttgtaagatgcataatttgattcattggagtactacaaggatcatatacatacgcagattgagtgtttctctaatgtagattgggcaggctccacggtagatagatgatctacttcaggatattgtgtattttttgggggtaatctgatctcttggaagagtaagaaacaaaatgttgtgtctagatccagtgatgaatcagaatatagagctatgacagtctatgtgtgaggtaatatggatttctcagcttttgattgaattcaggtttaagacttttattccagcaaacttgtggtgtgataatcaagctgctattcatattgcctcaaatcccgtgttccacgagcgaactaagcacattgagattgattgtcattttgttcgttaaaaaattcaacaaggcctgatctccacaggatatgtgaagtctggaaaacaattaagagatatttttataaaggcttcgaatgggatgcgggttttatttttgtaacaagctaggcatgattaacatctatgctccagcttgaggggaagtgttagaatattagctgtatattagttgtaaaaattagggtaaattgtatttagtggtttcctattgtatttagtagttttccatttagtttcctagctttgtatataaatatttactattctatagaatacaatacacaattcaattcactattatctacaaaaaaacaatcaagtgacacgagaataatcatccacaaaagtaacaaaataacaaaataacgaaaaccaggtttagaattaatagaaccttaaacatcagaatgatttgaactaaggctaaggcaatgatgtttagtaaactgacatgattcacaatctaacgaaaataacttactatattgtggacaaagttttttaagcagaggaagagatgggtgacccaacctacaatgtgcctcgaagggggattgtacaccagaacaagcaactgannnnngtattggtgtatcaagaatgtataggcccctagattcatgtcctttaccaatcattttcttcgtcataaaatcctgaaataagcaatgatcaagaaaaaaagagatacaacaatgaagattacgagtaagttgattgacgggatcaagttaaaagaataactaggtaaatgtaagacgagtgacaaatgaagtattggagtaggagtgattgtaccagacccaagaacacgtgatggtgtcccatcagctgaggtaacagtagaagtgaagcgtgaggttgaagattagaaaagaagctaaaattatctgtcatatggtttgtagctttagaatttatgacccatttggaagacgagaaaaggtgacacgaatttggtttatttgaatcaacaatagtagtaataaaagaagatgaatacttaagagactcttgatattgtaagaatttggcatattcatccgcagaaacaagaattggagttccagaaaccattataaatattatattcgtcccaccaaactaactnaaacaacaaaccaaccaacaaatctataaaggagaaaataaactagacaacaagctgggaaaaaaatgagatattgagccagcaatcaaaatctcacaaccaaagtaagagaacccaaaccaaaccacaaacgaagaaaaacactggagataaaggacgaagaatcacaccaaaggatgccgaacaacctcaacgatcataaaagaagaaaataatggtcgaaacgaatgcaccaaaatgtcagaaacaccgaaaaaaacaaccggtggagaaacaactgaaaagacacctcacgcgtgcccccacgcgccagcatgtgggagttgtcgccgaagctttaggcggcgcatgtggctcacgcgcgacggttccaaccaccaaactctggggttttgcagatcgacggctcggttgtctgttggtgccagcgatgagctcacgtgctctttaaatgtgttttccaaaaaatgaaccttaagaaagatgaagaacaaactcaattgcaaacctaaattttgggataaaccctaatttcgaatttcaatttcttaattttgttatgataccatgtaaaaaacaatgaataaaattgtatattattcaatagaataacgtgtatttataacaaaattagaaagtttaaataagaaactagaagagaaaatacgaaactaactaattacaattaactttaatttctacaaccaatgtataactcatatattctaac

SEQ ID NO: 29438 - DNA, 1494 bp, Cannabis sativa
aaaaaaaaaaaaaactctttatctaaacaacttactttttctttcttacaccttaaattcttgcgtttgagaattaaaaaatcatttcttgtatccgatcttatgtactatgtgtatattttttaaattattagatattgtgatagaaggaacatgaagaagattggttagggacaaagttttggaagtgaaaggagaaatgagagaaatattatcaatattttcaatgtcaagaccagtaccattacttacaaagacttgttcttggccagaatagtatgcatgaggcaatgttggctccatcaggagtgagatgatgagtggcaccagaatccgggtaccagctgtcatcttggacaatctcaggtgttgcaaaacaaagcctgcatttttgcaacattagctgaggcagagaactgattaaaacactcgggacctgtaaaaaatttatcaaatctatagaaacattacttgacagtgtgcccgagcttgtggcatagctgacattgaggtttttgtgtccaaaactgagaggctcctcgacctatagatgcataacctctgccactgttgtgaggattaggacctcgactggtattggaaacacctcgagacagatgttgcatttgagattgattctcagtagatcgaaagggatgaccacgattgtatccaccaggtgtttgagatttggggaaatacatttatcggtattatttccataaaagggcctggtgtgagctaagttagcctcacttttactgatgtcaagtgatttggcattcttttcaatccgaaccgattgtgccattaatagagcctccatttctgcaacagaataggagtcttttcttgtagtaacagaagtaacaaatacatcatgttctggtggtagtccattgaagatggcttcaatgtggtcttgagtcgattgtttgtgtccaatagtagcaagaagattaattatccctttgatcttcaacagataatcattgagagaacctgtcatttttgtatttctgagttgagtcttgtatagccctatatttgtagagttgagagttgtgtagtactcattcagattctcccatatttgagttgtggtttcgcacccaatcatccgatttgttgttttctctgacattgaagaaagaagccaagaaaccagtaagttgtcctattattcccagtcttcgaaggctggattaatgttcttgttggcttcatttgtggcattgagaaatttaggaggaattcgagtattatccagaaacatttggagacgacttcctttgattgaagcaagaacctggtgtttccagggtaagtagttgtgctcatcgagcttgatagataaggagtgagtgaacgatacaggttgtgaacgaggaagaagagcttggttcgatcttgatgctccaccattgccaccattgccgctggtagctgaatccattgaaaaacgatcaaagctctgataccatgttatgagta

SEQ ID NO: 29439 - DNA, 1354 bp, Cannabis sativa
  modified_base (98)..(102): a, c, t, g, unknown or other
atcaattcagggtcctatttgtaccattttaaaaaatacagggtccattttgtcatttaacaaaatgaaggctctaattgataacttttgcaaaacannnnntccaaaatagtatttaccctttatgtaataaacttttttttaggtaattcacatctttatattgcatcaacaaaacttcatgtacatgctatatgttgcaccattaaaattgttttgcttttttacatcttgtttagtcctctttgttagcaccatatacatcatatactattgagacaacttagctcgagtaatccatctcaacagtctttggattgacaatattactcaaatgacattcaaataacaagtgttctcttgttactaatttattcattccataaaacaaacatttgtcattttgagctatattcaatttcaacaacctttttcttcacctgtaagatctgtcaagtaccgaaagccataagataaatatgtgattctattccacacctctctatgctaagggattttctgcttagatgagtaaattaaggagacttaggagagtataccccttactaattaattttatacttccttgtcaagaatgaatgcatcaaatttaattatattcttctttcgctttgacaacctgcctccaataccaattgttggtactcgagaatcaagattctctgttaaaaattagtgtcccatactgtgttatacttaatattaaaatttgacacatcaactaatctaatttatattaaacatattaactacttttgttgactttagtagaggtttaatttttttataaataaaaaaattaattgacgtgtaaaattttaattagtttaacgcattatgggacaccattttttaataggagattttgatgatcggtactcaatgtcatgtaagttcaccaatcttctgttccaagatagactggatgaacccattgaacccaaacttttgttgccactacctatacatatttctatctcatttcatttaacaaatatttcggcacgaactcattcgatatgaggttgtagccctagtaaaagaagaattgcccacaattaaaaaattaattttttttaattattcgataattatacaccaaaatagataatataagttaccccataattatttttttataattattatgctcctataatttttttttcttggagtgattataaattttttttttaaagcaaatttttttacttataggtacaaaattttattacaattaaattcccacaaataaaaaaaccatgattctttatattgatgataataacacaattaattagacttctaaactaatgactaataatccgatcaa

SEQ ID NO: 29440 - DNA, 3204 bp, Cannabis sativa
  modified_base (1879)..(1879): a, c, t, g, unknown or other
  modified_base (3050)..(3050): a, c, t, g, unknown or other
aaacacagggtccaaaatagtattgacccttttttatattgtgaaaaactagatcaaatacaaacaaatgtaaatttgttgtgcatatttatttcttttttctctctaagatttcttctctcttctttctgtgttagggttttttttcttttcttccctctttctcaactagggacatagtcatcgaccctattgtgtgtctggtgttctctagccgagagagagttgaatggagtttcttttggtcatggctctttgctattcagaaatgggaaagttggctaaagggtggcttttaaagagtcgcctttggagggaggtcgtagactatggagctctatggtctatagcagtgagtgtctgccagaggctccggtggttgcaataatgggtctccgatggggaccgtcgacctcacttggccgacattgttggttttggggctccgtggactttagagatagggtctgttgggggctccaccgtttgtaatggtgggtctctgttgggggccgtcaacatgctcggtcgtgttacaggagttggctcccgaccttctctttaaagacttggggacgatgagttgtggtggttcagtggcctaatgtcgtttctccttcggcacctaaagcttggtggtggcggtctgcctcttcatttcccgttgagttcgagtctttggttttgcttttattttgtgtttttattttattttagatatgtttttagttttgttgttgtatggtttgttgctttagttttttggtccaatgttggacattccgttgctaaggatttggaggtttgcatccttagtttttttctttaccttccattaatagtgttatgatactttacaacgactatgactactatgaatgtatgtcagtcttttagttttgttgttgtttgctcgtctttttggagattgatttgctttcgcttatcgttgagctttgtaatggatgtagtcttttgttcctctgttgaacgaaatcaatgatctttctcttaaaaaaaatacaaacaaatgtgaaaagtgatacgtgtaaaataagtttttttttttcatatttttaattaccttttattttgattattagacattttttgttgtgaggtaaaaagaatgacaagtgaaattttagacaaaattgactcaaaattccatatacttaacctaacttaatgaactggcaacattgatagtttgataccttatagtaattatgctaaatctctatttaggcatgcatttatattttattattattaataattaaatttttgttattcagaaaaaaaaaagtaattacaagtgttcctaacaaaaaaaaaattattcatgtgggaaaatcaaaactaacagtgcagaatctaaacaactaaacttgaaataatcaaacgattaacaatgacaagattattaaatcaagaacaacaatcgaatgtaaaacagaggagaacaaagtggagaaaactagaaacagaaaataaagaaaataaagaaaataaaaaaaaataacaccaagatatatattggttcaagtttgatagatcgatgtaatttacggctctactccagttctggaacactaccgaaattcttctttattgattgagcaagaataagtacaatatagtcaagccgagattctctgatgagctctcactaagtgtttcaactctcacgcttacacctaagaattttcttcatctacataagattcttcttacaaaactcaaacccaatctctatattttttctgcacctctctctacctctcaatcttttctcgctcaaactttcaatctcacatgaacttagttcttaatctcatgtctcgaaataacaagtcaaggtggtatttataggctnaggatcaagatcctaaagtcggtggttgaatgaaatgaggttgttaagttagttagaaataactaacttaacaaactcttctttgagcgaagtctccatgccaacatcagttttagtgcatccgggaacatatatgagcttctaggatcacggaccaaaggcacatgctagagaggcttgtgaataggaaagaaccagctgaagtcgactatctggaactgccttccaggaagaataactagctgtttgaaactattttctagaggagggctagccatcctaaagactgaacccgaagtggacataatagtgatccaggaactcccttccaaacacaactatcattctacaagacttcttccagaatggacaaattagttgtccagaaacaatatctaggagacacctaactttttgaggaacaacattccaggaatgaaattgagacattttcatctggaggaacaataccacaaatttcacctagttacttcaaattaaaagatctccaatttcttcctagagtgtttttcctagaaagttagatatctcccggatgttgttcccggacacctaacttgtttagtcttaatttttccaccaatcagagcttggtaatcaatcaagaatgtagaatcaagattctttccgctgtatttcttgaagaaactttgaatgtcatcaatggcgagattcgaattggagaagttcgatggaaatggggactttttactatggagagaaagtctaaaaggaatcctagtgcaccagaaagtctccaaggttctttgagatgagaagttattggcaaaaaaaaccagaaaaaaatagcaaaaatggaggagatggcataccacacaatcatcatgtatctatgaaacaatatttggaggaaactcatcgtagagaagacagcaaaaagagtttggaataaatttaaagaattatacttgaaattatcaattgctaacaagattaatttgctataaaggttacacggttttagaatgattttttccatttctttagatgagaatattgatagatttaatgagattattataggattgaaaaatttaaattacaaggtagatgaagaaagacagtccatcatcttgttgagatcgcttccaatcgcataccaagaagtcaaggtggtatttataggctnaggatcaagatcctaaagtcggtggctgcatgaaatgaagttgttaagttagttagaaatagctaacttaactaactcctctttgagtgaactttccacgtcagcatcagtcttagtgcatccgagaacatatacgagcttccgggatcacgga

SEQ ID NO: 29441 - DNA, 3858 bp, Cannabis sativa
  modified_base (988)..(993): a, c, t, g, unknown or other
  modified_base (3590)..(3597): a, c, t, g, unknown or other
tggtagagtctgatgttgcgatttccttagcacttctccaaacgactgctccacccccaagagtaaataccatcccaaatgcagacttcctaccatcaagagaagcctggaaatttgagtcggtatagcttatgggattaaaagcaccacccttctagactaacacataatgccttctacttttcaaatatttcaaaatatgcttaactgcagtccaatgttcctcttttgggtttgtctgatacgtactcaaaattcctattgcatagcaaatgttaggtctagtgcataacattgcatacatgagacttccaactgttgaagcataaggaacccttcttatgtcttctatctctttggaatcaatgggacactattccttagatacatgggtaccaggtctagaaggcatagctgcccctctagtgttagtcattgagaatcgctctagcaccttatcaatgtaagctgcttgagagagagcaagtgatttgatcttctggtttctaatgattggaataccaagaacataagtagcttcacccaaatctttcatttagaattgagtgttaagccattccttaatgtcagtcattttcttgatattgttaccaataatcgaaatgccatcgacacacaggaacaagactactaccacttgattatccttgagttggtaaacacaggttcatcttcactttggtgaaagtcgtgggttttgattatttcatcaaaccttttgttccaagagcgagaagcttacttaagtctataaattgacctattgagcttgcaaactttctcttcatgtcctagaagcttataaccttttggttgctccatatagatggcctattcaagaatttcgttgagaaaagctgtcttgacatccattttccaaatttcataatcaaaagtgacagctatagagagaagtattctgatggatttgagcatggagaccagactaaaagtatcctcatagtcnnnnnnttctctttgggtataaccctttgcaacaaatctagcttgaaaatttttgacttctccaccagcacctctttttttcttgtagacccatttacatacaattaaatgacaatcattaggtgcatctacatattcccatactttattctttttcatggaatccatttccgaattcaagcgagctgaccattgtttctgttatgaacttgtcattgcatgtttattggttaatgtatcatcatcaataccttcaccaatgaccatattgatttcaccaaccaagccataaccagctggtcttgtggagatcctcccactacaatgaagagtcgtgaccttctgaatgaattatcagtggtagatttctcgattgtgtcaacttgaattggttcaactaagggagtgggatcatcctctacttgagtagaagaggatggaatattagatggagttatttctgaaagcatttcctccaatactactttcctttactgcttgaagttcttaatatagttttcttcaaggaaagtggcgtttgtagaaacgaacactttatcatccttatgactataaaatagtccacccctagtctctttagaattcccaacaaacgtgccaaccttagttcacttttctagttttccatttttcttcttaaaacatgaacagggcacccttagattttttaatagcgtaaactaggtatatgacgattccatagttctataagtgtcttagggactgatttagatggaacgacatttaagatatcattggccatctaaatagcgtatccctagaaggaagttgacagagttgaatagcttagcatagacctaaccatttccaaaagtgtgcgatttcttctctttgcaactccattttactgtggagtgctgggggcagtatattgcgattcaattccaagttcaattaaatgatctttgatttgcatatctatatactctcggcccctatcagtttgcaagatctttaatatttttcctaattggttttgagccaaagcatgaaatttgtaaaactcttcaaacatttcaaatttctttttcattaggtaaagaaaactatatctagagtaatcatcaatgcaagtgacaaagtactcataacctcttctggcttttacatttagaggtctgcagacgtgtcaatgtactaaccctagaggttctttggcacgctctccctttgcagaaaaagaacacttagtcattttaccttctaggcaagattcacaaattggtaattcacccaagtgacatttttcaatggaccacctttggttaacctgtgaagtctatcatagcatatatgaacatgtcataaatgccatagatatgtttcatcattattatcaatctctttagttttatggtttctaggtttaacaatattataaagttcattcaagagctcaattggtatatctactcttaaaacataaagcctgtagcaccctgactatcaggaacgccacgtgtgtgttttacaatcttattataattaatctattagtttaggaaaaagtgtgccttaattcttttctaaccaattacaaaactgttattacaaaagtaggttacattttcaaatgtagagaaaagaagtcgatcctgcttcccagaagccaagaaaacatggttgatatgtacattgctgggaaaccttcaactcatggtcgaacacagctcttgacttctttacttgcaccacgaagcacccatgagtcacaatgactcagcaagaaaagctactagataaagaaaaatcatgggaagttatagcagatgccatcaccaaagattatacataccaataggtcatactcttccaacgtacatatacaattcagcctttatgcgagcaaacttgttacaaaattaagtgtatttatagctatacataatcaacaacctcagtattttataagacgccttaatcatacattatcgtaaacactttctatcaatgcttcgtaaagcactctagttcacacattagcacaatcacataacttcagtgattcataaagcactcgaattatgcatcattataaacacgtattcttcaagttaaccttaattatttatcactaacataaatttaatgactaacctaatattcagctataaactactaagtaaccaaataaaacaaaatatttaattcctaacaaaagactatttttcccttccattaacacttaatttaaaatacagcctatgggtattttggtcatttttaagttttccaattcaacctacttctcaaaaagcatacctagttcggtataaatccaattcaactcatctcttattgtcgtaaaatctctaactacttcgtcgagtctccacggccgtcgaacccaaaaatagtttatttcaaaaaattgtatccacgatacccacatagttcaataaaatctctgtaattaataaactacgctttatttattcatttgctcataattagcttaagtaagattataatcttactctaatatccatataattacatatttaataaaatatgtccaaataaatatcaatataactttaggatattacaactatcccctnnnnnnnnaaatttcgtcctcgaaatttactcaagcaacttgagatacagctctcacaatggcgattttaactcccaaatcgcctttcaatcttattgttctttcacaacactataactagtgatatagtcttggttccgcaacactttctcttttctgttcaaaatctgtaccgattgttcttcatatgacaagtttgtttgaaattcaatattcccgtaactgtgtatatggatcccttcgatctcatacttctgaaacatcgaagt

SEQ ID NO: 29442 - DNA, 1413 bp, Cannabis sativa
tactatgagaatgatataactggatattaaggtatcaatggatcatcgaacttaactaaactcaattcagtgtctacaaattggcccattacgaaaaggaatcacacacttcaaaacaagtaaaagagcccccctttcccctgatttccctatttctcaaaatgaaaaattcttcataacattacaaagcatacaaaagtaattcctgaacgatgtttccaggcaagagtcaagaaaccgaacacttgaacatcaagtgttccttctcatgtagttttagctttaggagcctttttcctcagttgccgccttggtatggaattcttcatgcctatgtagaagagcaaagccccaaacaacgccaaattctgcaaaagataaaatcaaaattatttaaacattatactatggctgagaagttaatagtaggctatcatttccctccagataatttgattgctaacctgagtaaacttagggaaaagttgagcgaattcctttttctcaacatcatagttatagaaatcatacaatatgggtgtaacaattgcctgatgaagaagctgcatcacaagaaaacggaacataatgaactcatctgtcaattaaaaacataatcaccacaacagttttattaattagtttggaaacaaaccagtagataggctccaaatgagctgccaaatataaaaagaagactcccaagtcctttcaaggcaattgccgcagccaccaagtgcttgatctgtcaacaataattctaacatcatttgcaaatgtaactaactaaaacatacacatatgtggtcgaaaatgaaaattgatcaaagattgaatgtattgctcacctcaacttctggagctttgaccccagtgtgcgttgacaagtgactggagaaagcatggaattttggagtcaaagatttggccgctggtccaccatcagtaccaaagtcattgaacctatggtaacaaacaaattcatgattcaaaaccaagtatctatatgattttttttttaaaacagataacagagattaacagcaaagcaacagcaataaatataattacaactgcgaacacatccataaataaaatattaactggactccaacaaagtctaattttgttttcacacaaagaaaacgcttgtttcaaatggaaagtacacccaaattaaaggtttaccaaatacaaaaccgaaaataggttgtcttcctaaccagattctacatttaaaattgaagaaaagtaacaattatctaagtcaaacacttaagttactcaaataattttttctcaaaacacactgctcatgcagaagtataacatgattaattagccattaatttattctaacaaaatttattgttgaaaattggactaaagtgaatgcaaacccacttctaacta

SEQ ID NO: 29443 - DNA, 3605 bp, Cannabis sativa
ctactttgacaagttttactagtagcaacaaaacaatttcaccacaccacttaattaatcaaataaaaaaattacatacatgggagcttgagtatcacttttgttcctacggtaggatcgcttcctatttcttgtaataatatcttgttagttttgatttttttttttcaatattctaggatgtcgaaaataaatttcaaaatagtcaatcacatgcacacatgtagttgaaaatataaattttattttccggtatcataaattatttaaaaaattttgtgcatagtatgactataatgtaatgatattacaatttttctatgtacagaaaaaaaaaagagtgacaattacaattttttagtcaatttttatgtccgaaatcacatggcaaaatatttttttccttacatatttacattcattatagttacaatatcatccttgtaaattttttaaaatttttgaatagtttacagtactgaaaacaaagttcttgatattccagtctaccacgcgtattcaaaaaacttcaaataaactattcgaaaaatttacagaaatgacggtataactataatgaatgccatgaatttaatatgtgttttcaggcatagaaattgagtaaaattataataggagattgacggtagttaatcctctcacaaaaaaacgttcctctgtaattttttttttttcttttttaaaatttttgtcaaaataataaaaggaaaaatagtgggtggtctcaagttcaacaaagaaagaggaaaataataatgaggacaagtaggattctttttcctaaatttcgacatgtactaaaatatgttctctaattttattttttttttgtcattgaaaattcctcatgtactattgatatttttttttttctggtggaaatattaacattattggatttaagaatttttgtccaatttcatttaattatattaattcattgattgtggatgtattaaattatacatcctaaactttgatatttattaaatcatttcaaactttgatatataccaaatcatgcctcttgtagtttgatttatgttaaacattttttattaaaattaaacaaaaattcttaaatctaataattttaataattcaagaacaatttttaacgaccttaacattcaaaggagatgagttagtacatgttaaattcgctaaaaatcgtaattgacctactaataataataataatttaaagcaaatagaaaatagagtttgattttgaaattgaaggtttgaagcttaggtggtaagtaaatgtggtcactgttcataatcaaatactgaaaaatccaacctctcaaatcattttcatttcccaaatttcccccaaaacaaaaattcaatctttagtttcttcaaaaaaaaaataataaaaattcaatctttttcattttcttcttcgattgtacggcatcatgtgggtagagatactgtgtggtctaatcctttacaaagtaatcaaacgcttcttctacgatgatgatattttagaggtcgaatcctccgattccaatgccctcttctccgtctccgatcggtacttctctctctctctctatatatatatatgtatatatgtatacacaggacaattgaagcaccaattcacttgcttttcaatctgggtttttctgttgtttacagacttgaaaagctttatggtgggaaaacctatgttggacttcggattcctgatgctgacaccggcactcgacagaatatcgatctggttcttctcaccgaagggtatgctaatttcttccctaaaattatagattacaaataaaaatcttatctttatgtttttgttacattatgaaaatagtgtggggcttattagtaatttacttattaagtggtgtgtagggcattgtgtagtgattaatggaaagggaatgagaaattagaacttttggttcatttcgaaaattgatactgtctcgaagagtgcactttggaagatttttcttgtctcggagaggatctgttatgaaaaaataggggagactgacattgtctcgaagagtgcattttaggagatttttctggtctcgaagaggacctggtatgaaaaaatagaactttggttcatttgggagatttgaattgtcttgaatggtgcattttaggatatttttacgttatgaaaaaatagaatttggttcatttgagagattagcagtctcaaagagtgcattttaggaggcttgtccttgtgtcaaagatgattcgttacgtatcagttttcagctaattcaactcacaaacattcttagtaactaagatactctttcatgatataacattctttcatatttgatatttctgacaaagagttcactagctcaatttagtagaagaatggtagaaaactttctagttggaaaactcaatttggtttgtttgtttctttttttgtttttggttcagaggggcagtggttgtatctgtcaagaatcttgctggatttgttttgatcaatgcagatgggagctggtcttgtgagaccaaaaacaaaacagaacatcttcctaacccagttaagtagctttaaaaatcaatgctttatgaatagagcttcttaatcgcaatacttataagttatataattcaaatggggaaagaaatggatatattttatggaccgaacttatttatctcttgtctcttcccatgtttttggagcatgattatgttatgtcatggatagatatgcttaaacaaacttgcagattccgagtgtttttgtctggatttcggttttcaacttatttctttcatatttttaggtggaagagaccagaaaacaagcttcaattcttgaagcatatcttgaacaaagaggaatttctttgcccgaaggatacttgtcttgcaaagttatacttcccaatccgaaatgttggtatgtgatgctttttccttttagtatatttatttcacatatgaatctatagctttttttatggtgtttaaatttcagaaacagacatggtagttcctttaagtgatctttgtcctcagcatgcagtttacaacacccttctcggatagttccttatagtgatctacgttcccttctcaaagccatatattagatcataatgcgatgctgaaattataatttaaacccagaagagagttttttactattcgtttttgaaactaggcatccattcccgcataaccctacaatatttggggatcaagatagtatagcgatttctaagaaggcttaaaaacaagacaataggttgtcaattcgacgagtcattggccatacctttacaccgtctactttaactctctcaactcaaccccctcaaaacctaactctaaacgaacttcccacctccaatagacaaacttagggtgaattcgagaaatagcacgggcttctcaatgaacctcttaagctaaggggattttgtagaagtcattacaaactgtattaagttaagggcctgaattgtctttatgtactatgactgaacccgataaatattggggttgaggaattcatttcaactagcttggaattagaaaagagtagactctttgtggagagacca

SEQ ID NO: 29444 - DNA, 4967 bp, Cannabis sativa
ttgtattctgaaaactctaggttgctccatgtgaatggctaaaccatagttctctaggcttgagtctttgttccctaattggactattgcttgtttaaataaacaacgaatcgttatcactattgtcatccaagtcataacaaggtgggttcttaaaaactctcccactacgacaagataccgtgattatgtgtctaggaactttagtggtatagacctctttagttgcattaatacaatagatgttgtgggactatcttatataatataagatatggtcttatataatataagatatggaacacttttgaatttaaatcaaatagtctctccacgtctttgttacttcgattttaagattaccatatatatagtcaacttctagaaaaatagtatttgcaaaaacaaacacttactagtcttgatggccatagtgtagtccaccccttatcactttagagtagccaacaaatgtacaaatctcagttagcagttctagctttttttcagtacatgctcagggtatatttagatttaataatggtgtacactaagtacgtacttgaccattatattaatccaaggttgtcttgggacctaatcttagatgggacgacattttaaaatatcgtttgctgtctctaaggaatatccatagaaagattttggtagttgttagtaattaatcataaacatgatcattttattaaaatacgactatgaaattatgaggaggtatgtttgattataattctaagtttttttaaatgatctttgaattccatatcaaatatttctccactcctttcagttcgcaagatctttaattaatttcttaactgtctttactagaaattcatgaaattttttaaacatttcaaatttttggcataagttaaatatctacagtaatcgtctaagaatttaatgagttactaataaccatcctatattatatatccctatgtccaaggatagttgaacatactatccatgtggttatacacatgttctctttgcatagaataatcttgccaaaaccactatgacaagataaagtgccataaataatcaacagtcattaccaattcttgatgtatatgattcttaggtctagttacaactaacagtagattgaatagtttaagtggatacttggtctcagaatatcaaacttattttcatacatcaacatatagtttgatccattgaaatggatatcaaaacttgtgatagttaaacacagtgtttatgtaatctagaaactgaattgttattctagcttggacttccactactaaatcactattataaccctaagcttagcttaaaaaatatataatatagatttcaaaactataatcttaagtttacgtcaatcgatattttagtagcactgtaaaaaggagattcaagatataatcaaaagtttcaaataacaaatctagcaacctagtgaatggtcaccaaaatttatttttcaaatagtaagagattagcttgaaaatttctaattgagagtacaaatgattttatttgttcattagtaggctctaaagtgactaagcagtttatttgagctcgttggctctattagtaatattaagatatcctccattgctccaaatataatacctattcacccaattaatgtctagttactaaattaattctcgttttgtgagatattagctcaaaggttttgaataatgagtataaataatgtggtttccacattagtaggagtttttaagtaaagaatcatgtttacgatattctattattattaatgacacaagacataatcaaatgtttcaaataacaaacctaacaacttaattagtgaatggttaccaaaattattttcaaatagtgagagattaagatttctaattgagagtacaaatgattaagtttcttcattagtataggtgccgaagtgactaagaaatttatttgagagttttggtcttttaagtaacattacaaatagtcaattgttccaaatataatatatattaacccaattagtgctcggttactaaattagttctcatcttttgagatattatagctcaaaggttatgaatggtgattacatatgatatggttcctacattagtaagaattttcgagaaaataatcatgttgaggatatgttagtattactaatgacataagacataattaaatatttgaaataaaaaaacctagcaacctaaaagtgaatggttaccaaaattgattttcaaatagtaagagattagcttgaagatttctaattgtgagtacaaatgatttgatttctttattagtaggctcctaagcggtgtatttgaggatgttgtttctattagtaacatttaatcgctctaaatataacacatattaactcaattagtatttagttactaaattagttctcgtattgtgaaatattagctcgaaggttgtgaatattgagtataaataatgtgattctacattagtagcggttttaaataaacaatcatatttaagatatgctaatattattaatagacttagcaacctaattagtgaatatttaccaaaattatttttcaaatagtaagagattagcttgaagatttctaattataagtacaaatgatttggtttcttcactagtaggctctccttgactaatcaatttatttgtgaatgttggttctatctacaataaaaataaaaatagtcaattgttacaaatatcacacttattaacataattagtgaatcgttacttaactagttctcatattgcaagatattaactcgaaggttataaatagtgagtacaaatgacgtggtttctactttctctctcctcacttaaatagaaagataaaaataagaataaaaattaccaaacacataataaaatttttggttgtatattcatattatgatagagttagttggttagttaaagaatctattttctgttatactattgtaactaactcttctctcatctgtaacaaactctgtttcttggattcaatatatagtggctgagctcacatatttcgtgagcctctcttttccatctttcttcttcttctctctcactcttattttcttacatggtatcagagctttcatggcatcgattggagcaaactcatccaacaatggaggtcaagtcgacggtgatgatgctcctccaaatgcagctcaaccaatccttcttgcaccagaggctcctcaagcaggatttctaaacaactacatccgcttaaatttttttctggatagaatcaattacaccttctagagatcactggttctagtagttgccagggcttgcaacctcgacgggtacatccttggattaattttctcaccacctcaaactcttgaaggtaatgcacccaaccttgcctatcttcattggctaagattcgatcaatttttaatgcattggctgatgaattctatatctaaaccaatgcttgggcatatcatcaactgtcgatcatcctctgagatctgaagtgtattctcaagactcttttgcctcaagatccagggctcgtgttctacaagtttgtggattactttaggcaaccaagaaaggatcatcgccgatagaaggttatattctgaaaatgaaaagctatgtagatgctctgccagctgctggccagcccatcactgatgatgaccttgttcttacattcttggaggattaggccaagaatatgaaactgttattgtgaatcttacctctagagactcccctgagtttaccagaaatccagttcatgttgcacagtcatgaactcagaattaatcaacataccacgaattcccttgccaatgttcaagccaatatggaaaatctctccaccaacaataacaacatgggaggttacaatggtcgaggttccagaggaaactatagaggaggcagaggctattctagcaatcgtggtggtcgtggtaacaaacctgtgtgccaactatgtggcagggctggccacacaacataaaaatgttactacgagttcgcattaccttcaatggccccttatcatccagtcagaccaacaataatgaagccaacagtgaaaatccttaagccaatttggcttagacccccacttcaagtgacatttcaggagcttagtttcttgacataggtgccacaaatcacatgacatccaactctcaacatatgcaaaatccagtggattacaaaggcaaatctaaagttcttataggtaatggtacctctatgcctattcttcaaatatgatctaatcttgttccgactaccatgcaaaaccagcatctcattctaaaagacattcttcatgccctaaatgccactaaaaatattttgagtatttctcaattcaccaaagataataatgccattcttgaatttaatgatcattgttttcttatcaaggacaacacaacgaggcaagtacttctaaagggttccctcaatgatggcctatacaaacttcaagtgcagccctcaggtacccctgtccaaccaagaataaatcaacctgcatttgtacacaccaacaggttttcttctgcttttaattgtactactactagtaaccttgtcttagattagtccaaagttgtttctacttggcattgtaagcttgtacactcatccaagctaattttagccaaagttttagcccatattagtcctaatgtcaagtgtaaaaatgtcactttttgtgatgcttgtcaaattggcaaaatgcatcaacttagtttcaaatataccatgaataaaactactgtccctttttaacttgctcatacatgtgtgtggggtccttctttttacacttctatagaaggatacaaatactacataagttttgctgatgactatagcaaattcgtgtggattttttctatgaaaactaaatctgaagcaccttctctatttaaacaattcaatgcctttg

SEQ ID NO: 29445 - DNA, 2664 bp, Cannabis sativa
tttcaaaccagcttccatgtcagagcaaaaagcatacatatggagcaatgcagtagaagcatacacatctaactccaacccagttttgacaatgcgattgtgaacagatcttccacaaccatgatctccaattattgagcaagctttcaacacaaatggaaaagtaaaattgtctggcgaaatgcccatttccagcatatctttgtacatgatcaaaccctcaattggggtgttactaaaagagtaacctcgaatcattgaattccaaatgtagtgattaggatgagcaatttgattaaacactgaccttgcatagtggagacctccagttttgggagaaacgcagaagtctataatcctactcaatggaatcatgtttttgataactgataaagttatcgtcagcccatgtagctctttcagctcagccatggttttgcattttccaagagagaattttgtcatgggattttttcataattctctcttggataattctgctctgtaatagtctcaaaatggcgcaacaatcatctgtctaagctaattgaatctttatcatacctaacattgctagcgtgaaatgaagcaatgaatccatattagtacttaccgattctagtacttacaattattcaaatttggttgatatactcttgaattgaagaattaatacagatgaagaaaattacataaaaaattggaatcatcatttcattcatggtgattgtgtattagtaggtatgaaaataaaacatgtttgaaaaacacattagcagcttttcctaaaatgctcttccggtttttcttcttcttctttttcctcctgtttttacattctctagcaatgaagatggaaggcttatcttgccaacccatttttgcaactcttctctcctaaaagtcagacccaccaaaaaactccatagacaaaaacaccccaaaacccacccttgaattcctccattcttttcacaaaaatgaaccatagcaacacccaaaggaccaaaacccataccccaccaaaccgcattgctctcaatttccctcccaaacacaaaacccaatccacaaatcagcagaaacccgtacaaccatagcttcctctttcgtttcttccgccgcccatcaaaaccttcccatccaaaacccctccagaagcctaaccctccacccccaccacttccatttccgccggcgaattcttcaagaaccaaatccaagggttctggtaagatcttgaggttggaagcgatgacggccaataaattgagcatgaatcttgtcgttttttgggagccaattttccttctcctttttctagcacagaagaagttttgaatctggtttcgaagtgaatgcgaaagggtaaggcctaaagtgggggttgttgatccaaatatggagatgtgaactgaagccacatttgattgatcaatttgggtgaagcatagagagcgtggtgagaggaggattggggtttcgacattgagtgtctttatcatctcctcctcgtcctcctccgcttgatgcttgctggactttgctttgctctggaaacaataataacaaaagtggccgtttgaaatttgtcagtttgatttgtaatctcactttgtcctgtgttgatgatgtcatacccgttagattaagatccaacggtctcatttagttctaccacttgatatcatttaaaagacattgctacccctgttacgtataaatgccgtcagcttttagttcgtaattcgtttggccccttgccccggtatattatgcatgggtttaagaaagtccggccatcgtctagtgtggtggtcttccggagtgaaattattttgtggtgtggtgtttagtcactcaagcttgcgattatttggtggaacttatacgtttgggagggcatgtttttacaatccatagtttgtcatgagtttacaaaaaaaataatctctatggctcaggctttaaacagcgagtttgtatataaataataatcttttaaaagtttactgaatgagtgaatgaatatttggtggaacttatacttttgggagggcatgtttttataattttttttggtttatcatagtttgtagtcctggagttttaacctttgtttttcccacataaaacaaatttataataaaataaaatcatagtgtcctggagatcgacactctatgattcttgtgaatgttatgttgtattagggtgttctacattacatgattttttttttttttgaaaaacgcgtaatcatttaattaaataaatatagttagacctcctggtcattacataaaaggttctccggtatcgaagaaaccggaataataccatacaacttgttaacaaaagcccaattagctacattatgggccacaaaattacaagttctacgagcatacacaaagttacaacaaataaaagagggagatgacttagtacaaaaggagatatagttctcaatcgcccaatgagactccatcccatttaaagcgttgatgactactctcgagtcactctccaccaaaacaaactgaaaattagcctccagagccatcgaaaccgctgcacaacaagccgctgcttctccacatagagcatccgagaaatccaacctagccgtgtgaactcgaaccaccttacccagatggtttc

SEQ ID NO: 29446 - DNA, 1628 bp, Cannabis sativa
tttttttttttttttttaattgcctgtattatcttctttcagtaattatattttagagcttactacggtgattacttggagcaaatttctaacgttttcagagtgtcgcttaccgtttttatttacttatttattattaatgtcaaattacttgaattaaactattaaacatatctccttaccagaaaaaaaaaaaaaaaaactcttaagcatgtctctttctgtgatatggtaacccagttcgccaaaacaatggtagattggtaattgttgatattttcatttaagagttttgatcggagtatcttatttgatcttattttctccatcttcacaatgatcgtcgttgagactttgttaatgaacatatttttacctgttgtttaaacagatattgctacaaactgatcatttaatcagttaaaatgggagctttggagttcagctttcgagttctgttttgtttggtcctactagttgttgtaaaagcagaggtttacatagtgaccattgaaggagagcctatagtaagttacaaaggcggcgtcaatggctttgaagccactgctgtggaatctgatgagaagattgatactaccaggtatttgcacaatttcatatctttttctttttcctcttaaataattaaaacggatgataataatagaatatatcgttatacaattattcatcatctgcatcactgtcaatcagtgctagccagccatttttaagtggggtcatggactctgcgatgtttctttcaaattgtggactttctagctcacttttcttctatgacttggcgttttgttacaatgacatgacaaaagccgtgaagggcagttttggatttagaaggaaatctttcgtttgattagtattgtaattgtaatatatgaataaaagaaccattatctttagtgtagttttaatcatactttggaagtattttaaaactgtacgtctggatttgaatatggtaatttgtaacctaggttggggattcataccctaaagctaaaatttaacgatgagacacagtaaaaaaaagcaaattttgatgtttcaccaataaataaataaagtgtgtcaatggttgttaaactcatatcttatttgtagatttttactgttctatctttttgaccttagcgcttgtattttagctgtacatgaatcttcatgcacagatttattaaatatatgagcaatagtgcattgattgttgtcaattcatcattgatcattttctttttcttatgctttaatttgttccttttttccctaccttttttagggccatatagattaagttcagttacattcgcttgtaaacatgatacttggctactggtccataaaaacagaaaataaggttgttgtgcatctgtaagagtactgttctcattcatatcattttgaactaatattgtttccttttgtgttctcttatggtgaatttaggatttgaagtaagttgcactctattaattgttgcaataaataaaaaactcattttctgttttactattatattatcaggtaattattgtgtagaaacctaccttggaatcttcattatgcaattcttctattccatgtaaaaatggtgttttctttatcat

SEQ ID NO: 29447 - DNA, 2456 bp, Cannabis sativa
ttgtattatttttccactgttgatatatatatataacatataaatcaccatatatttgtaaattatattttaagggaaatcagccaaaaagaataagattagtacaataaaaagttccttttatttatttgggatgtaaattaattgggatgtgtcatcacaataaataatttattcacacttatttgtttgttgtttgattgaaaaattaacactttggtgtatatatgtgtatgtatacaactatgtggtgcaaaaagattgtaatccaacaaatatatagttttgaaaaaaaaaaacctatagtaaaactcttttaaaaagcttatttagtacacattagttcattttttttttttcacaatgttgtatattatagtttttaatatcatatttataaatattttcaaaaaatattatgaataatttacaatgtaaaaaataaagttcaaacagagtgctataaaatatttgatccttattttcgaaattgtaaactattcaaaatattctaaataattataaataactaataactaatgcgatcattaaaaaaaattaaaattaatttttttccttcaaaacatataaatactaattctatagtatactccctaaaagagtcatttgggattacctcatatatttctacttccattaaaaatttttagactatttttctataatcttaaacgctgtaattatttaaaattattatttgtaaatttttaaatattgagaataatttacactgccaaaaataaaatttaaatattttattatacataatgtaattttttttatatgcatagttaataactattttaaaaaaggctataaattatttaatttttttaaaaaaatttacaagtacttttaaaaaactactaaaaaaataaaatagaatataaaaagagatgccaaaacgtcttttaggaagtctatgtagattttttctagaataataatttagttatttgattaaggtttttttttaataaagttacttgattaaggttgattgcatattattaaagataatttattttcataaatattaaaaaataatatgaggaagcaattatgttgagccaaaatattaatttattattactgaaaagaaaatagagatagagattcaatgagcggattgtttttgtagtcaggttgggttcagtatagtactctttgacaggaatgaatatataggcagacccattaataagggaaataaataattaaattaaatgaaaaaccctacttcacccaacaatatatacgtgtggaccttttcagctcaacaagtcaaccacctcattttttttatatttatattataaaataaaagattatggtataatgcttctttagatactcatcagatcgcaatcaatcatcacattcctatgaatagaacaactttaatagatgagatttgaccaaatgtataaaactctagtttttttttaaaaaaacctgttatttccattaaaacaagaaccattctaaatttattggttatttagttcaagatttgatttaacacatttatgagctattacattttgagactgaggaacatagctaattacaattgtcctagactaaaggatgacagatttttaattcaacttaaaccattaccaaaaacagaactaagattattatcaccatatatacaatctagaattattcataaggtatccgattcaatctaatttgcacgatctaatataatctaattcttaaaatatagatattcgcacttacgcgaattgaattggattaaaaaaatttaaaatctacacttatacagattgaatgttgtttgatttcaaaaaataaacgattcaattcaattcacatttaatcatatatatatttaaaggtatataatatgggcacccgattccaacccgccatgtacgaaagtgggttaaagtgggttgagttacgcttttatatttacattaaaattaatatgatgcaattttggataataatagtactattttgaataatttaataagttataggtccacatcataatatacataatatgaaataaaaaaatttattgctataggtccacgtcataatatacataatgtacatacacgtcatcggtatgtaaggagcattgtctgcccttaaagtttgctctgtggcagttgtggtaggttttttctttttaacttctttttttcagttttcctcatacgatctcctcaaacttatcactatccatgaattaaacacatctcctctgtatcttcagcgtttctcctgtgatcttttttgatctctttcggttacctatgaattctttccattctgatatctcccaagcactcactgaaaaggaaaaagaagttgtcaaattttccaacatctctgctccacttcctcgatctcaatgtaacagagtttactgcaaaatcttctccaaaagaggc

SEQ ID NO: 29448 - DNA, 1062 bp, Cannabis sativa
aaaaactcaagttttctaactcaaatccaactcaaacttcaccaaaccttccagaatacctaataacaccaatatgaacataactttagcactaaacacatcagtaagcctctataaatacaaatctaccattgttgatctaagtttgagttcataaactcaaatttagctaaacaacacaacaacaaccataagcctcccaaaaccatcacaaacagtcataaatagcaccacaaaaacaaaaccaaacctctctaaccctaacagagctaattgataaaaattacccaccaaaaccaaacattaacttaaaattcaagaaaatagaggagctagggcttaccttgggatttcttcttcaattaacacttgaattcctagctgaaactaagcttgaattggtttgacaggtggaaaaaggtcagtgcttcctttggttctaaggtagctgagagaaagagcaaagagataagggtggagattgatttcttaattataattattcttaaacttgattttcctttatctttcctaatataattaagctcaaataaaattcttctttctaactattccactaagtgggaaatgacaaaatccacttaaggctaataccaaaaatgccattacttccctattaattaactttaaaatcctagggataaaatggtcaaaatctgtaatcctgttcaatctcaatattctaaatatgaaaataacttttctctctaatatcaagatactcaatcatatcttagtgactctattggtcaaatcgtcgcattctacctttaccgagcataaatcataaaaatatcaaaattcatgttatttatcgaaatttttataaactaaatatttaagagctaaagaaatgataatttgtagaaattaagagagaaagattttttacatggctcaggtgttaataaacacgagtcagtctattagcctctatgggcggtattgatgaatctatagtaatatgtgaaggtctacatattgttgtgttgtactattagaaattgagataaggtgtatggggttccatctcaaaactaa

SEQ ID NO: 29449 - DNA, 3478 bp, Cannabis sativa
  modified_base (1207)..(1220): a, c, t, g, unknown or other
  modified_base (2660)..(2660): a, c, t, g, unknown or other
  modified_base (3008)..(3009): a, c, t, g, unknown or other
gaattggagtagagccatatatcacccatatatcacaacgatctatcaagatctatcaaacttatcaaacttgaaccagtatatatcttggtgttaatttaatcattttattgctaaaatcgtttttgattcttaatattcagtcatccctgttttctccaattactgtttgcgtttaattaatcttttcattgctaactgtttgattatttaaattttagttgttttggctctactctttagtctaaattttctctcaaatcagagcttggtaatcgattaagaatgcacaatcaagattcttttcgctataattcttgaagaaagggtttatgtcatcaatgacaagattcgaattagagaaatttgatggaacatgagacttcacgctatggaaagaaagtttgaaagggattctagtgcatcaaaaggtcttcaaggttcttggagatgcaaagtcactagctaaaaagaaaccagacgaactagcaaaatggaggagatggtgtattacacaatcatcatgtttctgtcaaacagtgttcgaagaaaactcatcccagagaagacagaaaaaggattttgggataagtgaaaagaattatacttaaagtcatcaactgctagcaagattaatttgctagaaaggttatgcggttttagaatgatttattctctttctttagatgataatattgacatatttaatgagattagtaggattggcttattaaatcacaaggttgatgaagaaagccaggccatcattctattgagattgctcccaatcgcatatcacaaagtcaaggttgccatcaagtatggcagagacgtgatacattagaggatgttcttaccgcacttaagtcaaaagattttgaattacaattggagaaggaatccaacaaagaggatgtgtatttggcatgagggagatcacccaagaaagtaggtttgaagagtaaacaccatcactctcaatcaagattgaagtccacagagaaggaaactcgtaaatgttacttctatggaaggtccagacacttgcaaaagattttgcaagaagtacaaggagcagaaaggcttcaacaaatctcacaatggagataggagggacatccgacatcatcaccccaggaaagactctattgcaatcgcgtaggatagtgatgactactccacagtgttggaacttattttaccaggnnnnnnnnnnnnnnacatgtatgttgattatagaactataatctaacattctaaatatgaattttctaaaataataaaatgaatacttataaagttatagaaaatcttacattgggggcagcaaaatataatatctccttctatttagatctctaacccttgatcatttttgtcgcagagtatgatcaagatctaaacttggatcttcttctattgttggaattcttcacaatcttccacaaaggcctgagtattgacttgaattgtgtgggtaatttctcaactacactatagggatttcaaaattaagaagaagaaaagtggaggatgattttgaaattttgaaatagaatagaggctctggctctttttttttttttttttctaagttgtctaacaaagtgaaaactcattagattagaaaataagagcatcttattccatttctagaatttcatctaggattaggattggaattatatggaattaaaaaatataaaataatggctcttaagtgatccctatggttgaacctttagtgggtcctgctggattttaatttagcaattttatttaacaatttatctttttttttttttcacaaatgtaatatttcaattctaactctataaatatcgaatctatttatttaataattataattgattatcaaatataattatcatttaaattatttattaattacatattataaagtctcttaattaacaaataaaccctaaatcttctattcttctcaaataagcccttacttagtgaaaattcacaaacaagacatagtcttatttagaattctatttgattaattaaaatcaattaattgagtttacaagacaatattattccaaacaatgtgggtaccatgggcctatgcaaccaagctcccaataagtagatccaaaatttactaagtaaatttcttaacttattaatttctcctgactccactatagattcgaaattgtactcttgattacatagaacgctctataggttccaaatatagatacgttatgaattatctattgtttcaatctaaataatcaaagatcctctatagatgatttactttgattagggacaaatttaccatcctacccctcaatgtattttatccttaaaatccttagcttcctataaatgatatttcaataaactaatataattactaaagtaagagctcttccatttatgtctattaagccaagctcaaagaaaattgtcatttcatttctaattagttatagaagctatacattccataactatgattaccgctcccacaattgcattaccatgttctcaaaatgtaagtattgagccgatccattgggtcagttgtaacgaataagtcaaagaacaccaataatatagttaagctagaacctaaccatctcaagattaagatatattgatctaagatcaactaagtnatattgacttagaaagatataactgtaagtttatgatatcatttccactgtcaatatcggtccaatccgatatatactccatacactcgatactagtatactttgccaataaactttattgtgaataatcacaataaatcatgtgtaagtaaactttattgttgattatcacgtcggtgtaaatctagtccactgataaatcatgggactaaagactttgaaacatataatcacaataattttttactgtaatgacatcactgtaattgtgaataaccatatgttctggatttaacataatttatacattaaacataatcattaaagtaatcatgtgaaccatgcaanntaaaataatttctgatcttttattaattagtaaatctgattatcctaaaatgggttttatttaggacataaaatcccaacaaactcctattttcactaacataaaactaaaagtatatttcaattaatctcaacacctttatatcagatcaattttagtatgtagtattatctttgtaataggatctgacagacaggttgtattcaataccaaccttctccaccattacatctccttaagtcacaaaatccttgatattgtgaaattcctttctatatatttactcctcttagggtattggattttactgtttggcaactatatttatgttattaggaagtaacactagtagttaatccatgactggaataatgctaaaaattgtatagaacctttcataggctgaatgattatctagtagccttctgggccactttaacatttagtctcactagtagagttagagact

SEQ ID NO: 29450 - DNA, 1318 bp, Cannabis sativa
agaacccaagctttctgttgcacagtatttttgaaatcaaaactgggtgtcattgatgtattgcagacggtagtttggtgaatgttcttgatcaagcttggcttcctcatgctaataacccatttatctcttcagaccatccgacattggatggaatttatgttcagcgactgatgttttcaggaaggagagtttgggatgatgacatcttggattagcttttaaatgctcgggataaagagcttgttcaagctattaccttaagtgaatgagtggacaaggattctaggtactggattcatgaagcttcgggccactatattgtcaaaattgcttacaaagctatgaaagtatcaatggtcattggtctgaaaatgataactctagtttgtggaggaatttatggaacctaaaaattccatcaaaagttttgaatattgtgtggagatcttgttgtgatagccttccaactcaagcaaagctgcttgagaaacgggttgatgtcccattgctttgtcccttttgtcaagctacacctgagaccgtgacacatttgttggtggattgtgcttttgcaagaatgtgttggactcttgttctgtatgatattaaagctgcagaaatgtgttttgtcaactggtttgtatctattttgcagtcttttccttcagctgttatatgtcatcttgccatgatttgttggggcatttggagagcaagaaatgacctggttttgaacaataagaaatctcttgctactgttgttgtgtcttcgactcatgcttattttaagcaatggaaattagctaatgttcgaccacaagatgataactctattgtgaatggagttgttgaaaagtattggagcgtacccaatgaggatacgattaaaatcaatgttgatgcctcggttttcacttcagcaagtttttttaggatcggctggattgcacgggatcatttgggctccctcatttatgttgctgctattcgcaaacaagaggtcgggttgatccagtttttgtgctgaggccgtaggcttgaaggagggttatagttggataaaaacttaaaattttcaataggttgttgtggaatccgattgtcaagttgtacttaatttcctccatagcaattctaatatgccttccctttttggttctattgtggcgaattgtaagtttctttgccaagttttacctcaagttttttgtatttttgtcaaacgttctgcaaataaggtggccaattatttggctcgctctggttatttttccccaactcgtagttataatgggggcttgtccttattgattcg

SEQ ID NO: 29451 - DNA, 1724 bp, Cannabis sativa
ggtgttccaaaactggagtagagtgatagatcacatcgatctatcagacttgaaccagtatatatcttggtgttgatttctttatttcctgcatttagtattttctgattttacatgctcagtttgcctgtgttttctattgattattgttctcggtttgataatcctatcaatgctaattgtttgattgtttaaagtttcattgatttgattctacaccattagtcttaaattttcccacaaattagagcaaggtaatcggtcaagaatgcagaatcaagattctttccgctgcaatcttgaataaacttgaatgtcatcaatggtgagatttgaattggagaagtttgatgggactgaggacttttatctatggagagaaagtcttaaaggaatcttagtggactagaaagtctctaaggttcttggagataagaagttactggcagaaaagaaaccagaggaaaaagtagaaatggaggagatggcatactacacgatcattatgtatctatcaaacagtgttcgaagaaaactcactgcagaggagacgacgaaaggagtttgggataaattggaagaattgtacttaatgccatcgattgctagcaagattaatttgctagaaaggctatacgggtttagaatgatttcttccctttctttaaatgagaatattgatagattcaattagattatcgcaggtttggctaacataaatcacaatcttgttgagatcacttccaatcgcatatcaagaagttaagtctgccattaagtatggcaaggatgttattgcattggaagatgttcttgctgcacttaagtcgaaagattttgaattacaattggcaaagaaatccaagaaagaagaagtgtatttggcatgaggaagatcactcaagaaagagttcaaagaataaacaccattactctcaatcaagatcgaagtccagagggaaggacacaaggaagtgttacttttgtggaaagtctggacacttgcaaagattttgcaagaagtacaaggagcaacaaggctttaacaaatctcacaatggagataggaaggacttccagcaccatcatcatgggaaagactctgctgcaatcgttgaagatggcgatgatttattcacggacagaaagttgttctctatcctggagtcatcaatgaacatggactggattctcaatttcggatgcactgatcatatgtgtccaaatcgagagtcattttctgattataaaccagttgatggaggtaaagttctaatgggtaatgatcattcatgtagggtcattggaattgggaaggtggccatcaaacagtatgatgactgaattaaggtgctgacaaatgtaaggtacatctcggaccttagacgaaacctcacatacaagtccatgcacagaagcttgaggatcaccaaaggttctttggtagtaatgaaaggtgaaaagatcaatggtttatatgttctccaaggagaaactgtcccagctggtgaagctagtatagtgaaagggctagaatcggatatgaagttgtggcatcacaaacttggacatatcagtgaacaaggcctcaaagaactacacaaacaaggtataattgaaaatttaaattcttgtgccattttgtgaagcttgtgttttagggaacaacataagctgaagttcactctagcaacgcacacaactaaaaggatacttgagtatgt

SEQ ID NO: 29452 - DNA, 1410 bp, Cannabis sativa
agtatttttgtaaaaattaactaaaatttcaatattttttaaaattttccaataaaaatcggtcattttttttaaaaaaataataattcacaatcgatagtacttctaaataaaaattggtcattttagtcgtagctaatatatcacatgtacatgtaatcagtgacggacccagaaattttactttgtgggggcttatttatcattcaaaaatatttatacctatattataattgttcttactaaatttatttaattttgtgggggctttttttacgattttgatctataattattaaatttaaaaaattacatttaattttttaaaaggcaatatttttgctagtgggggctatagcccccaaactaatacacttgggtctgtccctgcatacagctctatgttgctagcagagccaaaactcatgttgatctacgataaggtgcaaggtcgaccttgagagtgtttgggcctttaaaagaaaataaattatcactctattctaaggatatgtggtatttttaaaaattattaaaaaaaattgtgcacctcttaagaaaattttttgggctgccccctagacgcaggcctagctcgcttttgcccaagactaaccctgagaatgtgtgaaagtttatagtgcatgtttctttttctttttctttttgtgaaaaagtttatagtgaatgaaaggaaaaaagacaacgacaatgctatacaccttgatccatgtggcacaataagattggtcgagaagcttataaaattgctgctctcgaccaattttatcgtgcaacttagatcgagaatctacttcatcatgcataatattttttaaaagataaaagtagtaatgagttattatgagtgagtgattaataatatgattgacactcaaattacatatattatttacacaataatatgtaattaatctcagttacataataaaaaatatgtagcctccatatataggtgtatataatatatattttaatagatatatctaacattatcatcatatatattcatatataaaagtaggccaaacacacctctaaaagagagagaatttttttaaagaaaaaaaaaaagctttactttttcctaattctaagtaactccaaaaaatccaaattcaaaattgtttgatttatatgtcactataaagaatcttctttggaacatattctaaaggtttgtcatctttttcaaattcccaaataattgtgataatgaaaacacccttttccgaatagctattttcacaacaaatttcaagtcgctttagttattttgcaaaatgtaagtatctaattataaaagttgaacctcttcaaattaaaaatataatattaaattattattactattatctttcgaaatagtttcgaaagcttttggattat

SEQ ID NO: 29453 - DNA, 1903 bp, Cannabis sativa
acctgctggagccttgtcacggcgtgccatgctgtgggcgcggcgacaggcccaaaaccccaaaaattccaatttttcataccttcaaattttacccaaattcaaaccaaaatccatcaataaccatacataaacccaattttattgctcacataaacaatctatatttggtaagaaaaatgagctctaccaatagtccaaaacatctccacaaaagacaaattgggcatgctacacaaaatcactattgcacataaattcacaagctttaaaactcaaagcttcaaagcataacccaaaaattcaaatcattttctgagaatttagacatcaaaaacctccctaaacatcaagatgatcctagcaagaacctaataacaaaatcatactataatcaccacaaatttcctcaattacaacaacatgcaacactaatcatagggacaccaagaacatcaatacaaagcttaaaaatcagaatattcaagcaagaaaaaggagatcaagatagtacctaatgctctccaagttccaagcaagagaaccacacaattcaacaccaaattcaagctttcttccacaatttgagtttgaaagtattaactagagagaaacagagaggtgggcggtttagaggtgaaaaaacccagaaaatgaagtttatcttaggtgaattgttattttgttgaaaataaattatctagtcaaatgaccaaattgttcgtaaaacacatataaaggcataaacacataaaaggggtaatttttcattttcactcacacatatatatcacataaattatattttttcttttaacacatataagccataactaaatcttaaaaatatattttggatcttgaatccggttcggcccaaaatacccggttgtgactatacagcgccgacttgtaagaaaatacatgtagaaagatagaataaccatactatataataatatagtccataaacacaatatattataagattacaattttatccttctcaagtcaaaattacgaaaatgcccctaacatactaacgggatcttaaaatgtagtaaattacaataattccacatattaaatcatataataatataatttctcattaacacttaattaacttagttagggttgctgattcggttactaaacttgagggtactacaataattgtacgtttgatgttaaaatatcgagttaggtggggttatggtattggactattttacccctaagccatttaattacttaagctaaaggaaaggttaatttagtcattttactttagagataaatggttattccactactttctatagctggcaactaatgaataaaagataaacttagatttagcttgtgttttaaggaaaattaagaaaataaacaaaaaccaaaaagtaaattattaaatcttcattttctctctccccctttttagcccaaccaaaaactagggaacctaactctcttttcaccaaattctgaggtttttagcaagatttcaagaggtgtgaacccaaggtaagaaccctaagcccttcttcttaagttttcaagttttcctttaaattcaagcatgtacaatggtgattttggttctgtccgagttagggtttggtttggggtgtttttacagtttataattgatgttttaagcttgttacaattatttttttggggatggttgtgttgtttagaaagtttgatttcaagaactcaaacttgactcaacaatggtggtttttgaatttttgcgtattttgaggttctgttgcttgaaactagtctattgtgatgttattaggtgatcaagggcttcgtatggagtttggagttattttgagtcgattttgggagtcttttttttttttgcattgaaaaacgacataccgtt

SEQ ID NO: 29454 - DNA, 12066 bp, Cannabis sativa
ggcccagttaaatagttgtgaactgaagatcacggaacggtctgagacaaaatggaggcggacagcgtgagcacaacaccacagagcgtctcagtgatcaccacgtgtaccttttgccatttgtggatctcttattggttaggaagcattaataatttccacgtcagcatccctgtcattaacgtatataagaaaactcagtattttctggagcatgtgcgactgtgcgagtttcggagaaactttttcattttctgtttgttacgttttccagtcaaccaaacagaaaaaatctcgatacagacttctggaaaatgcgatcttaaattaaaattactggtcagtttcgatcgttcgattccattcttcttttagctttttttatagaatgaagcattgccgaatctaattccatggttatgttatacagtattaagcaaatgaaactcgagttttgaatttgacaacgctttatattctaattttcctcatttgaacctcagatttactttttaatcacgggtaaaaaaagtataatgtaaattcatgtttgttgatgaaataattggctgaactctaattagtgttcgtttcttgcttttgtgatgtacagagacgaagattgaagttttcttagggttgctaacgtaatttaggatggcttcgatattgtttaagcttggattattcttatgcgtcttttgcctcgctttgtctccctcacaatccgcagttttaagcatagatctaggttcagaatggctgaaagttgcggttgtgaatctgaaacctgggcagagcccaatttcaatcgcaatcaatgagatgtcgaagcggaagtctccggccattgtggcattccaatctggggatcgtcttctaggtgaagaagctgcagggctagtcgccaggtatcctgataaagtcttttcccaaattagggacttgattgggaagccttttaaacatacgaagacttctatagattcattatacttaccatttgatattaaggaagactccaggggaactgcgagtttcaaaattgatgacaatgtgggtagtttttctgctgaggaattagtggcaatggttttgagttatgctgctaatttagcagagtttcatgcaaaagttcctgtaaaggatgctgtaattacagtgccaccatattttggccaggcagaacgaaaagggttggttcaggcagctcagttggctgggattaatgttctttcattgctaaatgagcattctggtgctgctttgcagtatggaattgacaaagatttctcaaacgagtctagacatgttattttctatgatatggggtcaagcagtacttatgcagcccttgtgtatttctcagcgtacaagtccaaggagtttgggaaaactgtctcggttaaccagtttcaggtagggtttctacttaatttgaccttttgtaggtataatattctgcatattgtttagctgttttacttggttttttttacttctagcacctactaagctcacagcatctgtgcaggtcaaggatgtcagatggaatccagaacttggtggtcaaaatatggagttaagattggtcgaatactttgcagatgagttcaataaacaggttgggaatggagttgacgtgaggaagtttcccaaggcaatggctaaactgaagaagcaggtcaaacgaacaaaggaaattctaagtgctaacacgatggcaccaatatcagtagaatcactctatgatgatcgagacttcaggtttggaatttgaaaactgataatataatactaaaaagtttcaaatcattgttacacgattgttttccagttagcagataagatcggtttgaatgtagtagtttatttattaattttatctcttaatcatgttacaatccctggtaagaattcatctaaataacgtgtgtgagaaatattgtgtgaaaatctctattacacaagggcttttagattagaagttgaggatttttttgactattgccatagagtatacatgcaactttcttagagtattatatatgtatcgtttttattctatcatttatcatacttaagtctttatcttacaagttgacaccattttatgttgctaaagatacaaagctcacttgaatgctattcaaatagcttaaaacaaggctcaccctattcttttatcaggattagagaatttattggacctttttttttctccatgaataatgacaatgtacaactttgaactgatttacaaaggtattaagtaaacagcatggtactaaaatgagtatattccattttatattctatgaacttgtatttgtaagcaaatattaattgttggtaaaaaaagtaagctgaatgcgatttatatttcttttaggagcaccatatctcgtgagaagtttgaagagctctgtcaggatctgtgggaacaatctcttatccccgtgaaagatgttcttaaggattctggtctaacaattgatgagatatatgcagtggagttgataggaggtgctacaagagtaccgaaattgcaggttggttttctttatgtgcaagaaaaactccttggtttcaattctgtttgcataaaagtatatttccattcaatgatgttatttaggttttcctttttttttggcgtcatgttacatgttacttcatactgatttttgaagtaggtagatggcatcatttggtgaaagaatgatattgtggcttgcctgatatactttcatgtgttagatattagaagaatgactgggaaacattttgttttttccttcataacaggccaagcttcaggaatttcttgggaggaaagacttggatagacatcttgatgctgatgaagctatagttctgggtgcagcactgcatgctgcaaatttaagcgatggtattaagttgaatcggaagcttgggatggttgatggttctccctacgagtttgtacttgagttagatggccctgggcttttgaaagatgaaagtactagacaatcacttgtacagagaatgaaaaaaatacccagcaaggtaatacattgcaactcatagaaattgtgagattagaattagcgcatgtgttagatcactggtttaattatgtcattcttaacaattttacgaactatatacttgtttatggatactgtagatgtttagatccattgttcatgacaaagattttgaagtttcattggcttatgggagcaaaattattctaccacctggagtgacctctcctatagttgctcagtatgatctgtctggtctgacagacgctactgaaaagtaagattattatacatcttttatttcatttgtggatcataatttacattgttactatagccctctgctaccacattatcatgtgaggattagaaatatactaatatggttataatgtgtttgtctacttatttaactcaggtatgcatctcggaatttgtcgtccccaattaaagcaaatctgcatttctctctgagtagaagtggaattttgtctttggatcgggcagatgctgttattgaaataactgaatgggtagaagttcctaagaagaatgtgacagttgagaactcaactattgcttctgccaacatatctcttgaagttggtgctaacaacacttcagaagaaagcagcgctaatttacatgttgatgatgctgacactactaatgtttcatcaaaatctggtgaagagcagaatgcttcagatcttgttaccgaaaaaaagcttaaaaaaagaactttcaggattccattgaaggtacagataaattgatttccctgtatttcttttttgcagccaattaaagcttttagattcctcaaattggtatgtgatgtttattttgtgcagtcttgttctctcttctttttgatttttactttcatgacatatagattgttgagaagactatggggcccgcaatgtctctgccaaaagcttcctttgctgaagctaaaagtaaattagaagcaatagagaaaaaggatgcagagcgaagaaaaactgcagagctgaaaaataatttagaatcgtacatatacaatacaaaagacaaggtaggaattctccagtttcttaacctttttatgttttgaaattgtggcatatcctcacatttcccccaatgctttccattagcatccatcttgagacatatattagagaggttgatcattgttgttaattcgatgttatcattttttttggtgaatgtcctccaattacgatggttgtttgcagattccggttatttatttagtcttctgttattttaagaatgaagtaatttaaaatagacagtttgctcatttgtgcactctctaatagactttttcttgtatatttttctgataccagcttgaaacatctgaggaggttcaaaagatttctactgatgatgaacggaaatctttcattgaaaagcttgatgaggttagccttcttttttggacagctaagccatataacttagacaagtattctttttattttaatttttacaaataaagcacaaaaaaataaccaggttcaagagtggctatatatggatggtgaaaatgcttctgccaaagagtttcaggaacaccttgatatgttaaaagctattggtgatccaatgtttttcaggtacattctatattgatttgctgacttggctaaaactttctttggagtggaacttttatatgtgaatttgatatcacttgagagttgagactgagggtgcatgttactgaaggttgattgttttttttcctttcccaaatgtagattgaaagagcttacagcccgaccagcagctgttaaacaagcaagaagttaccttgtcgagctgcagcaggtcattcaaacacttttatgatgaaagctaatctttattatgttcagattgtgtatatatgtatgcatatttcttgtggtgcaatttgtgaatgtctgggaagaagcattaattgttcaaatcattagtttgtccttaggaagtaattggttttattggaaatccaaattttccattggtgtgttgagagaccagttcagtgtcttcaagttcctttctctcttctttcagtaacccctttttttattatagtatatacaataaacaagtctgacaaggcttttggctttggggccaatgcacactgtcatcctatcaaaagacaaatgttattgcctttatgttcgaaccatctcagagttcaacttgtgccatctttagttagtattcatattaacttattgagggccaggttctgattcaaaaatatattggtgtatttgtttcttggttcaagagaatttgggtgcaattcattaagattatggtgcatttatattacaagcatgaagagtgcaagtatatacatttcacgttgttctgtaaagttggtggagccttcattatttccatatgggttatactgttgataggcatcttgtttcactttagatgtttcactcactgtttgctgcatttgctacatttagtgttttattatcactcatttatggatttctactgttgctaacttgctatttggtactgatcgtctccattcaactctgtttattcacagattgtgcgcaagtgggagactaacaaatcttggcttcctaaggagaaaattgatgaggtgattaattatactcttgcagtctgggtgctcataatctcttgttttattgaatgttcagaagttagttttttatatgacttacattgagggattttcaggtgttaagtgatgctgacaagttaaagacttggttggatgaaaaggaagctgagcaaaagaagtatgttattttattctgttgtctttttcaatctgttaaaattatattgtaatttgtaggtgaacaaatgccacccttaactgtgattgtaattcatttacatagttcagatcatgcaaaattcatgaaatatttaatgtgctgttatttgcaactggattttgttatatatttattttatataaataagatgggttgggttagaatatcctattgttgacttacactttttttactcttaccttctgaaggacttctgcatttagcacaccagcattcacgtctgaagatgtttatttggagttgtttaatctgcaagacaaggtactagtactactgcaattctttggttaattaagtgtgcagctttacaatgttcgtgccattgttttgtataagatattctcatttatacatgcttggtcttttgtgcaggttctcagtgttagtaggattccaaagccaaagcctaagatccagaaacctgctaagaacgaaacagacaacaacgaggaggaagctaagtcttcaaacacaacatctgaagagaaacctgccggaagtaacgaatcagcatcagcatcagaatcagaaccagaacaagagggatctgaaaatgaaaatgttgacacggagcctaagtcgcacgatgagttatgatctgactgaactgaccttttttacgttttgagttgagcatctgcctttccaaccagaagaggtggattgacaatatggtagagattgtggaggagatgatctctctgcatggtaggtgagtaatagagagtggagaatacctttgtttcaaagggtgtttcttatcaatggttttccgggaagtaagtaaaaaagaatagttgctataaggactttttatccgtgttagttataattctatatatacatagttaagcttaagaggcaacatgcagctatttgccattttgtctctccctggaaattttggttgttatttattcagaatacatcgatcatagggatttttgcattttgtattaatcatttttttttggatattttattataaagtacacttaaaggagttcctattgaggttctttctattttcgagatttaccacttttacctatcatgtgacgtgagaatagatttaagctcttttaaacctggaaatgaaacgtagacatacgcttgacaattggcatgtaacagcatatagtagatttccagctagctggcaacagaaggatttacaccatgttttaatttcatattatagattcagataacattttcttctgattttatagaactttttgaatgaaatgagaatagtctttaataataataagaagggatatttgtgttggagattcaaagctcaatctcacacactatgggagttcatcgcacactcaagaagacttctctaaagcatttaaccgacaacaaacaacaaagtcaatgaaccacacttcaggaacttagatagaaatgaataatactttctttattactaagaatctgaattttacaagtgaaagaagttaactactcattacaagtgtataggtatttatagggactaatatccgagtatagctattaactaaacctatatgtataacagttttaactaacatgaaaagttagttaaaaccggtaacttatgtggcatattataaagtcacttgaattctaacaaatttccaccttgacaagtaatatacacacacatacaaagcaacactaagacatattgtacactgcctacatttccattacattaactttagacagtggtaaaacttggatgtaggtaggggctttagtaaggatgtctgctgcattgttctcagtggccaccttctccagtttcacttttcccccaattaaaacatctctgataaattgcagccttacatttatatgttttgttctcttatggaaaacctggttcttgctcaagtgcaaagcactttgactgtcacattgtatagttatgcatctctggtctaagccaagttccatggaaatgcccttaggccacaatgcttctttcactgcttcattacatgcaatgtactttgcttttgttgtagacaaggcaacaatggattgtaggtttaatttccagcaaattaagcatccacttgactgaaaaacataccctgattgagatcttctagtgtcaaggtctcctgcatagtcagaatccacaaaccctgctatgttgactgtcgctgaacttaatccataaaccagtccaagttgttttgtgccttgtagatacctcatgatccacttactacattccaatgttccttgccaggttgtcccataaacctgctcaccatgcttacaacataactgatatcagtcctggtgcagatcatgagatacatgaaactccccaccacaatagagtaaggcatcctatccatgtaatttgcttcttcatcatctgtaggggcctatgatttagacaatttgaaaagtggtgtgtagggagctttgacaggtttagcttggttgaaaccaaacctgtaaggattttagatatgtaaccaccttgagacagtttgagaattctcttggatatgtctctaatgatgtcaatacctagaatcctttttgctgaaccaagatctttcattttgaattccttgtttagcatagctttgattttgtttatctcttgaatatcgttgcatgcaataagcatgtcatcaacatacaataagagataaacagtagctttgttgtttttgacataaacacagctgtcataagagctccttttgaaaccatttctgagtacaaactcatcaaacattttgtaccattgccttggtaattgtttcaatctgtacacaattctttttagatggcatacatgatcttccttccctttgacttcataccccttaggttacttcattagaatattttcttccaaatctccatgtaaaaaagctattttgacatttagttattccaattcttggtcattgattgctacaatgctcaacattagtcttattgatatgtgtttcaccactagagaaaagatctcattgtaatccaccccttctctttgtgagaaacccttagcaactagtcttgccttgaacctagcgttttcaactccgggaattccatccttgtgtctgtacacccacttgcagcctataactctttgacctttaagccttctaactagataccaagtcttgtttttggttagtgaagtcatatcatcatccatagcattgtcccactcaagtttatcatcagattgcattacttcctcataggttgctggttcttcatttcccattgcattaatacttagagcatagttgatgacatctgcaaaaccaatctatatggtggtcttgttgctcttctttttttttctctagttaattgataatcttgagtgtcatcttctacatctggttcttcctcagattcaactcttccttccatttcttcttcttcttttggttcaattgttctgtccacaacatgttcccttccattggactccacctcaaactgtattgtgccatttgagtctttgtctggtatgtcattcttctgtacatttgcaaggtccttgtacatggtcttctcatcaaaaaccacatctctacttacaaaattcttttagtgattgccatcttaaatgctctaaactttgtagccctttactccttctggatatcccagaaagatgcattttcttgctctgggatctagcttcccttctttgacatgagcatacacaaggcaaccaaatattctgagatgatcgtacattgttggcttgcctttccacacctcaacaggtgtcttgaattcaattgcagatgagggacatctgttgatcaaatagcaggctgtgatagctgcttctgcccaaaaagattttggcaaaccagcatggatcaacatgcatctaactctttcaaggattattctgttgattctctcagcaagtccatttttgtaagggtttttgggcactgttagatgcttgtcaatcccaacttgtttgcagtattccttgaactcatttgcacaaagctcaagcccattatctgtcctcaatttcttcaccttcttaccagtttgagtttccaacatagttctcaattctttaaacttgctcaatgactcatttttattttttagaatgaaaatccaaacatatcttgaaaaatcatcaatgaaattaaaaaatacctgacccatcctcttgattttttcgtagatggcccccacaaatctgagtgtaaatagtctacaattcccttggtagtatacttccgagttccaaacttgactttggtagctttcccaagtatgcattgttcacacagctccattggttgtatctgatccttgccaaatactcaaagtttgctcagaatcttcaaaccaccatagctgatgtggcccattcttttatgccagattagagttggttcctcaccctttggagccactgtattcacttgatttctgaatgtattaccctacaatacatagatgccattcatcatagtagccctcatgaccaccattgatccttttgtcaccttaatgagccattttcaacctttaatgagtatccattttgatccaacatagtcattaagatcaggtttctctttatttctgggacatgtctcacatgttctaacatttgaagcttgaaagatctaattccaacaattggacatgaatgattgtcacccaatttgacagtgccactgttgacagttctgtagttgatgaattgcttcttgtcagggcagatatggaaggaacaccttgaatcgatgatccaaccagtatctaatttggctttggagattaccaacacactagcactgtcatatccatcactatcttctccatcagatacaacatctacatttacattcttcttggagatatagtctttcaagattacacagtcctttttcaaatggcttgtcttattacaaagaaaacatcttctcttgaacttggcattagtcttgcctttgtttccactgctttgatccctgttctccttctttgaaccttttcctctgataaagagcccttcaccagcattgtcattttatttatttgccgttctcttcatctcctttgacattagagcactctgcacctcctctaatgtcaaagattctctaccatacatcatggtgttaataacgaaaatgctaagaaatgctaaataccataaatagtgacatactgttattgatgtattttaatatcgggtttcacaaattttgatttagtgaataatatggagaatcgctaaccaattattaagtgttatatctatatagtgttgattgaacatcttcaagtaccaaataataatgttctattgataataaaaaaaaaaattcaccataaaaatattgtacaaaaacttacacataaaaaatcattcataagaaaaagaaaacaaaaaaattaagatcattaaaacccataaaaattgttggaaaaaataaaaaattatcattcatatgaaaaaaaataataagatcattaaaaaaaatacccacaaaagttattgttatccatgtttccgaatgaaagacacatgtcataagaaggaaagtatgactattaagcagtccctaagtaagtctcctcaataaggctaggtcacgaagaaacttcgcaaatccagaaataaatcaagaccaaaagatatacggaaatctatactgccttatttcagctttcgagacacggaagacttataaccactctgggatctagagatacccaggttcgaagctttcctgagcgatacctggaaggttactcgaagtgcgtaccacggatgttgacctcccaaaagagatgaaaacatctaccttgaagatgaactcggatcgcctaactacagttatgctttttctaacacaggatcagattttgtcccctttgctagaccatggtagtgcgcacgccccatacacctttttgccagacaattattctaggtatttacttttcaaggttaaaccttttggtgacacgagtcatgtacgaatagtggtcccctattgtccagctgcttcaacacacgagcacaatgtcagctctttgcatgtattttaccccattagtgtgaattttgtagaaaccctaagtgggtcataggcatgcccatacccgccctttagcctataaatacc

SEQ ID NO: 29455 - DNA, 1679 bp, Cannabis sativa
catcaactatggtaatgaaataccgaaaaccctcaacagttggaatattgtaaggccaccaaatatcaatgtgaagtaattcaaaacaatgctgagatatgttgtgattgctaacaaaaggtagtttcctttgtttggcaaaatgacaaatacaacaatgaaaattagggcaaaaagaatattgaaattgtaaagctttattcaatgaatgattctttacacatgaagcatggccaagtgtataatgccacaaattttcgtcacttattttggaatctgaaatagaacaaacaataggaattttgggttcagacagatagtgaaggttccccgttctttcacccatcccaatcacttgattcttggtgaaatcctgaaacaaacatttgttagaaaggaaaaagaatgagtaattggctgaatcagctaagcagaaacatatatcaaattatgttggaaatcaggcagacaaagaacattttcaagaataatattggacaatttaacagttccaacaaaacaaactttaatactaacaccattaggtaatccaacatttgttatcttactgctttcctggacagaagaaaataaggaaggattggagcacacatgatgtgtagctccagtatcaattatccaattagatttagggattaaagaagccataccagagatgttggatacgattggttgctctgactgttgaggttgcacctggttttcttgaagcttctgtgtaagaatagccattaatctttgacattgagcagccaaatcttgatgatcatttgtggtatcagtgatgtcatggcctgtagtacaattggcagttgattttccttgctgatttgctggttttccaggtgtttcgcgtgggaatctgccatataacttgtggccagggggatacccatgaattcgataacatttggcaattgtgtgtccaggaacaccacagtgggaacaaatggggcgattgccattcttattatcagatcgattgttgccacgattagcttgagcatttccagcaaattgtcctgaaccatcattaacttgctgattgttctcagattgaggaataacaattcctctctgtttttcctcttggattatgctagcataggctttgttcacattgggaagaggatcttgaagtagaatttgtgacctagcatttaggtaagattcattcaagccgattaagaactcaagcactttatcctcatcttgatactcttgaatgatcttcaatgctccacaagtacacacaggttgtggtctgtattcttgtaacagatcccatagccctttgagtttggtgtagtattgagtaacatcactagaaccctgggttaaggtctgcatagatctttttacttcaaaaattctaggggcattttgctgatgaaacctttcctgcaattcagaccatatacgagaagcatcgtccatatacataatactatctgctatgctaggagaaactgagttcaagatccatgaaattacgagacaattacatcgaatctaggagtcatagttctcatcatcttcctcaggagctggtaatctgccatcgacgaacttaagtttgtttcttgctgataatgtgaccatcatcgaccttcgccatgagctaaaattttcaacactagttagaatctttggtacca

SEQ ID NO: 29456 - DNA, 2750 bp, Cannabis sativa
  modified_base (1734)..(1735): a, c, t, g, unknown or other
tggtggtttgctatgtcttgtgctgtgttcacaataaatagacttcccacaccagttattggtaatatgagtccttatgagtgtctctttggcactaaaccagattacaacattttaaaagtatttgggtgtagctgttttcctcatttgaggccatacaataatcacaagcttgaactaaggtctcaagaatgtctttttttggggtactcttctcaccacaagggctatttgtgtgaacacccaaatggcaaagtgtacatctcacgcaatgtcatcttcaatgaaggacactttcctgccttgtccaactcaccaaaggtgtcctccaatcaggtattgtccttgaataactctcctaattttagtttccaaactaatgacaataatacatgtactaatgttggtcttattcactcttctcttacacaacctaccacggctgctgagggaattgaccatacatatacattgtctcaaggacaacctgctacagcccctcacccacgccctacaccacctattatcccacaaaatgacaacatcaatactattaccccacaaaatgacaacaccactactattaccccacaaaatgacaacatcaacactattacccacaccattcctctttctagcataggccctactcccaatacattaaataccactttaccaaatgttacttttccctttgtcccagccgaaagtacctgtagcccttcacacctcactatcccaacggctacaattcaacatgtaccattgcagtcaacaactcctattacccaacagtcccctaatgtccttcctaacagtgatcttgccaacccactcacgggtcctacaaggactcatgctatgaagacaaggtctctaaatgggattaaaaaaccaaaagcatacacagccaccaagtaccctttacccgagtcccttataccaactgagccaaagaatatcacatctaccttaaacaatccaaggtggttcaaggcaatgaatcaagaatatgatgctctaaaaaaggcaggtacttggtctttggttccttattctcctcatatgactgtgattggcaacaagtgggttcacaaggtcaaactagatgctcatggcaatcttgaccgactaaagtcaaggcttgtagctaagggctatttgcaaacacctggcatagactatgaggaaacattttctccagttgtgaaaccagcaacagtaagaattcttcttacattggcagtatctcttaactggcaagtgaaacaattggatgtctccaatgcttttctaaatggtgagctacatgagattgtctacatgagtcaaccagaaggttttgttgatcctaccaaacctactcatgtttgtcaacttcacaaggctctctatggactaaagcaagcccctcgtgcatggaatcaaacacttagggacaagctactggagtggggatttagtgcttccaaatcggacacctcctcctccttgttcatttttatggctcgggtaacaacatcataatccttcttgtctatgttgatgattttttagtaactggtcctaacactcatctcatttcaaagttgattactgatctcaacaagtctttctccctcaaagacttaggaccggttcactatttccttggtattgagattcatcgtgaccattcaggcatgtatttgtcacaaacaaagtatatcacagatttacttgttcgtctcaacnnggaaggagccaaaccttgttctaatcctacaagttcggccattaagctctctcttacagaaggagaaccctttggtgatcatactctttatagaagcacattgggtgctttacaatatcttaccctcacaagaccggatgtagcattcattatcaataaactaagtcagtttattcatgctcccacaagtcttcactgggaagcttgcaagaggcttatgcgttatctcaaaggcaccatacatcatggtcttcatattacaccagctccttccttaactttagaagggtattctgatgctgactgggcgtcgtgtgttgatgatagacgaagtacagggggttatgtgatgttttttggtggtaatctcgtatcatggtccgctaagaaacaacaagtggttgctcggtccagtagtgagagcgagttcagggctttagcaaatgccgctgctgaaatcaaatggttagtctcacttctttctgagttacatgttacttctactcactgtcccatattatgggttgacaatcaaagtgcagctgctattgctgcaaatccagtctttcatgcaagatcaaaacacattgagatagatttacactttgttagagatctcatcctctctaaacaactatccattcggtatgttccagctatagaccaagttgcagatgccttaaccaagtccctgtcaaccgatcgatttctctatcttcggtccaaactcaagatgtgtgacactccttttcgtttgaggggggatgttaaacagttaatcatctcttaaacagtttgttttttctgttaattactgtttaggcttattgttagtagttaaggttgttaattttgtataacaacttttttgtcttttctgctgtaatactttctggtctataaataaagatgaggcaacctttattgggttaagcctttgcatttttcatttcgtgcctctgcaagttctttcctctgctcatagcattcctctgttcatacttcaccttcttca

SEQ ID NO: 29457 - DNA, 2067 bp, Cannabis sativa
aaaccttaattatttaccattagacttatcggaatattacaaggatggttggacattgtgtccttcgaatcaagtcactaagaaagtggtttattgcagcaggctgcttgcagattcaaggcagaatttcactggtaactttaaagatagaatttgacagcaccgtaatgaggtccgaaaatggaaataaggaagggatcctacttcagttgcaaactatagagaagctgaaaaaaaaaattatttgaggtttacatcagaagagaagtgttttggaggcaaagatctaagcaactttggctccgagagggtgatcaaaatagcaagtactttcatgcttatgctacggctagaaaaaggcacaactcaatatcccaacttcaagactcacaaggcaactgggttaattggtctaatggcttgtttgaggtaattgttgattactttaatagcttattttattcttctaatgttgacacttttatggttatcaacaatatatcgtgtactgttacaacaagtcaaaatgaagttttaattgcccctgtcatcgacgatgaagtttggatagctcttttccaaatgcaccctgaaaaatctccaggccccgatggtatgactccgggtttttaccaaagatgttagagtattgttggatcggatatcgttacacttgtaaggaatttttcggctaatggtgatatgccacacagtctcaatgataccaatttggttcttattccaaaaaccaaaagtcctacttctatgaatgatcttaaaccggtatcactatataatgtcctttacaaagttctgtcaaaagttctggccaattgtcttaagatggttctaccgcaacttatatccgataatcagagcacatttgttcctggaaggttgatcatggacaatatcatgatctcttttaaggtcattcattacttaaaaagaaaaaggcagggtaaatagggctttatggctttgaacctagcttttagtaaggcttatgatcgagttgagtgggatttccttcgtgacatgattcacaagatgggttttgctgatcattggattcatttggtgttgaaatgtgtctcattagtacgatatactattattaacagtggtagagagataggccccattgtccctaaaagagagattcgccaaggggatcccttgtcctcttatttgtttctcatctatgcagaaggcttctcgtctttgatatagaattttgagagtacaaagcatattagagggtgtagagtggccaatggtgctcctgttatctcacatatgttattcacaaataatagttatttgtattgcagtaggactaaacattgggcgggttgaccgagtttcgggtttacgggtttggagttcaaaaatttgtactcggacctgacccgtgaaatgtttcgggttcgtgggtttcgagctcatgggttttcgggtctgcgggtttgggttggccgggtcaacgggttgacccgatcaactcgttaatttttttttttaaaaaaatcaaattttatataattttttctatatattaaattaagcatataaattataaacttataacgccataatctatattcgttagattaaaataaaataaaaaatacattaatttcaaatctaaaatactaaagtcaagtttcaaactatatataatatattatatattattatttttaatatattatttatgtaataaaaataaaatgattgcattttagggtttaatttttatttttaatatattatatatgtaataaaaaaataaataaataaaaagtgatcgggttggcgggcaggtttggtttcaacccgaaactcggtgaccataaaaaaactaacttgcgaacttgcccaatggtgtaccgggttgaacccagctcgccccaacaaacagaatttttaaaatatttggattgagtgggtcgagtccgggtgggttggtcgggtctaggtcaaacccggtcaaaatgttcaatcttatattacagggctaatgaaagagaagcgaatagtgttctccgattattgaagactttt

SEQ ID NO: 29458 - DNA, 1527 bp, Cannabis sativa
  modified_base (1469)..(1496): a, c, t, g, unknown or other
tgtacttttgtgaactcagatggtttcttctagatgtcttctaatctaatacaaatgataaaattcaattctatttcaggatgttgggaaatccattttggagagttattcaagagttttagagagcctcgcatttaacatagtagcacgtatagatgatttactctatgtggatgacttaaccaagcattctgatcagttctcatcgatctcaaaagtcggcttgctatctcaaaatggtgttacaaccccatactctgttcctgttccaagcactccatacaaaacagcttttgccactccaagtttctctcctgcacacctagttagcccagcaagaggtgatagatcaccattcatcaccagtggcaagcttgcccagcgtggattaggcgtgaaaaaggtcttgacagattatctcagcattgagacgaaaggaaacagttatggaagtccaaatgaaaaagcaaagtcattatcaaacacagtacatgaagtttctgcaactcaaatgggtgcagaatctcttgactgtagaaatacaccgatcccatcaataagggatcggtttcagaaggatgatatctgagaaagaagtgaactctagaagctagctcttttatgtgatcaaccaataggcatagtacgtactatattaggtatattagccttttccctttttacattgttgttcaagcagatgtttgtaagagaggagctgatgcctcatcttcatgaacattctcacttttctagtactgtttttgctccctactgactaagatcaacatgtgtttgtaaagagaaaaaaaaatgaaagaaggaaatacaagaatgttggctatgttcataaatagatgaatgctctcattttcatatttcatgtatttgatgtgctcaaatgacctccttccctcgtgttttctccttcaaattccccttaaaactttgttctttacttgtaaagttgtaataaatatttaaggataatcagacactcgattaaccaatttttctcaatatgagattcggtgcaattttttttttcttttacagttcatgtcatacaaatgaataaatttaataaaggaaagctgtgactccacatagttcttttgctatcaaaattaactcataatttagttaattttatatatatacatatatacattaatcactattcatgttgttacactttattatataaaaaataaagtatacgatcgatatgcaaagcagaataataaaaacatatcaagtgtgtatgatggcgacgaaagatatcgtaataccttcagccattgatctttaagctttaatttttgtgttgcttcggattgggtaatcggactttcaaactctctctactctttttagatggaatttactatttgtacagaatgagtgaggagctcgggaaccaagaccctatattttataggtaagacactgttggaattattttaccnnnnnnnnnnnnnnnnnnnnnnnnnnnnttattaacatcctaaataagaactttctaaa

SEQ ID NO: 29459 - DNA, 3146 bp, Cannabis sativa
taataattttgagccttcgaaatatacgctaattatctttaatatatattgtatgtaactatgtatgcatatgggcaatgcactatgagtatttatataataaatttttgtatggcataatgtgaattgaataactttcacctttttaccacaattttaaaattgagaaaacttgatcagatctacataatcaataataagggaatattagtgcatttgtctttttttttttttttttgaaaaatccacaataataaaatattatttttcaatctgaatattacattattaatattgtaagtaaaagtgtgaaaccgctcgtctatatttataaccacaatatcatatttatatttaataaatgatcaaattctatttttttttttttttttgactaaagagaaaatttcattaatcaaagacaaaacaaagccacactaaggccacaaccaactggcccaatctcccaccagcaacatctattgaattaggccgcaaaaacatacttttttcagattgtataatcctcttatattttaaactatacaacatgtatttaactatttccttaatatcatttacaatttttaaaatagtataataacaactactattatgaacacaatagtttttatttttccacaacatataaattgtagcagcaaaaagtaaattaatcaccccaaaaattttgcttgttatccagcacaaccacctgctgtaatctgaaggccatcaacacagccacaccagtaaaaaacctgctgcactactgcagccattgaaacacaacagctgaagaataaatcgtgatgactctcctcttcattactacacataggacagcatttagaatctatttgaacatgaaatttagagaaattatctctagtgagcaaatgaccatgaacaacctgccatatataggataaacctatgcttgggcagcgagagattgcaccagacagccttgtagaagctatcagaatcatgttgaagtgtcccaatataaagccgagaggcgatgaattttcctttttggctacagtagccacattacacttgctgaacttcttccttagttgacagattttcctccaatttatgggagagaaaagcaaaatccatttggcttcttgggatgaggtttgtcttcctaaactatttggaggtcttggtttcaaaagtggtcctaattagaataaatctattcttaaaaaatttatttgggctattatggataagcatgagattctttgggtcaaatgaataaacaacatctatatgaaaggagctgatttttgggagtaagagttgaagggggatgttagttgatattaagaagcccctacgaagcctctctacatccttaataacactttgaggaagaatgaatatgttcatccaatagttgcgaagtcgtagcaacactgaatgaatgagttgaattcagccagcataagaaagatgcctagtagcctaagtaaccagccacattttaatcttattaatgatagcatcacaatcttctcgtctccactttgttggtcttagaggcactccaaaaatcaaattctatattttcttatgaaaagttttttttttatggggtatgaaaagttaattaattgtttttttaagagaattaattaaattaaatgtataaaaagatatttttttttttatgttttttgttcttataattttgtttttggtggtccaccacatcatatcaaagggacaagttatatgaacagattttttcacaataatttaattacacaaattttatagattataaaattatggttattggtgatgtttcttttaattttgtaaagcgatctgctaataaggttgcgtacgctcttgcgcggtcttctctttttgaagctgattgtaattattatagggatgtgttacctatgcatccttgattttgaatgatttgatttaataaaatttcatcattattcaaaaaaaaaaaaaaagaaaagaatatgacaaattaataataaagaaaattaataaggaaatatatataaatagtgaaaacactcaagtataaatggaataaaaaaaaatatagaacaacaataaacatatggttcacgtgactttccaaaaaaaaaaatgacttaaaaaaattaaatcaatcaattatcattaaggtttggaatttaattattattatttatattttaacttcgagttctttttaagctacaaaatatttttttttattaaaaaatactaactgtaaaactgttggttaatacatatatagtttaaaaaattagttattaattttttttttttttgaggtaaaagaattagttattagttttaattattgttaatgctcaatttgaataaatatttattttttgttaagaaaaaaaatttccttaaccaaaaaagctaacaagcctacacaacatgtctaaaatactcaccaaaacaaataaagttattgaaaaataacaaggtgtgttgtaacaccaaacaaatcaatttggtgtttctttaatctgaattttctccaataaattataattttcttttatttaatgcatataagtgtattattaataataaaagatgtaaagtataaaactatgtacatatttctttttttaataatatatatatataaataaatatatgccacaaagttatatctatatattaatataaaaaaaaaacacgtaaaattctataggtggctttctataagttttttttatatatttttttttaatttctaagagtactatgttaatgtcactacaagaatgtacacttttgctggcgcaataaagtatacaattatcgacgcaagtcaacaaatgcgccggcaataggagtcaataaaattgatccagttctctcttttgccggcgccatttctcgtcggtaatagtaacttgtgctggcaaagtaccttaaatttgccggcaaatgttggcaatccaaccgccaaaaggtgagaattttcggcggttcgagtcaccttttgccaacgaacttaaatgcgttggcaaaagttaaaaaatatttattactttttgccggcgagtaaatgcgccgacaaaagtgttgaagaaaaggttgtcaaattccctcgtagtgaaaaaacatgcgcg

SEQ ID NO: 29460 - DNA, 2157 bp, Cannabis sativa
  modified_base (891)..(897): a, c, t, g, unknown or other
tagaaccaagattggatctaacagaattgtaacagaattgataactaacctacaactgaaagacaattgttagttaactaacaaaataagaaatgacaactgtaccctttaacactcccccgcaaactcagcattggatgaatccaaaatggtgagtttggttctgaacttgcaaaagctttggtttgagatatctttggttaggccatcagctaattggtttgtagcaggaacatgcttgacagtaatttggtgatttgggactttttcacgcacaaagtaaaggtccaattcaatatgttttgtgcgagcatgaagcactggatttgtagtgagcaaaacagtgcttaaattgtcacaccaaactgttggtggatgagataggtgaatgtgaagttctgaaaatagagattgaagccatgcgatttcagctacaacattggcaagacttctgaactcgacttcagttttgaatgaactttagcagtcgatttccacggataacagcgagaacctgttgtttccaaagaagaaagttgtgatcgttaagttttatggaaattgacttattaaagtatactggagagttctcatctgtatctctgttttgactttgattgccaatctgattgacaccattgctattgtcagctgttgatgctcttgttgcagcagttctaggacctatggttgccatattcgccaccagtggaggccactgctctgataccatgttacactacaagaaatgtcacttttaccagcgcagttcgcaaactgcactggcaaagaggtcaaagttttactagcgcacatttgtagtggctaaaatctaacttttaccagcacatttatgcgctgaaaaagtcatttttgccagcgcttttcatnnnnnnntggaaaaagttctaataccaacattgatttgccaaccctattttgccaacacatcacaagtaaattctattttaccagcgcaataccaacttttgccagcacatcaaaagtgacatttcttgtagtgttaggagtattgaaccttcttgacattgtagcatgagtaagaacaagataaaccagaaacagagaaaggagagagaaaggaaagagaaagaagaggacaaagatatgatgaaagagttcaatctttattattgatacagttgagatatatatacaagatacaatgatagtagaacaaagattggatctaacagtcttgtaacagaattgatagctaacctacaactgaaagacagttgttagttaactaacaaaacaagaaatgacaattgtaccctttaacatacctgatctgaaaaggaattttctttcaattggtgcttttgataaaaatggccatactattaagatagatgatggtatattgaaagttactaggggttcacgtgttattgttaaaggaaaacttagaaatggcatatattatcttgatgagcatactgttactggttctgcagcaccagtgatagacaaaactcttgaaaattgcattaaaatgtggcatcttaggttgggacatgtgagtgaaagaggattgatagaacttgacaagcaaggggtattcaaaggtggtctaaaggaaaagttagagttttgagaatcttgtgcattgggaaaaagttgcaaagtaaaattcccaaagggcatgcatacaaccactgagaaactgagttacacacattctgacctctgaggtccctctaatattcaaacattgggggtgcaaactacttcctcagtatcattgatgactactctaggaaggtctgggtgttcttgctgaaaaataagaatctagcttttgaaacttttgtcaattggagaaccataatagagaaacaaacagggtgttgcatcaaggttttgaggactgataatggccttgaattttgcttagatgagttcaagagttattgtacaagagaaggaattagaagacacaacacagttgtcaagaatccacaacaaaatacattagctgaaagaatgaatagaactcttcttgaaagattgagatgcatgttgaatagtgctggtttggaaagaaagttttggggagaagcactaaagacagcctgttatttaatcaacaggtgtccctcaacagcaatcaacttcaaaactccacaagaa

SEQ ID NO: 29461 - DNA, 1441 bp, Cannabis sativa
tcctccacgatcagaatgaacaactttgatgactctttctaattttttttcttaacctcatttcaaaaaattctgagtttatgaagggcgtcagatttttctttaattaaataggtgaatccataacgagaaaaatcatcgataaaagttataaaatacttgtttctgcacaacgtggtggaataaggtccactgatgtcagtgttggataatatctaataaagattgactacggttgacagtcttctttcttgttttagtcaattttccatgagtacaatcaacacaagtatcccaaccataagcatcaagaggaggaatttcagctttaattaatcattcaaactttacttcggaaatttgacttaatcttttgtgccataacaataaggatgttaccttaatataagatctcttacccacgttattcacaaaattgaaagaggaagctaaggaagtcaatgacaatttgaaaagaccatcaaagtaaaaaaagtttccaattagtcagagttaagcataatgtgaacatcatgattggcaaaataataagaatatccttgtttaaccaaaagcggaagcgaaactaagttacttttaaaagtaagaacattaaaagtattattgaagagaatcttaactctcaactgtaattcaagaataaatgtgtcaacttagataacaacatctccaacataagtgcccactttaagctttgactctctctcacttgacttcctgagatcccttagccccttgttgtgcttgcttcttttataatttttcttatcctttgttgtgcttgagttgagaattatagtgagaatattcattcattttttttttttttgtatttttacggaatttcatatagaaaccccgatagcaactaatggaacaacctaaatcgcacccaaaattcacatagcaacccacatagaaaatactagagaaactaccagagcaatccaaaccgtaactttaaaaaagacttaaaaaatagtatgtggaataatttttcaacaggtgatatataataatgaaaataattttaaatgatcgctacggaaaagtgttatacgaactatattggacttccattataaataaaagattttgtaattacatgtcaagctgacatatttgtacacctaacttctcatattcttcatagaaaaattaaatgaaaattagtaatgttaatttattttaaaatatctactgcaaagcgcgggttgttaactagttgcatataaatataatatacactatcatgtaaaataaaaacttctaacagacattgacactaagagggaaaagagattataatttatccgcatataaaaaaaaatactaaaggcccgtttggtacgcaggattggattggattatttatcccaccctgctggatgggataaataatcccagacatatgaggtta

SEQ ID NO: 29462 - DNA, 1430 bp, Cannabis sativa
ttactggtgagttagacttgtgtggctcagcaggtggacttcgaattgtgggatcaggtacaccagcaacagatgttgaagttgcaggcactggctcatttaatggaggagcaatagttggtgatatgcttgtgtaagcagcaggaacaacatatgtaggagaaaaagcaggtggtaagtgttctgaagtagtttctaaaggaacagtaaagaaactagtggtgggaaatagagtagctgggaaatcaagctcattaaaggtcacattccgtgcaacgtagactcggccattactatttctacatagatatcccttatgttgcagagaataaccaacaaaaatacatttctctgatctgatttccagcttgtgagactgatatggtctcaaatgaggaaagcatgagcacccaaatggttttaggaaactgtagtcaggaaccttgtgaaagagacattcatatggtgaaacatcatcaagaacagcagtaggcaatctgttaatgacataaacagagtgctgaaaagctaagcaccagtaagagaggtctaaaccagatgcagccagtaatgtcaatccaatttctgtaatatgtctgtgcttcctctcaactctcccatttcgctcatgatcatggggacaagggtgttggaactgaatcccatgttgggttagaaactttgcaaaagacctatactctcctccccaatcggactgaacagttttaatgggtaaattgaattgcttttcaacaagctttttaaattctaagaagatgggaaaggcttgggaattttaaacttaaaggaaaaatccaagtaaacctactgaaatcatcaatgaagatgatgtagtacctatgaccttcaagagaagtaatgtgagatggtccccacaagtctgtgtgcatcaactcaagaggttgagatgctctagaattggacaaaggataaggttgtttgtgactttttcccatctgacatgcttcacaaaattttaggtcttttaaactaggtgaaatgtttagtttggatagagttttggctaaaactctaggtgcaggatgacaaagtttaaagtgccaaagattaatattagctttattttgagtatacagacaggttggaagaaaagaagagtcatttttattgatttcattattgttacaagatgtatgagctggtgaaccagctgaagtacaaggagacaggtaacactttgactctaaaccagtagactcaagaggaaggctgtctgaagtggaggccattattgtggccatgtggcactggagtcccacatcaggagctgaggatgactgttggggaagcatgtaaagaccatttttaactctccctttgagtaggacattccctgtgagtttgtccttaacaaagcaacattttgaatgaaattcaagaaaaacgtt

SEQ ID NO: 29463 - DNA, 2034 bp, Cannabis sativa
atttttaaccctattataacaactcttaactaaactcacatcctgaagatctgtgcacgttcttttagctttctcgatgacgcagtctgccacgtcattgccgtatctagccatagcagccattatatcacttgaaaacaaataccctgtaatcatacataaaattaccaaaatgccactaaaccaacgatactatgaaattaccagactaaccctcctcctcacctgtgccatctagagccgtataaacggttcgtgggggcttggcgtagagtaagataagggtatctttggaattatcagtgatcacgttcttcagacaccacgacagcgcgtacgcactctcctcaccttcatcgacggccaccaggatttttcgctctttcgttggtatttcagccattgatcttctctgatctctaatccgacgggtacaattttttttgagaattattgttttcttttctgttgaagtaaatactaaatatgtaagaagaaatgttgttaaatgagtatttatagtgtgtgttgctggtaattgggggggttttggtgtattttttttttttaatttattttgttgattattttattataattttctgttggcggttttgtgggttttgggctttcttgtttgatggttttccaagacagtgggcccattatttatcttattaattattatttttttgagctcatgatttttgcttatgacatgtagcaaattatgtttctaaatttttaaggtcgttaaaaatactgttgaattattgagattatttaatttaaagatttttattcaattttaataaaaaaaactctaatatagtaaaaatacaaaaggtatgatttagtatatattaaagttcgagagacatgatttggtatcaaagtttgaggatcatagtttagtacataaacaatcactaaatggtacaattaaatgaaattaaacaaaagttcttaaatctaacaatttcaataattcaagtgaatttttaacataaaaaaaaaagtttaaagaacataatttagttcatacaaaaatcctaattatcctatttttttaaactcattatttattatttatgatattataataacactattatttcacaattatcttagagcttgtctcttctgccattgacacgtggcaccttcttatggtcgttgtgaatttacaattggcttgtaataatttatccaaatttgcattctcttttgaaaagatgcattatttatttgagaaaataatattatcttggtttattttattttatttatttttgctttattcttttccttattataatggaggaaattgacaagcactacttcatcataacgttaaaccatcttgatggtaaaaaatatactaaatttcatatacatatatataaatatattttgtaattatattctgataaaataatataaaaataattatcaaataaattaaatatttttgtaacaaaataataatgataatattgtaattaaaaatatgtatttaagtcatgacaaaaaaaaattatatttattaaagtcataataatattgttgtaaataaataaaaaaaagtatattaagagctacctcattagtatggtagattcgattgaattgtacttgactattagttaggatttgattgattcggttgaattatattaatactatattatgtttggtataatacaaactaaatagagtatttttattttttttttgcaataaatttattattttctccaatttttcttttggataataaagaataatgttaaataaattaatatttaaaaataaatgaaataaactatattcatacttatttttttgagtaataatttaatgaatgggtgtgatcacatacgtgtacaaaataataaataactcacacaaaaaaatgagacccacttaatggtatagttaaaaagccaacatcatataattatcctaaaatgacactttaagaaatattggcaaaattatgtcgagaccttgttagaggttgttaagttgtta

SEQ ID NO: 29464 - DNA, 921 bp, Cannabis sativa
tccctcccataaggacataccgtatggaacgaatcgtgggagacccaattcggacgcccaatctaaggtccaccataggaacccatcggaaacgatgaagctcgaagaaggataatttttccaggaaagattgatgaaacatgctttgccttgccttaatacatatattaatttgtatcttcttattagtatttgtacgtctcaacaactatataattaattaggaaacataccgcgcttcgagttcaattatttaaatgtttgttgtaaaaaaattaattaagttaccaatcttaatcttagatccattaagctaaatatatgtcattaatagagattttaaaaggtgttaaaatcttgtttgaacaaatacaatgattgtgctacttctcatcatttttttttatacattctttatgagctaaatatgattataatagtccattaacgatacaccttcaaaattattacactataacaatcaaacttaccacttaaggtcagtttggtacaattgtgttaagagaaaaacaactgtagctatgctgtaggaaaaaataactgtagcacaactgtaaaaaaaaattaagctaaatttttggtaaattataaattttaaattgttgggagttgttaagattatattatagtaataataataataataatattttaatctatttcattaaaattacaaatatatctataaaaaatatgttatataaattttttattttgcatatatttttaattattatttttctatagtataaatttatatgcatttgataaaaaaaacaatttaacattattaaattatatttttattaattatagtttataagaaactaagttgatattaataataaaaataaaaaatagaaatagaaatattttttaaaacaaaataaaaaataaaaa

SEQ ID NO: 29465 - DNA, 1237 bp, Cannabis sativa
atacctaatgagattgatttgtatttcacgtaaattaatatttaatataaatattaatttcctataacactaatttcacatattgactatagaatacatataaagatgttgtagaacgaaatatgactcaacctgttcaggaaactaacccctgttcatttcattcgtagagtaataaaaatgacttaatatggatctttttataaaacaaaacaacatttcaatttcatcatagtcttccatagaaaaactactataaaatttactatcacgtcggtcaaagagattgttcatcgtgttgactaacgtgaacagtatcatattaaatgtaattttcatttttaaaatgacacaaataatagatggtttgtgtcggttcgatatccttctctaattacacaaccgcaaaaggaaaaaactgaacaaaaaaatatataagattagcatcgttttaaaagcctcgtgaactttgtctctatcattttcaaactgatagtaaaaaggtttcgactgtgaccaacttaggttgagttactaggtttgttgctgctaaagtctaggttgtttgaatctattttgggagctctatttaggttggttttgtttgattttgttgagttagggttgttgttgtgagtgttgagcaagcttgagtttttgaacaaaaagtttgctcaacaatgaaaagtttggtttgtatgaccgcattttagaatatgaattagtaaaggcaattagcactaattattgatatttttataattatttatgaaattatttaattgtgcgtcccaatattaaaaatgggcattagagttctaatttcttaatttcagagattttattaaactctaggggcctgtttggtacgcaggattaatagactggattggactgaaaaagattggactggactggacaagattggattatgctgaaagtaatcatgtgtttggttaaagaatagactgaactaatttatttatttcaatttttttttaaaaaaaaacttaaataaaaataaaaatatataatattaaattaaaattttaatatataataataaataaataaaaatgaatgattcacagcaaaaaaataaaaataaaaataataattaaattataaaataacacaaaagaatatatgttatgtaatcaattatatatcataaatatataatagaatagtttatcatattttttatttaataaataattaaaataataaaataaaa

SEQ ID NO: 29466 - DNA, 3272 bp, Cannabis sativa
  modified_base (3235)..(3242): a, c, t, g, unknown or other
atactattcagatcactataggtgggatctgatatagctctcttaaggttacaaagcatgaaccagtaggcaggtctctaatgagagagaaatgaagccttggaggcatgtgaaagagagggagagaaagccatttaggcgtgtataagagagagaagaaaattagggtttcaaacttagagctttatggcttaaaatgagacttagggttttagggttgagttaaggttctttatataggagagcttaaatcctaactagtaaataaaataagagatatttacatattaaattaataaatacaaatgaccaaatttccccttaaaagtagatatttttgtagcatcttagtaaactttcaaggcccaacttgtagcttggcttgctgtccacggatgaaggtttcacattaatgtcttacaagggagaagctggtcggccatacacctgcaagatataggctggctggccatacaaagtctgtaggttgaggttgggccagccatgctcctgctaggatctggtaggacatgttcctaccaagatctggctggtggaggtgaccagcctttgaagatgaaggctaaccattggaggtggaggctagcctttggagatggtggccagcctttgcacaccttttccttgcagaggctagtctcccttggtcgaacggaagtttacttagtctaaaagtcaccttttggttagccagcttatgctgaaaccctggccaaccatacaagctcacttggtcggcctatagactccccttggccagacacacatgttggtacaactacttgatggctcgcttaagtctttttgcttgttgcttgatggttttgccataccttataaggagactttattttgctatcggcaaggttgtattccacatgtactctatccttgcttacgtggaaatgtcacgtcagatggaaaaaatttgggataataggatgcaattagagaggaaaaaaaatagagagcaaaagagacgtagaagacttttcaacaacgttttttgacgatttcttttcttctactttcttcttatgttcttatttgatctgtgtcaactcttataattgtaacgccctatcccacagggacgccacgtgtgagctttttataaaactattcttttactaatttatataactatacgaaaagtgtggctaattaaaaatttatagtcaaaacaaacacaatgtaatatcttgtccactgggtcgtggcaccacgactgatatgtacacagctgcaaaaacctcaaactcatggttgctcaacctttcccttccctttatctgtaccatttagcaaccgtgagtaacgtagactcagcaagaaaagtgattaaatccataaataatatgaaatccaattaataacaccataacagaatttacgcaaatataacacatcacacactaacatgcttatacattttcatattattaatcgcacaatctcggtgcttcataaagcatccttacaactcattatccacaatctatgtatgtcactatcgtttcccaatacagcgaatgataattaaaaacctaactgaagattctagagtaattactcataacggtaatgatcgtttccaaccatcggtcataacagaggcataacaaacacataaacaggatctcaattataatcgagactataacaatcataattgttaatcacttaaccgtaagtggtgcgtatcacttttcttacctcagtccagaaattaggtgtgcgggccgacctgagtggaaacagagctgggcgatcccagtccaatgtcacgacaaccagaattcaataaatgccttaaaccaaaactcggggaacaaaccctatttccaaaaccgaacaaaacttaacctccaacaacctgaaaatacgctttacaacacataaacaacctaaatcagatactaggtaccatctcgagccaaaacagaactcgaagaaaacctcggtaattccccctgcaggaaaaccagtcgaccagttctggtcaccagaaccaaccggtcgaacggttccggcagaccagaaaaccttgggttttcttccccaaactcaaaccaacacctaaccaatcctgtccaatagctccaaaaaagtttataaacatactaacaaggtatacgattcatcaattcacaacaattcttcaaatttcactatataccatgtttaaacctaaattggatcttaaaacccaatttttcttaactccactcataacagccagacatctaaacaaattgaaacttaactaaccttaaaatcaacatcacaacaaaccctaaacttagtctaagcatatagccccgaaaccctagaaaattaaaccaaaacaaaccttatacttatgtaattcaagggaaaagtttcaagatcttatcttgatgcttaaacagcttctaccccttgccaaatcaatccaaaagttgaagattgagctaaaagaatccctagtttgcagcctcttaggggttcgagtagcaagaagaaaggaggaaggtaagtgtggtgacttatttctaacttaattctaatctatatcttagttttataaaataaactttaacttcagcctccaaaccatataagacaaaacccacaccactcaaattgaccattttacccttcctaaacccttaaacttaaaatcaaatactagggtattttggtaatttctaactaatttgcaaaaactgacaacccaaaattttaaactagtcttgtatacttccaattcaatatatctcttattgtcgtgacattttgaccactctgtcaagttcccacggttgccagacccaaaatcctttaatttcaaaaagggtatctacgatacccacattatacaataaaatctctgtaattaataaattatgatttatttaatcatttattaaattcacaccaattaatttaagtaagataataatcttacttcattaccaggataattacatatttaataaaatatgcccaattaagtaccatattattttctgggatattacaactatcccctccttatagaaattttgtcctcaaaatttacctaaatagctcgggatactgctctcgcatctgcgaatctaactcccaagtcacctcttcaactttactgttctgccacagctatttaactagcagaattaggggtgttcgcagtgcgggtggtgcggtttttaaccattttttcaaaccnnnnnnnncatgcggtttttccaattttccaaactgca

SEQ ID NO: 29467 - DNA, 3926 bp, Cannabis sativa
tacctcacatctctagtggttctttctgatctattgttcattttgatcagcacagaaccaattcaagcaatcttgtaggctttgttatcacctaacaagactgaaccactgtcttcttcttaaaaactgcaaaagaaatgtttgttaggggtcatatgaaaagaacaacctgagtcaaggatccactcatcacaagtggcttgacttgatgcaacaagaacattagcagactaatatccatcaagaacacagactgcatctccagaatctttcttcttttctttgttgagttttgctttgaaagccctacactcatctctaaaatgatcttccttcttgcaatagtagcattgttttcctacctttgagtttgtactagaatttgatcttggtctatgaccattgctactccctttgaatggttacccttgttgcttgacttgtgattgccattcttggtatccttggactctcatttgcttcttccaaacattcctacaccatcgctgtccaatctttcttctaatttcttcttaatttcctttaaattaagaatagctttaaactctgacattttcaaggtttctttcccatatagtatggaatccacaaaatgttcataacattttgacaggtagcttaataatagaatcccttgatcctcatcctcgatcttgacacaaatgttgctgagatcaagaatgattctgttgaattcatcaagatagtttccgagattctttgtatcatccatcttcaaggtatacataacttcttcttcaagtagactttatttggcaaagacttcttcaaataaattgaagcaagtttctcctatataaccctattattgtcctttcatctgaaacttctctgaccacttcatctcccacgctcaaaagtatggcattgtgtgctttaatctcgatctccttgatcttctttttgtcttcacctagttctttcaattcttctttgtctatggcctaatgaatgccttgatgaaccagtagtgctttgattttaatcctctatagcccaaaatcattagtgcctgaaaaacttgtctacctcaaaacgtgttgaagccattgctgtctggtaatcttgatcttgtcaagatcttgaaatgttcttggtgaattcgaacttgatgctctgatactaattgttgaagacaactcgaccaagtacacaatgacaaacacaaaaatagagtataggaatgagcatagaaatgtggagcaaatgctatagcaattaaaatgaattgaataaaacaataacaataaatgggagatagattttacatggttcaaataggaataacaacttgtaattctgcctactccacagccagaaacaaccctttgtgcattaatctttattgataaagaaagtacactagaaacttacaccaagaactgtcaagaatagttcataaacactcgaatgaagctatgctttaattataggaggcacacatctctgtcactctcagttttggtttctctctttctttttcttaatctctctcagtagcacacactgagtttctggatgttgagctcgattggagaggatccctttcatagaacttggacaaagggtgttgaagtcgtaactgtcataacaaaatgttagttatgacaattatgaaatgtctgaacttgatatttcgcaagattcagtgaatatatgggcaattcaaatgtgaggcgaaaaaataataacaataagattttcagtgatacataacaacatttagaggtgtcttcatgtaaatgattagtcatattttataataattatcaaattaatttatgtaggatctaatattaattataataatttaataggacacatttgtgaagtctcctaaaatacattctaattagatgtattaatgatctaatatttagaaaaacgaatagtacatttttttttgaaacagaaacgaatagtacaataacaaacaaaaaaacaggactttaatttgcctgtcccactttcaataattacactttattatacatcttaaaagataatgataatgtaagacaaatattcatttacgcatcaaccacctaccccacccacccaattgcagaaacattaattcaaagtttatgcatagtactatatgtgacataaatttgtggttaattagaatttttgtctcgaattttgatatgtatcaatttatgtttgtttttggaatttttaagttcgttcaaaattttgcatgaattattaaaattatttgatttaagaatttttatctaattttagtaaagagagtctaatatggataaaagctcgagaatataatttagtacatgttaaaatttgcggggtataatttaatagatattaaaaagctccaatttcttttgttttttttttttttctaattcttctgcctcactcgtatttctatatttttctttaattcttctgcctcactctttgtgtttatctttgtcatgttattattattttattttattataagaaaaaacatttttctactatatatcttaacttcaaaaagaaattttagctatatagataatactatcacattctactttttaaaatgattattttaagatgcataatatatatatgtattttgttatcattactagcaaaaataattgaaattaaaaggagctttcaatttattttataatttattcacaattaaataactaaattataaacttaaacaaaatttaatataataattaattttatagaaaagtatatgaataacttattatttcatatttaaagttgtatgatatatatctctaaataagtttattttatgaaacaatttcaaaattattttaaaagacttgtcaggaaattaatggtaaatgttatggaatcaattacataagaaaaacttagttttaggtaacactatgttgtcttttttttttttgagatgcatttacgtatctatttttcgcaacatttttattaccttaaaaattattaattgattagtaaaaattcgtatatataataatataattaattttattatgtttaagatattatttagtaattttataaatttttatattaacatattaaaattgatttattaaataaatttgttattagtgtagcgtatggtaatttttaaatataacataacaaaaaattttatatagtaatttatgatgttacctaatatgttgaattttattaagtttaaagttttattattttttgctaacaaaaaaatataataaacaaaaaattacttttaatgtagacggtaaaaaaatatatgcttcccacatatgaatataattattttatatttttttaatagaaagactatatttcaagatattttatcttaacatatttggttaattatttagttaactttaaaattatgattttatatttagatgtttaggttatatatattatattatttttttgtttaagattctatgatgttattttttagcatccttttttttttttttttttgaatattttagcatccgttttgttagttttaaacataattaaagatcaaataagttataataaagtataaaaaattattataaattttattagcaaaattagtgtagatttttttttaatgtaactgatacaatgtttaagcaagatactatttaggatctagttaattagttttcttgtaagttattttagaatcccattaaaattaatttatcaaataaatttaattggaatacaattttgtaacctttgaatattaaatggtaaaaagtaaacgaagaagttgtttgatctactgaattttgtaacctttaatttttaatttctatttttcaactctttgaatattaagaatttgctgctttatttagaatttaatcaatttaattgtcaaaaaaaaaaaaaaa

SEQ ID NO: 29468 - DNA, 3467 bp, Cannabis sativa
  modified_base (1726)..(1732): a, c, t, g, unknown or other
tctatgtccttttggattgacagttgtgaattgaccgccaatctaattgaattgcaactatctgattttggacataatccttggaatagattttctatcttagtatggggcaacgatcgactataaacgaaagatggtggtgtttaagcttgatagtgctaaccaacggtgtttgtgggtaaggttcagggggcacgaataccaagaataacattgttgaaagctaaggacctgatgagcagaggttgtctgggatttatagtcactgcagtggataccagccaacctgtgacatcagggtctgaagttctcaacctgagttagggggtcttcactactagtgtacttgcaaatgagcattttgaattttgctggaatggggaggtcattgatcatttggaagaaagtagaccctctcctttctagttccaagtcaatgagttttggtgtagtaaggtccttgactagtcgggtcaacttgtccaaccaagcctagatcaccagatttgtggctgcttggggttgaacgatattaacgtcaacattctcttggtttctttgaaccgactcaggtgaatttagtatgttgaaactgcatttatccatatttctactgagggcatctcgaaggtctctaccccgttcttggccttcgttttacattttgactgtcaacccttccatcgactgggggtggtgcttggttatctctacccctttggggccgattcttaggttggtgttacctattaggggcatacaaccctcctgcttgataagccccagctcatgattttgttggttgttggtccgacttttaccttcatcatcgccatgaccgtcggggtagtttggatgataatcactattgactttggggtcttcccttctccccttggacctactatttctcaagctatcatcaccctctcttggttggccacattggtcgcggggttgccactccctatgttggggtgtccttctactgtttttaccacggtcaccattgttgttcgaggagtttcctccaccactccaccttaaacggacattatgggagtcatcatgtcccatataatgacgagtaggacttgttcatcggcaaggagtggtcgattattgttacagggaaccctgttggaggggtgactcctagccttttcttgattgcttgggcgctcttcaggtccatagattacccctttcggtggcactgtcaatcgtgccgtctcctgtggtggtggcggtggtggtatgcccaacagctgtctgcccagcggcagtagtttggccagttttcccatgaccaacatcagtctgagaagtggcatgggtggtggctgcaccaccgttccccagacgagggattcattctccattgttgtcggcgagattgcttgctgatagaacttgctgggtgttatccatctccttgtcaggtcgttcatgagatcttcatgttaacaccatttttttcggtgaaaaacttcaagattttggttgaagctctcaatgaaagcgccaaaatgttgactggatttttaaccaaccgacgcggagttgtaataaatgagatttaaactaaaattatttcaataaatgcaattaatgacactcgaatttgtaataaatataaagaaagacaccaaaatttaaagatgttcggccccagatgtcggtaatagtttactccccttgtgttttattaatctgagttgcaaannnnnnnaacaggctcttgattgcaaagaatgaaaaagtatttattttttgtaagtgctcaaaattttggatccccttcctaggtcatggatgaccctttatataggggaaagggtcggtgcttctcgctttaggagacgtgaccaacgcgaagctacctcaactgtctccttaatttttggaggtatttgatgtaacaccctgtccaacagggacgccacgtgtgtgcttttataaaattatcttttactgatttaaataattataccaaaagtgtggttaattaaaattttgcaatcaaaataaacacatattttttttataaggaataagtactaatctttacgaggaccccttaatacaaaatatttacatttggtttcaaaaatgctttacaaagtacaattatacttcaaaatacagtcaaacaggttatcatgtccactgggtcgttgcaccgcggcagatatgtatattgctgcgacgacctcaaactcatggcagctcaactttggccttccctttaactgcaccatttagcacccgtgagtcatagagactcagaaagaaaagtgaacaaatcaatagtcaatataacattcatctattcaatttaatatcaacatgattaaacatttacacaatatcgtaaacacaatcttggtaatttataaagtacccttaccactagttaaccacgagctgtatatgtcactttcgttgcccgataaagtaaacgataaataagaaacctattcgcgatttgaggagtaattactcataacagtaatgatcatttctaaccctcggtcataaattaggctaagcactcattattcaagctctcgatcataatcgagactacaaccatacaattgttaatcacttaaccctaagtaatgtataacacttttcttacctcaatccaggaatcaagtgtacgggccaaccttagtggaattacgctcgacgatcttgaatcctatgtcacaacaataaaaaatcgataaacaacatatccaatcttcgaaagcaaaccctaatctctgcaactgggcatgaaacttcctactggtttagaaaattcaaatatcactaaaataccctaatctaagctctaagagacacccaaaatcaaaaccggttttgaggctaaaactagagttttcccctgctagcaaaaccggttgactggtttcaatgcatgtgaaaccggtaaactggtttttcaatttccagaaaagagagacttgtgtttttgcatcaaaacccaaccaaaccacaaaggacctattcaaacaccccatcacacttcaaaacaataaatacgatgtatctcaagcattaatttacaacaattcttccataaactccaaattgcatagtcaaatgaaattaaactaaataatcaccatctaagtcaaattaaagcaagcagacactaaaccacttaattgaaacacccaaaccctaaaacaaacctataaacataatcctacctcaacatatcatttcagccccaaattcttaataccctaaccaacaactaatcctaacttaagaaaatcaaagaagtaagcatcaagaacttacctcaaccaatagggacaacaactagggttgtttcttagctagattttggtttgaattgagatgagcaagctgcctcctgagttccttctagggccaaaaaagaggggagagaaagagctgcaccgagttattcctaagtttgatcatta

SEQ ID NO: 29469 - DNA, 2357 bp, Cannabis sativa
tcccaattcttaggaccacatggctaacggctatgacagcaaatattgacagcacaacagtaggtaattaggattaattcattttcttaacaattatcattaaacctaaaaaataatgttaatcaacattcatcatctccccaaataggagtttagttcataacatccatcatcaaatccataattaaaattaacacaggaaataacatagataaattaagagaagagaaaagaattggttgaggcaattgatctgggtcgcccaagccgctcttgaagtctcctcctttgtttctagggctccaaatctgaataatcctcacttttcacgaactccttctaattaaaccaagccttctctttaaaatttgtgaaattacaaaattgcccaaaaatcttgtcattaaggctttcccgcggcgaaggaatatgctcatcgcagcgaaggattttcaacaaaatggcataacattctaccaattccatcgcagtgaaggattttgcccgtcgcggcgggattaggcataaaagttcattgtgcattttcttttcaattctttcatctcttgtccatgattcttgtaaatactttctttaaaaatttgggaacctaaaacaaaagaatcaagcataaaatagccttaaaactagaaacaaaaagcaaaaactacccgaaaacacgacccgaaacttagactaaaattagcctaacagtagagagtcgtggcaaatgctcgtaggtggcatgacagagcctttccttatgtggatgatgagcttcaagaggttgatgacactaagctagaaaggctctcttttacccatatttgagatttagctatgagagttgcacacttaactttgctcagttttttggcattattataggcttttcggccatagttgccattgcatgaagttggccagccaagttgtgtctttgaggggctgctcggccttggcaacttgatggaaggggtggtcggccaatattgtttcctgacactaatttttaccctattttgttttcaagccattatgaagctgagtttctcgcatggaaaccccatagggtcttcaagtgctcttcgggagcagataaataccttggagactgacctcctagcaaagggcaaggctttggctgacatggaggcttttggcctacagaacatgaacatgatttcatgtttggagaccatgctcagcagcaaaaactaggagaacaccatgcaagctgctgacatctccatgttggagactaacctcactaggtgttaagagaagctaaggacagccctcgatggccagcaatccatcaaggatgagtacattggcttatcttcggaactcatttacaagttcaagctacgcaaccccaatgttgatcttttatacatgggcaatacttctttcttgaagagcacactggcccaaggaagagcgttgttcgagagcaagttagaagcgaccagaccactgtccagccagaggggtcatcctccgggcacttcaatgagaagatggctagcccacctgctaaggaggtggtcggccagcctatggaggctatggccggcccacactccatcgatccaaactttgcagctttttattcagccccatttgcacctgcacacacgtagattcagcttattagttttttagcattatggttttatagtatagatagtgttttcatgttctgtatggcctaagggccttttactttttgaacactacttattttcaacctcaagactttcaagtttgtactcttggcctataggcactctgtttttgaacattactattgtttagccctgttactttttatcatggattgggtgaccaaccaggcggtcttaaatcctggctatcttcttatggcattgacatgtaaatatccagatttacttttctttatgccaagtcaaagtatgcctacacctgacttagaggcaggtttagtagcttaatttaagcattaaaatttctctgcataaattctctgtgctagttcaatgcattatactgtgtgggtgtcccccaagtgagcacccagacttatggtcgcttggtcacttacaattcatctagtttcatagatcttacatgggaattttctttgggtgatacctattgtgtgcatgtggaactaaaaaataactttaagaaggtaatcttgttatcaagtggtttagacacaataattcgaacataaacattgtttttattcattaattggtgtttgttgctgtgcaacttatatatattgaatctacaagcttacataacaaagtttttcttctagatatcaaatggctaccctgcttgacttgcatagcagaggccac

SEQ ID NO: 29470 - DNA, 1244 bp, Cannabis sativa
ttcttaacatattatggagattttgcttacagaaagtactgtattgaattgtaccagtgtatttcagtattcatacacagaattatcatattgtattctttaattcctgaaccaaacctttcttttgaagaatgaaaaaacaaatctgacccagacataaacatcttggcttttttttttttttttttccatcctaacaaaattgctgtatttatatttaaaaaattgattcaaaattcctaacataaatcaaaatcaatcctaacctagaaaaaaatccctttctgcatatccttctctcactttgtctccttcactcgcagctgtcacagctccctctcccttttctatcaattccagcctcgtggatgactcccttttccgtcaattctgtgattaaatttttgaaagacgttaagaagattgggtaagtttagaaattacaagatgggttatgccctagaatttaccacagaccctaaaacaatatgattggttatctcacaactccaacatcaattcgaagttaaagaagaacttacgtgttgaagatgaaggttttaaaacaagaaatcgacagtaccacaattggaatgcaatccaagcgccaaagccttgaaccaaaagtacaaacctgctcgattaatatcgatgtcagcttgaagtccctgtgttgagatttgagggaggtgcaccttggtattgagattggcatctcataacctatcaaattcaattagaatttaacttttaacattcaatccaattcaattgtaattagttatttaattttttataattagattatattagatcggttcaatttgattgaattagattaaatgttgtatgtccctagttgtgagtatagacaacataatgagctactaattatagctaatcgttttccctccaataatgactcttttctattgtctttttattatgttaagaacatctctaatgttatattattttactaaattgttgtagaattattacataatgacacattatattatgtacgaaattgatgtatactaaattctacatcattaatggtgttaaattttaaatctataccaatttagtgaatttttttttttattctaactcttattttattttattttagaaaataatcttacattttagttcttaaattaaaattaatccaaaaaataacaatggattcaaaatagggattatttcacaaaaacataaaaacaacaaaaaaattataa

SEQ ID NO: 29471 - DNA, 3882 bp, Cannabis sativa
  modified_base (1133)..(1136): a, c, t, g, unknown or other
  modified_base (3042)..(3042): a, c, t, g, unknown or other
acactcaatctgggtatgtccatgatccttgtaagtaacataaaattttctctagtgctacacaatgatgaattgttggagaagacataaactggttaatgacactaattggaaatgtaatatctggacgagtcacagttagataatacaactttccaaccaacctgcaatatttctcatgatcttcaaatggttccccatcacgtgtaagatgcacaactggattcattggagcattacaaggctttgctatcaatttgttgtctcagttatcacatcaagtacatacttcctttgagatagaaaaatactttgtttactctgagtaactttaatacccaagaaatacttgagctcccctaaatctttcgtgtgaaactgatcatgaatgaaagacttaagggatgagatgtctttagtattatttccagtaataacgatgtcatcaatatacaccactaacaaaatgataccagcagttgatcttttataaaacacagaatgatctgacttacttttcaacaaattaaatttcctaacggcctgactgaacttatcaaaccaagcacaagggttttgtttcaatccatataaatatttgtaaagacaacaaacttgccctaactccccttgagcaacaaacctaggaggttgctccatatatacttcttcctcaagttctccatgaagaaaagtatttttaatatcaagctgatgcataggtcaatgatgagtagctgccatggaaatgaacagtcaaacagatgtgagtttagcaacaggagaaaaagtatcacaatagtccactccacaagtttgagcataacccttggcaacaagacgggcctttaagcgagcaagtgttccatcttgattgaatttaaccgtaaacacccatttgcaccctatggcccattttcctaaaggtaaattaatcaagatccaactaccatttgcaactaaagcattcatctcttctatcattacagtaagccaaccgggatgagacattgcttcacgaacatttttagaaatagtgatagaatcaagagaagcaataaaagagcaagaagaataggagagatgattataagaaataaaagaagaaataagaaaagtacattggtgtttannnntacgtagtgcaatgggaagatcatatttaagtttcagatctaatgacgaagatgcaggtgcaagagataaaataggaggtggaggaaggggaagcctggtgtacactataggaggccgagggagtggtggaggtggtggaggtgtagacattgtgggagttatgagtgaggcaagtgaaggaacaagagactcatcagaacatgtatcaggcaaagaagatgtgacaaaatataccaacaaatcatcattcttcccctcatgagttggagtagttgaagatgaaaaataaggtgtattttctataatggtaacatcaatagaaataagatatttatttgacaggataacacctataccctttctgaagacgagaataacaaagaaagatatactttagcgccttagggtctgatttggtgacagatggatggatatcacgagcaatacaaatactgccaaatactcgaggagcaactaaaaatgtaattaacgcttacttttaatatgaaaattagcagataattaggatttaattaagaattataatttttttagtaattatgtaattatggagatatgtttaaattctaggtgtgttgataatgttataagtaaaatgtcattatttttatattttatgtccggtaacagtagaatgcgatgtatggcctatagagtcactttttataatttaatatttttaaaatagcggagcattatagatagatatttggtatgtcgggattgtttatggttattaggtttgaccaaaataaccctaagaggcaagttacttctaggtgaagaaaagggtaaattggtaattaatctttgttttgtctctagtagaatgtggattagtgataatccttcgatactattaattttttttctaaaataagctgaataagaaattagatttatttttattgttagaaaatttagaaaattggattttttttttcaaactctctttctctctctcttgggtcggccacacctggaaccttaaaagcttgagtttttcatccattttcttagcaattcaaagggttttctactgggaattcttagggattgaaggaagcagatcttggtaagctagtttcccttcttttcctttgaattttatggttcttgagattaggttttcatgcaattttgagttaggttactgtaggaattaatttagtttgtatctatttcctgagattgatttgaagttatttgagctgtttaagcttgtgtttgttgtttgtgttgagtttggacaaagtttgagctttagagctcaaactttcctcttcaatggtgaattctgtttctaaggtttatacctgtgtttattacttggaatatgttcattgtggcttaattagctattctgaaagggttgattcgatttgggttagaattaagttgttagtggggtttttagggtttcgtgcagggaactggttagccggtttaggggatcctgtagaatcgactagccgttttccaaggtagaatcttaagaaccagttttccaaattaggaatccggtttatcggttatagcagttttggaaccctagtttttcatgttttagcgatacgtaggatattgccatgcaatccatcgataaggaaacttttagttttaatttaagtccccaaaaagtgatttagcgtgtcacttatcaactttatgaatgttatgacttagaggcctgtaaattatcaagcagcagttccactcaggttgatcgacacacctgaatttcggatcgaggtaagatcaatataataatgcaatatcccgaaaacctaattatgaataattaggattttattatatagtatgggttaattaagtaataatgagtaggattatgatcctgctaacttaatttagcataaattntaaattttgctataagtggataaataatttattaattacggagatttaattaaaatatgtggatataatttaagttatttataaaataaaaatatttttaggtttgtgacccagaagacccgataagtggataaataagcataatttgttaattgcagagatttatttgaaatgcgtggatataatatgagttatttgtgaaacaaaaaatatttttaggttcagtgatcctgaagacccgattggaggccaaaaatatcacaacagttttagttagaaatattgatgggattattaagataaattgatttaagaaataccaggttattttggggtactcatgttagaattctttatcactcattaaatatgtaatatcatgatttaattctatagataaacatattacatattattagtatgaaaaacatagatagatctaaagaatacatttgttgattcaaaaagaagaagccaaatagcgaaagcgtgccttaatccatacaaagtgatgatcttaatccatcttgtagagatgatctttgtggtgattttgggtaatgatcttccaagaaaacaagacttagggttttctaattttctctcttgatgggggaagatgagaatagaaattggctcttatttcttggggaccactaccaatttataacctcatagctaggttattaattttaagtatttctaatttagcccctcaattaaattagaaatatcggtatctacacatttagcccatgacactttaataccaaatgacccacaattactaaaatgatcactttattttgggccaagcttcaaatagcaatacactaatat

SEQ ID NO: 29472 - DNA, 1443 bp, Cannabis sativa
tctacctccacgcggcattgctccactaggctttcgcccattgcaaaaaattcccctctaatgcctcccgtaagagtttgggtcgtgtcttagtcctagtgtggttatataatacttcactttatttatattattattcttttccttttaaaatagatatgaatttgagaattattattgattattcgttagcagaatgaaaataattaggggaagaagggcccgtgggtaatgaatgggaagataagaagggcgcacgggtaatgaatgggaagatcgaaaagttagaaggaaagaattttttggttagacgcatagagttagctaagcattccagtagtcctagccgtaaacgatggatactaggcaatgtgcgtatcgacccgtgcaatgttgtagctaacgcgttaagtatcccgcctgaggaatacgttcgcaagaatgaaactcaaaggaattgacgggggtctacacaagcagtggagcatgtggtttaattcgatgcaaagcgaagaaccttaccagagcttgacatgccacgaatcctcttgaaagagaagggtgcattcgggaatgcagttttgaattgatgtcgatttcttttttggtaacctagtgtattcaaatcttaattcaaaattcctacaagtaactaatttatgttttactaagagacatcccagtgttgattgttatttagtcattcaaaggtcttttttattttttattactttaaaattttaataggagaaaaaaatatattctttattttatctgtattttgtttattcctacgaaataccaaatgaagtagaatgattttagaaaggatataatgaaattttgtaattggttctttccatataaacaattcttttatttgattgataaaaacaacaatcaattaattataacaaatagaaaaaaattgaaaactaaataacattctatttagttataataataataaaaaataaaaaaagtattcttattcaaaacgcccgtaatctttataataataaaaaaaataaaaaaaatattctcattcaaaacgcccatctttaaccgattttgcgcttcaatatgattaccaagaataaacactcttgattaaatataagtaaaatttatatatagtgctcttaattttttttagtattccttcttatctaataaactaatttctttatcaaaaaatagatttttttatcaaaaaactaataatgaaaactgattttgatcataaaaaaataaaatctatatataagttttaggtttttttatggtattctttcttgtctatgtcttattgcatgacatatatatcaaaactttttttttccatattttttgtaaatatatatatatgggtatgcttttaatgggtattacccatgtatgagtattttatttttgaccattggatcaaatatctaatggttg

SEQ ID NO: 29473 - DNA, 1195 bp, Cannabis sativa
tctctagcttcgcctcaatgcctcgagagctaactatgaaacccatgaatttccctgaagaaactccaaaagtgcatttctttggatttagtttcattccatattgctcgataatggaaaaagcttcttctaaatcttcgtgatggctcatggaagtctttgatttcacaaacatatcatcaacgtatactttcatgttcttccctagtaaattcttgaacatttttttaaccattcattggtaggtagctccgacgttcttcaatccaaagggcatgaccttgtagcaatagatacatttgtcagtttgaaagcttgtatgctcttagtcaaccacatacattttgattttattgtaaccagagtatgcatctatgaagcttaagagttcataccccaaagttgcattgaccatttgatcaattaacaaaagtggaaagcagtcctttggacaagctttgtttagatttgtgaaatctatacacattctccatgtcccattaggctttgggaccaaaattggattggctagcaatatgggatatagggcttccctgaggaaatcaatgttggttaacttatttacttttgccttcactactaccaatctcactggatctaagagtatctgcttctattgaactggatcagccttaggatctatgttcagggcatgacaaattactcgaggattgatctagtcatgtcaaaatgactccaggcctgtacatcaccgtttgccttaactgtggagacaatatttctttcgctgtcgaaggtaggttttttcccactctgatgactttagtgggatcttcatcattaattcatacttcttctacctcttccataagctccattgctcgttccatgcctacccttagatctagttcgtcttcttcttggaccacccctagtgctggctgggaagatgggctagcttctgctacatttccttcatggaccatgagaaaagtgttggttgacacattgtagtagcttctagcactcttctagttgcctctaatcattccaatgcttctggtatctctagggaattttaggtataagtagtagatggatgtcaccgctccaaaatcaaccaaaaaatggtcgtcccataagaacattgtaagctattgggcaatcaactactacataggtgctgttcttgaaagaggacaccacattgctt

SEQ ID NO: 29474 - DNA, 2991 bp, Cannabis sativa
atcagcgtcggtagcgaattttgcgaaaaccgacgttgaaagggcttaaaaaccgcctctaaagggggtttttgtagtagtgcaaggagcaagattcttaggtttattttttcttttcttttttttttttataaaaataaattcatagaaaactcagaatccagcaagcaacaacgaaatactcatatactccactagttctaggcatgcaatagcaaagtaaaaaaagaattcaaaagaaaataacttactcactattgcgtcgagaataaatttttctgggtagaaggtctggacaaagaacgaagctcacgcagcttgaagaacaacttttccttttttcctaagctttgaagagtgaagaactggtgaaagtttgggatttggaaattcctcttatagacttactaaagggtagtctcggtgtgcaattgaaattaggttttccccccaaaaaatgccaaaatgtagaatcatttaaggtgtgggggtgtgcaaccctcaaaagacgtttcccatttatcggttttttaataagcattaaaggtagagatttaaagagactaaagaagatagacacgtctcaagtagggcaaatatcatatccagtaaggcatgtgaaccctaaaacgtgttaccaacaatgcgatgtgatgtggcattcaacaaggtacacatattagtatgttttcacctggacccagtatacgtactagttcaagtttccatccagaacaattcagagccaaacgaattaagtttagttcttcagcaggtattatccaagcaggttcaatgccttacacttctccaagcaaatcacagacacctatctgagttccattctccgtgcagaagaacgtagtaattgaagatctccaaagatatttcccttaaatatttcctcagttatagcttaattagaatccctgttttaatggtattaattttatctgattaatatttagtttcccgaattcttcacttatattcacgaaacattccatcatgtattttctctatagtggagtgggatcattttttgaactttttaaagagttattatgctgctaaaatatttgtaagctttcttgagaaaactcacttggctggacccttgtgatcttaataattctttaagtaatacaactaaaagaggagtatgttattactattattacgaggttgaacctctataaatttcctgtgttcttattactttattattattatttaatcattcaatttgatcgctttaaagacataatgttattagttaaaagcaagttcaataagttataaacaatatatattttggagaagtgcccatatttttatttaatttaaagtttgaatattagttataactccaaaaaaaaaatagaatttcaagttcttaaatataattcaacatactataatacaattaattagcatatattgaagaacataaattaaatctccataaaaaataaaaaataaactataaatcaaatatatataatattagctaaaattaaagagtataatattgtatgttagtgtgtatattctagtgtttccatgtgttagggattttaagttaagactaagctacttttgaattacaactgttaaacttttttgttgtgttttgaaaatattcttgaacagttagtttaggaaacaggactgtaatgaaatgaaatgcttgatcaatcaaatctgatcaagtgttctgatatttatatagctgagagtttacaacctaaaaaccaggagaaataactaacaaaacaagaaacaaaaaatgtctgataacaaacaaataacagactttatgaaagataaaaacagaacacttgtaacaacatttaaaagtaataacagacagcagaacctaactaactgacaccaactaagtcaactaatatcccccctcaaacgaaagggagttggaactacattgagtttggactttagatactaaaaatgatcggtggtgagggcctttgttaggacatcagcaacttgatcgagagatggaacatagtggacatggagttggtgagcaacgatgagatcacgaacaaaatgcatatcgatttcaatatgtttactgcgggcgtggaacactgggtttgctgctagtgcagcagcactctggttgtcgaccaagatgattggaggttggtgtaaggagatatgcagttccgataagagctataccagccactttatttctgatgtggtgttggccaaagctcggaattcgctcttagtactggatcgagccacaacggcttattttttggcagagcaggaacttaaattttcaccaagaaagatggtgtagccaccagtggatcgtcgatcgtctgggcagcttgcccaatcagcattagagtagccatagagatttaggagtggtgctggtttgatgagaagaccctctattatggtgccttttaaatacctcaatagccgttttgtggctttccagtgagttgtggttggggcatggagaaattgacttaacttgttgattataaacgcaacatcgggccttgttaaggtgagatattggagagcgccaattgtgctcctatacaaatgaatatctgggaagggatctccaatggtaagagataatttgtgagttgaacttgttggatttgagctaggttttacaccatctagatgtaattcgaccaacaagtctgtgatatacttggactgagagagatacgtgccaactgagtttcgaaccacttcgacaccttagaaatagtgttggaggcttaagtctttgagggagaagtgaagattaagatcatcgataagcttctgcttgaggctgctgttaggactagtgataatgagatcatcaatgtagaccagtagtaggatgatgttggatccggaaccagaaacaaaaagagagttgtttgatttggattcagtaaatccccattgtagcaatgtccatttaagcttgtcgttccatgcccg

SEQ ID NO: 29475 - DNA, 1407 bp, Cannabis sativa
ttgttgaattcacccactcaacaaaaatgcacaacaagaaaaaaaaaatagggagttcacaaaacctaatattttctacaagcatagcaaaaatagttaactacgcctatctcagtcaacattcagatcactctaacgaggacaaaacctaaacaccgccagacatagcaaaaatacaaacaaaaataggccaaacataccaaagcatgcataccaagtaattcatctacatagaacctactcactccaagttaagttgcaaatgtaaaagggtaaggaagtacttacatgttgaaggcgaaggttctgaaatggagacttgtatgtcgtgctcatgccgatttaaaggcacaacgggaaggacttgatcgagatgccagagtctggactgaagggtacaagcatgatctagaagttcatcaacgtttgtttggaaacctagtgatctcagtatcctgagggatctatgttgagctcgggggtggtgcatctagatttaatcgtgaacatatttgaaaaagaaggtgaaggaactcgtttatgtaaatggacattcaccagaggcaattttggtttttttctccattcttaaacattttcctctcctctaaaatattcaaactcagaaggcaaaataagcaaaagtggtgaacagttgatttttaccgtatttatagacgagttggcgatccgcgtactcctgatccaatggctcaaattgtgccccagaaaatacaatgctatctgatggtatgggtatttgaagcattatcattaaatgccttatgtaggatcaaggtaatttaaattatgacactcgcttgagaacgctcactaacatgcccagtcgtcatcttgctaacttaggcctcacgtattttcccaacacgtgtaacctgcacggaccataaaatcattgtcacatgtaatctatttccattaagtgaagagttcattgccattcacaactcaaagatgtagaattcaaaaggtcaacgctttgcaacaccccgtgtgtcctcacaaatcttgaagggagactgtaagcctctgcaactctcaagttctagaagcttaggggtaaatgttattcgtatttttggaaaatggacatgtatacttcaaagacccaattcagtcaatgcaggaccaaccacgaggccattcaagataatggctacactcattgtaagagtcgatctgcaatttttgattggaaacaaggcgaattagcactagagtcgggtcgctaggggttcggaagggtgtcttacccagaagaaggaaaaaaaaaaacatactcttatcttttccaaaaatatgactgaaaactttaaaaactaaagaaagaaagaaaaaaaagatgaagaagaagaactgaacaataaatgaaaaaaaaaaaaaaaa

SEQ ID NO: 29476 - DNA, 979 bp, Cannabis sativa
tgtataattatcttattaagctgagaattgcagaatgacttggtccacggttggggtcttgattttgctcttagaaaatgtgttgaggtaagtcacctacctaaatttatttatttatttttcatttatttgtaatatgacccttcaatgaattattaatatcttcttcaaacagcctgcccatgagaaaataggagttgtagattctcaatggattcttcaccaaactgttccctcactcgggagccaggtaaatatccatgatcaactgctctttcctttcatttgttgataatctaaccattcaaggaaatacttactggtttcctggcttttatatagggtgaatcatataatgggaaggcaccatggcaaggggtacatatgattatagacttgttttgttttttcttacttttcacaaaatttgttcaggaaataagttgttggatttgacttataaataatatttaatggtattttgcaggtgagagagaggtgcagaaaggagtggacaatgtttcaaagtcgtttttcaaatgcagaaaaaaagtacttcaaatcacagggggttgatccttcaatagctcattagggaacagaacagaaataactggagtggactactgtacacaatcaccaccactataatgcttagcctttttgtctctttcttttttccttttgtctttacatttaatttgtagaaccccattatcaatattattaatttcttttactacatatatttttggaaaagaaaaaagtatattccttctgagttccggtgatactggaaatagggtactatgacatgatgtaacaatgtcacttccatcaatgactgttaccaccaccattactattcatagcatatatatatataaaactccaatcactggtttaccctcatcaatgataacatggtttaccctcatcaatgataacatggaaaaagaaatatcttccatttttggaa

SEQ ID NO: 29477 - DNA, 1530 bp, Cannabis sativa
  modified_base (215)..(218): a, c, t, g, unknown or other
tttgaaaaaaaaaatcactttcaaaattttttaaacaattttttttaattaatatttttgactccgatcccaacctaaaccttgagactcgaattgactccatccctagtcccgaactcggaccacggccccaaccccagaaccagacttagacccgacttaaataaaataaaaataaaagttataaaatgcatttttattttttgtttttaaannnnaaaaataaaaatagttataaaatacatttttattttcaaaaacacaaatttatttttatttttataattaaaatattaaaaaataaaagtattaccaagtctcatcaccttgtattattacacacaaatcacaataatttgtaatattgattattgaatttatcttgtgtggtccttaaggtaggtacaattttaacacttgtttcaaaaacgtggtggaaggtctgtctaaatgtactcatcttaacaaaatgattaaacagctggaaggtttgatatctaaattctcaactcaaaaacatacattatattacatataataatatatatatattgttgattatcatcattagctataagtattaattactaattagtagtcatttaagtttaaactattttatatacaaatattattgaaggagataaagaaatatctaggttggcaaaatgaatttgatttgatatataaatactatatttaatatattttttagagaatgaaatttgaagtataataatgatcagatctcatgaaaattaagaagagttacatatttttcaatatactagcacatggatggaatgagcaacatgtactccactacttagtaatgttgccaattcattatttttcatcattcaattaagaaaagacaactctattttttctaaaaagaaaaaacattgaaattcttattacaaatacaagtcattaagacagtcaaaattggttgtttctgactgttttttttaagtgattatttttcttttggaaatattttttttatttttagtataaatattattttggactatgtgttttacaaaagttatagattaaactttctgttttgttaaatgaaaaaatagagcatgtattttctaaaatagtaaaaataagaccatgagcttaattttcaacaactttttttaatataactaacttgaaaacaattcctaataagaacagatacaaaaaatataaagttttgttataacacatttagatcggattattattaaattttgttttgacaaaaaattagtttagagtcctatttgtactattttgaaaaatacaaagtctattttatcaattaacaaaactgaggtttcaatttataacttttacaaaacacacgatctaaaatggtattcccttattttcaatgatgttattcaatactagtgttaatcttattggatgaactcttctcatttttttttttgacataattcttctcatttaattattgagttaatgaagtttctttgtaagctaaaaaaaaaaaaaatagcatcaagaatt

SEQ ID NO: 29478 - DNA, 6104 bp, Cannabis sativa
  modified_base (882)..(887): a, c, t, g, unknown or other
aaaaaactatggcaccaaaacaaataacgggaagaactgtaaaattatccgttaatttttcatttttattatatcaaatataaatatttctctcaaagtcattttacaactctcaatacgagtctaaaacttaaaatcaatatttcatttttgcaataaggaacctaaaaaatgattggaacaaaataatccttacaaaacttcagtcttgggaagtgactgtttctttctgtgacagtaatttcactctccttgtgagatttttcataacatcaattatcacagatttcttctgaattctaaactgaatagccaactcagaagagcttgaaacaccctttttcaagagtgattcatcttccatgattttagtagggaagtgtccgagtgcaatcacacaaagggcgatcatggtgcgaaaagcagctacttcatttgaaaccccgagaggagcttcggctgataaggatttcagcgtcttcaaatcatgtttctcaacttctgtcacgtctgaggccagtagtactcttaatgctgccagtaaccgaccctctaccaattccggaccacctaggcttacctgtttaggagaagaaaaatcggatgagaagccgaataaagcttaaggggatttaggattatgtttaagttgatcaatagaactacaaaaacttaacaaaaggtagtgttttttttgaatgtgatcatataatttccaaccgattcagttacaatacacatgaaatctgtgcattaggacacactgtaaaataaattcgaaaaaagattcttcacaagtccatagataaagccttgaggcatggattttaatagtgaaatttcaaaaggcattcatattttgggagagagagagagagagannnnnngagagagagagagagagttgcttgagcccatgattttaagaaaaagatggattcaataagttcttgccaataaccacatactagttagtgatctcggcttagcgagtcttttcttcaatgatgaactgttagcaccagtcctatattagcacatgtattgtattatgaaattcataaatgaaggagttaatggtggggttcttttttgtagtgacgaatcttgtatgtgttcctaacaaaagaaaaagaatttgtctatttctcggtgtcttgaaggggcgtggaaacacataaaaactcttgaatagaaatgaaaaagagatgtaactccaattctttcgaaaatagtaagattatatgataaaaacaataactaattgattaaaatccattatgacaacaggaagagcagtatagaagagagcataaaccttgagattcgaagcctctccctctaaaccaagctggcttagaaatcgttgctgccatggagaaggtgcagagaagtttggggaagaaactccagcagccatacttgcagcatccagaagagctccatcgtatctcagctcgatacagtcataagggtttgatggtatcacaaatccataatccagtagaaaaaaatcattatttaaattgccatagttaattgctaaaggatcattctgtttaattgctgtttctgccacaacctgaattaaaacagtatcttaacttggtgacaatgaacttatttacctgcccttaatttcctatccgaaaacaaggttgagacaaattttttttaccttcactagcatctttgtattatccacaccttgctcctgaacaattcgggcattgggttcaaagctatggttacacatatcaatgagaggaagcatcatgggatcatcctcggaagtaccatctgggagctttttaccatgcagacgaaacgcccgagatgaaactgctgacattgcccatccaagggaagatgcatccacatctaaaccaccaaatgggtggtcaattagcttcaaattttcaagagcacgtctgacttcttgctcaaaatcaagaagaaatcggcatctcttattcacctgaattaagaagaagccacaactacttcaaataactgcagaaataatctttcaatcacaaaactaaacaaaaaaaaaagttatagagatctctactttagtgcagtaattgtaaggagactctttcatcaattcaaattcgctcaattttaagtttataacaaaggattaccaaaatttgattcttttgctaatcttttaactccattctagaatcaagatagagatgagactagaatttatcttagttgttgcataaactaggctcttccattgtagtttagaacctccttgaaatatagaattccacttcaataggagaataatgtccatgtaataaaacctttcaaatcacaatgaaagtaatgacagtgtctgaaatattccacaatttatatgtgaataggttgttgatacaatattgatctaatccaatacttgaaagaattagaataaatgtatcttaatcttatcgatatcaaagaaagaattacaaagttccaaagtttttgagacagtttggtaacaaattcattcctaatccttgacaataaatcaaccgctctatttatactaactcctcccgattgttttaagctcgcgccataggacaggaacatttgatctcagcaactaagaatttgaaaactcagccgctataatcctaatcaattacatttaagagacttatattaagacctaacagttttctataaataaaaaaaaccatcttgaatatcttatcgtttgtgtcatttcaaagctcaaacaatggtacttccttggtttgtataaataaactcaacattaggataaaactaaggcattttcacagttcagatattactccatctccacataacactttggcttggttgatcatataaagtacctgataaagaagaggagcatactgcaagttcttaatatcctcaccagggaagaaaattggtacactgtaagcttctggaagattgctgatgtatggccaccaaaaagatccaacctttgctctttcttgaagaagcttcaaacccaacttcattgcccatagttcctctgccaaatgcttccctcagtgtccattttactcaatattcataattcagtatagcctaacgtacacaacttcaagttactatacttaatgcattcatagaagtttaacatatgtaatagagatcattaagcatttactcaaagaagaaaaacccaattgactaaaacatggcagaagctatcaaagtgattgaaataataatcaaaactataaacccaccaggaactttttgagccaaatcgaccagaacggagtgaatttcatcagattcaagagacccaaatctcaaaggaatatgttgaggaagggaaatgagttcggacccttttgggatttcctcagaagcaagaagcccaagaccatggctactgtcttcacctatcttcaacccctggtgaacgaaccctccttgccttcgaacccacttgaccaaatcatgtggctgtgccaccaaacgcccaggataacaacctgaggaggaagcggcggcgcacgttagagggcgaaagtgagtcagagaagccattaccatctttgaagctgccattgtaatggaactcgactcactactcgaatccacttcagtccctcaaatgctaaaaatacaacccgtcgggtcaacccgaatagaccgaacaacccgttttaacaacccgatgacccgcaaacccgacaggcatcttcgttgtacatgaagaaaaaagccatgaatgagcattagaggtcggaaactgagctagagaagccattgccacccatctccgtcctcactttccactgaaatgcattcccattggattttgagatatgtcgtttggtttcgggttatgtcgttttgagatcaaacccggaaactaacccgagggttttttaggaggtatttttgccggaataagctttgtaaacctcccagaggacggtggctctccattgccgcctgcttgaatgaattcactgctgttttcttcatcaaaccgactgtggaatttccaacccgaacagcccgaaacgaagaaaacccaacccgcataacccgttttccaacccgatgaccccgccaacccgacaagaatctccgttgtacatgaagaaaaaagccatgaatgaacattagaggtcggaaactgagctagagaagccattgccacccatctccgtcctcactttccactgaaacgcactcccattggattttcagaaatgtcgtatagcttcgggctatgtcgttttgaaactcaacccggaactaacccggacgcaacccgagcgatttcccggtagtattgttgccggaataaagtttttgaagctccgagacgacggtggttctccattgccaccggcttgaaggaacccattgttgttttcatcatcaaaccgaggcatggaatttccaacccgaacagcccgaatcgaagaaaacccaacccgaatacccgaatgtcaacccgtcaaaccgacttcaacctcccgtgtgctcattacaatatgcggagacgagcattagagggtggaaaatgaatcagagacgccattgtcgctcacctctgtcctcacttcttgctcaaaacgaattgtcgttacttcttcataattgtcgttgtgttccgaaccgtgtcgttttgtagtgaacccgagtagtttttattggcgaaacagaagttggtaacacctggaatgagggcagagttgtaattttcatcaatctgagcctataaaagcctatagatttcaacaacccgagaagaccccgatgacccgagaaagagaacccgagtaaaccgcacaacccgatggagccgacctaagaacccgctaaaccaatcttcgtataaaaatggtacgtagagaagatattgcatgccggttaattaatttttttttttttttttggattatgatttagttcattagatatttttatggaattatgatatgttgaattattttgaatgttaaaaattcttattgaattaatgaaattgttagatctaaaaaatttataatgattatttttgtgttaaattatactttttaaattttgatatttactaaattatgtcacttgaatttttttttgtcaaattataccccatgaacttttatctatgtagactttttttactaaaatttaacaaaaaatctttaaattcaacaatcacaataatttagaaaaaaatttacggccttgaaaatttagatggcaaaaatcataatcagtctattttaattattgaaatttatatttgtatttatatttagttcaaacaaattcatttaattatgtgacgttaaattttatgtaaattaatactttaaaaatgcttgaataataacagattgagatacaacacacgactagaaacatggcctaatttcctatgccacttatctttgattgaatttaaaggcttcctagtagcagattgagatacattagattgacttaaagaagaaataacagtattggaaactcttgaggttgaaacatgatagttgtgatattgagcaagtgctttgttgagtgagggaaaaggtagagtccatctctaagcctcccctgaagaaccaccttctgtgtttccttgtctttcacaaaacaataattattatctctggttaatttaaaaatattaattaaattcttgataatttcaagtacgtgaagtatttctttctaaactggggaactgttattgcttataagcaacaaataagatccaacttgagttatagcaagtttaaatccatcacctattattagcttttccttatcaagatacttactcttttgctgtaaattgttcacatcaatagttgtgtgattactattggaaattagtagtgcctaaaattttttataagtggtattttataattggttaatgatattttttaagagttatacagactcgatacttaattacatcaataataattattattttttacctaaataatatagtattgttattggatacgagtagtgtccaacaccttttataggtagcgtctcacgattagttagcgatattccttaaaagtttttttttttttaagttatat

SEQ ID NO: 29479 - DNA, 2035 bp, Cannabis sativa
  modified_base (1264)..(1266): a, c, t, g, unknown or other
aagccaaactaatttcatatactaaatcaacaactactcatcaacatcactacttcactacattaccacaataaactattaaccacagatccacctattctaaacaaaaccaatacaaatttattctcaaaccatcacatattagtactcaatgtcatcttatatataatacaaacactattttatattattaggtgtacaattaaagttccacattgattaaaagtacagaatatcataaaatatataaatatataatctataacagtttagtttcaaataaataatttgatcttataaatattattgaaattctaatatccatatgggactatctgattagatcgaaaagccatagttagttaacttaccataaaattgtgaagttatactccaatagaggacattagctccacgcgtgccattgttagccaataattgttgaattggggtaacattatacaaatatcgaaccatatggctctgcccataggtgagtgcccattgaagtggtaaacaactatgctcctcaagaccacacgcaatactaactaacctattgttatttctaaccaaacactcagcgattttggtgattccactccttgtggccgatgcaagagcagtccatttttgattatcttcaatttctaaatctttttcttgcatttgtgacactaaatattctacaacatccacatttccattgttggctgcaatatgcaaagccgtctcctttgaaatcggatgttgtgctctcactatttctggcattgatataaacaaatcctgcacaacctttaaatttccttctcttgcagcttcaaaccaattttcatgagccgatgatgatgatgatgccatcatatattaatcttcaaccaagtacttcatttattaaaatatatagcacaattataaatcaaaaaatctcttaaaatttcaacattagatcattttttttataaaattttcaggcaaggcaagatgaaaatgttttcatgaaatttatgggttttttttttttttgggaaacttacaaaaatactggaatttggattaatttttataaaaatactgtcacacgaaaatattttcaaaaatattgtatttttataaaacagaacaactcaaaacaacagtagaccaactataaaacaccagtatgaaaacttaacacagtatactgcagtatgaaacttatgaaaaaatacagtaaaaaagtaaaaaaataaaaaataccgtctgacagtatttttgtaannnaatgacaaaagttagtatatcatacaaaattttctattctttagaaaagagccttatgtttgcttgtagatatgttgtggattaacacgagttaggcctagaacttacctaattcaagggcccaaaaatgaaaaactcattttaaaaatacacatatatttttgaataattttcgtaaatatcacattttttaaaggatccaataattttgttatcttacttaatagtcatcaataatcaatgcattgacaatgacataacctatttatcaatgtcaatatttgaataattctaaattttgttaaattacaaatataaatgaaatcttataattagattagttttggaaaagaaaaaaaaatgtttatttgtctcacacaaacacacccaaaaaaaaaacctatgaaacctaaatgtatatattttctcaataaaaaaaaaaacaaaatttatgtattaaaataaaaaataaaaaaattattttactttttagtatataataatttgtatatattatattggaacaacattatatatgtttgaaaatgttggtgtacctattattagtttaaataaaaacaagaaagttattatgaataatgggtggatagtgaaagagaatatagtaatatcagagcacatatatataatctaatacaagaagtgaacacaacacataatatatactcaaaaaatttggtatataaattaaaaagaagtgaaatttagtaaaatgttgttactaaccagaacaccagatctgaaagag

SEQ ID NO: 29480 - DNA, 6306 bp, Cannabis sativa
ctttgggcggcatctccataggtggtacctcatcaccctttggttgtttgggcgaaggggtctatccagagctatcacctgacctatttttcaaagcttggaacaacttttgagacatagctgcacatgaacaaaacatgaaggttagaaacaagtgtgatataggccaagtcggatgatagttaggtgagtaaaaatacactgcgcacaggcaggagcaatttcccaagcaagcagggatggaggtttatcgtctgaagagtcttcttgttcttgctccgtcagaacgacttttccctttctctccactgtggcggatggtcaagcaggtctatcaggcttctccctaattctgatagaacgttcaactggtgcctggctactcagatgggcattcctcttcttttttcttagattctcttgttcgggtacctcctcttggtcgggctttgtctttttcaccttcttcacagcccttggcccaaaattggtttggaagagtttgtacttaacaaaattggccttagtggccaggagagtgatgttccgtgcagcgtgtggcagttgaagaattttttgtgccctcctcctgagccccaacgtaaatggagggcggcaataagatggcacctgttggaagctggtgttgacagtgtccattccctggacaaagttatactcatctacaaagttctgtattttactcacctcggtatctgtagtgcctatcaaccacttctcctcgatcagagaaaaatagaagtatcccaatctgttctgcttgggacttgacttcagatcaaagagccagttggtgtaatgtggggacggctcatcccatccttgcaaggcataaaggatgaacatgatggatatgtatttgatgcccttaggagtaaattgggtcgtgcaaaggtggtagtagttttcgatcttcctaaagtacggaaggaagggtaagatagcaccctgcttggtatggacgcccaaccaagtgcagtaaccttcccttggactagtcgccaactggttgggggagggaaggaagcattcgacattccctaattaaccaagcttgagcagattcttcatctttgccctggttaccacaggtggaggagaaacccactgatctcatagtgtgccttgcctccttagaggaacagcctcggtgtattccttagtgacataatcttcaccggcctccaggatttccccagcctcagatacaggttgtccttcttcattaaagccaccaaatggcagccttcgagctgcaccttcctcatcttcagccttagaagaagtatcaggatgaaccttgccctgatcctccatctcttggacttcaatgtccccagtagtattttcctcttcagtagcaggctgggcgtgctcaacatttggcaatgtagtgagacgggcaatttgcgggtcggacaaagaagacttccgcagagttttcttggtttggaccatcatcttaggcctggacggaactttatttgtgtgcctagaaatagtcatgataaatgtggcaaggagtttacctacagcagcaggacttggacagcctacgcgcaaggtatcaacgatatctagacgaacaatatatgtccagttgatggaagatagcatctccacccctttctaagatcttagatgaagtgtctgtacccttggccttcgatctggctgggataaaagtggtgtggtacctcaggttctggggaaggtctgtgctcactacttatttcccaatcttcaaagctagaattggaaaggatgttactggatgaagacggactagcatagaggcaaggatgatccttgtataaaagttgaagtagatcgtggtcgatatgatgtttgcctccccaaaactcaccagagttcatctataaaagggaggaaacaagatgagagtttggtcagggtaacgaatgaaaataggttgattatactgaccaggtctgattgcaggatcaaaaatagaaatttcgtataataatgaagtttacaacccagaagttcaaaattttgaattaaggtctgattctcactaaaccccaaatgggtaagtgaaaatgagtgtcgtgtggttaaaattaaaatgtagttatgatcaagcacgtgattaggcataattaagatctttaagtcttaaacctagaatttctatgattctcctacaacatgttcaagaataatcaagtttcacagggagaaatccagaaaattaagcatgtgaatgtataaaaaaggagaaaatgaagaacttgctcactgatttgaaacttttgatctgctcggacgacactggccagatgtttctaagaatttctttgaagaaattaagagaaaaaaggatttttgctctgatttttcaagaataaaaatgactaaaagtggttgattagggtttttagtcctatgtataagcagatcaaagaagatgagtaatcatttcaaattttaaatgtctcaaattccccccaaaagtgtacattatgtactcgattacttgcagaataaccatcgtcacgtgcaaattttgaggcatggttcgagataaaactatcaatcagcattaataagctgaaattgaagagactcttgatcagagtcacataagatcatcaatcaacaccacagacacgcgtcacccaggtgaagtccacgtgcaaccacgaaggtcccgcacagacttggggggcaaatgtaatccaattttttacacattgacgtggcaaaagaatcaggtgacttgtgtcctgcatttcttgtacctgggcggaggtgaatgtcctgaacagactctatattgtacgtcagcatgtataacctttgattacccgagcaggatgaaagatagatcattaaggcaagtataagtctggcttgccgaactacttccaaagagttaattacttcaaagtaatcctgcgatgccaagacacgaaggcaatccctacaatcgtgggattgaattagagaaatatggcaacctgttttagtttcctacttcgtgtatcataattatgtaataaatgtaatttcctattttatacattgtaagcaaaaggaaaaccttccctcatgcattaaggccctataaatagtgacttagcctcactgtgagagggatcgaaagaattgcttcagagagagatctaagagaattactcagagattcattgtaagagcttttagagagaaaaatacttcgttctttctctcaggttaatacaattcaagaggagtaggcaattaccacactcacacggccaaacctttttaaaattatgatgctctttattactttatggtttttactctattttaattacattcttaattgcttattaattgactcattgtcattgactaaaagtgaggtcaacaaccactatttaccgcctgtaataactccccaccaccagctcgagctccatctccattctccacaacatgcctactcagaatcttctactaataaatccctttgggtccacacaaatataagtttctaaataaattatatcttgaaacatatagatctaaatctaagaagataaatgccagattgaaaagaaaaaaaaatacaagaaaagagttgttacataccaaagacggggttcatagagttcttagccatcaaccctccacgcaagttccattatccatgtcattctcagtgtttacggccatcgaccctcacccgcatggtccatggcattctcaaaacgagatcatggaaaagatatgagggacactagagtcatacatagaactcgcgtgagaaggatgttatcgcataccatagtcaccgttagcgatgagatagtggttcgactagattgagatactgcagataaagacgatgagagagaggtgtcggacattgtatttggtcagagagagaagcgcatgtgagagtgatatttttagggttaggttcacagtcatactgaagaaagagggtgagttaggtttttgattatattgagaggggttttcaatctaaacgagttttaggttttagggttcaaaatgataatacttagagagagagagagagagagagaaagtacctacctttcatgttctggacatgattacattttttcatgtccatcaatgctaaatatgaaatctccttaaaactttttcatatctaacactatttttgctagacattacattttttcatgtccatcaaagctaaatatgaaatctcctcaaaacttttctcttttctatatctaacattatttttgctagacatgaaaatgagaaatagaagggggtattttgttttttatagtagtgaaactcatcttatgtactattaatatttaagtacataaaaaattttaagagcttatgtgtgtttgtatttggttttgtgagcttagaaattttttacttgcttagcaaaaaaaattaagaagtaagtaattatattacaattaataattattgtatataagatatatattaagtttgatctaccagtacgtacatattaagaagcagaagtttttttttttttttttaaagggaagaaattgataaatctgtatagtttaatattaagctttgttgtacatagtttatatttgatttttctattttatatatatataacaaagaaaaaaattaaacaattattgatcataatatatcaatttatgtaaattaaatattttattagcattgaatctctagcaaaatattaaatatatgtttctatagttatctagttctcgccgatttgaataagagaaattaatggaattatttatttattattttaaatatatggttactcactttttccatttaattttaagatttgttggtgtactttttgtttcgataggtattttgacaaagcagctgtaatattggaaaatgagataaacccaaacggcgatcctttgaacaagtggagattgtgcagtatccaacaggtagaggaagtgaagtgcttagcaagaatcacaccgatatgggcgtcaggaatcataagcttgatctccatagtccaacaagggactttcacagtctctcaagctctcaaaatggatcgtcacataggttccaattttgaggtcccagcaggttcaataggcgtcatctcactcatcaccatcggcatttggcttcctttctacgaccgcctactcgtcccagctctccgccgaatcaccaaccacgagaacggaatcacactcctccagagaatcggaatcggaaacattttctcaattctgtcaatggtagtagccggattagtcgaaaaggagagaagaagatgggccaactcagggatggcgtccatgtcggtgttctggttggccccacaattggtgttaatgggattttgtgaagcctttaacatgataggactaattgagtttttcaaccgccagtttccggatcacatgaggagcattggaaatgcgctcttctcttgctctttcgctggtgccagttacactagcagtatattggttactgtcctccatcgagttaccgctaccaatgaccgacccgattggttgactaatgatattaacaaggggaggctggactatttttactatcttttagctggtttgggtgtctttaatgttctttattttctctattgtgctagtcgttatcgttacaaaggggctgtcatagaattggagaacaaagctacaaatgtggtagatgtggagatgaattcggtgcttaataaagggctcagtacttgaatcacttggtgggtgatgatcattgctcctcagaaataagtagtactactattatagtagtggtgagtgagtgatatatatagacacacaatgatatagacacacatatatgtataataaatcaatatatccattttgtcattagccctatacaacttcttattgaaattgaaaaaaaattgtaacttgttaatgacatgagatctaaaaataaaagataatgacaaaaagggaatatttctagctctatagcataattgatgggtcttctcactataagaaattatgcaattttgcatcgataaaagttaactgatttcactagtacacatttaccaatgcaaacctgcgcttaccaaaagattgtcgatcgatgtagtttagttgaaaatatcacttttttcggcgcacaatgaatgatgccaacaacatgtacatttgttgacctcaaaaattgattaactgatagcaatattgtcgtatagatctgatgtttgctacttgatacacaacaagaacattaaagtaaataagacaa

SEQ ID NO: 29481 - DNA, 1033 bp, Cannabis sativa
tttgcgaagacgaagaaccagacttagcatcatttacctcattccgcgtctgggccctactgtgcgggttacgttgctctgggtcctcttccggttgtgcctcgcagttgaggtttcgtccggtttgatcccttgaagttggttgattcaagtcaaacccctcctgactggttcttcgttccatgcgagtgcagttagttcgtcgtctagagttagttatttgacgattatccgattgagtagttggtactcaaggagaacgtcgagtcttgcttcgtccatcaatttcagcttgccagaccgcatttgatcctatattgtcctgtattgatcggaagttagcagaacaatgccttcggatatcacaacaggtgtgataagtggaaattgccccaccgtggccgctggtgtggatgtttccccaacatgagcagcaatgtctgggaacaaattgagaggtgttatgttggttcgtcccactcctccgttgatggtgtcgatgggaggtgtcctgtttcctggaagtgggacattcattaacccgattataattgatccgttgttgatatcccaagttgtctgatttccagccataacgattttccttctaaatcaacaaaatattgtgtttcccatggacgacaccaaatattgttgaaggaatttttacaacaccaaaataaattataataataataatatggagaatttatgcgagtactccacctagaatggtaagtatttaaattagggacacaaaatactttaataaaaattggaaatacatagaatacaagagagtatggtggttcagtcagatcacgatctgcttagtccactgttgcaaggatttttgtcttgttcatttcatggtggatcactcctttatatacaaagcaagtgtctgttcatttacatagagattgaattcattatatatccgtttgtacattgatttacaataatgaaaaaatgtaaacataattaaagaagatcagtttccaatttaattcactaaatgcagcaacgtatg

SEQ ID NO: 29482 - DNA, 2335 bp, Cannabis sativa
taaaataatttccaacacaaattttttctattttaggattaataagcactttgtgcagttggtccttgacgtcacataaactactaatatgtgagacgagaaaaataattgacataaaaagaattagaagaattgaaaagaaaaaccaaaatagaataaaattcaacttcgttaactttagttaatgcagttctccgataatgacgctaaaaacttgttgcaaaatattagacacgcaagtgtacgtatcttcaagtaataactcatgctagtgaggtcaatcccacaagaactacagctaggcactaataaattgaatcttcatgtctatttagaaaattaaaactttgatacttgataatagaatgtaagaaaacaataaaattaagtaaacaattaaataaagttcaaccacaagatgaagaattagggacaaaactttaatttcttagattacttattttactaatgcctattagtctttctccttcctcctaagtgatcataaattataatttttaccaaaactcttattaggacattaatgtactaaattgcaagaataactactacatctttaagataattaaacaagtaatccgcattaaacaataatttaatgtcacataagctatgtaaatactttcatgttgcatcaaaaactatatttattcaattagagcatttctaatattcactttttagattttatattagaatcataaatcatgtttaaggcgatcaatatcaaacatgcatcaaacacaaatataaataaattacaaaataatggaaggaagaaacaccaaatatcattagttcataagaaatctcagacaatatccattaaaatccttaaaaaaaagaatttagttcacaatctccatacacacatccatagttgtttcagacataagcataatcaaagaaaaaaattataagagaaaagagaagaaactagtttggggttgtcacaattcaccaacttttgctcaaatctttatcttcttctttttctaggattctttttagtctccctcctccaacttgcgattcccaaagattaaaagtaaaaatctctcttcctcccttaaaaaagacaaaattacccttaaaatttagtgacgtgtacggacgatggcaccatgacgccaacactagtgctgcgacgcctgacaccaatagaaaaatggcagtcttctttgttgcagtggcgtgccacatcgcctgtatatcccgtcgtggcactatttctgccatggcaccatcagtagtgccacgactctaattttactccagttgatgtgttttttgctccaacttagcttaaactcttgcttttcacttccattatccaagtgtattgcataaacttgaaatcaacaaaaacaagtataattttgctccaaaattgtatattcacaagaagataaaagagattaaaatggtaaaaaaaagtagactaaaactagtctaacacccttgaagatcaattggccgaaaccctagagagttaagagtgtgttctcagtgttcctaagagcctaaacacaataccaagaacttagatccaacatgaaaaagatgattaaatttttaggagaagaagagaattatagtgatgatagaaacttaaaagaaaacaaaaatataagaagaagcttacaactatctcaatctcttcttcttcttcttcaagctatgatcgaaggcttgggttgtgtgaaaaatgagaactctcgctcttctatttataagaattcaaaagtgagtcattaatctcattaattgtcctaagctaaaatggtatgtttttataccgaatttacctttgcgttttctgcaccgatcacattctactaaggccatttatcaagtctacgttcatagctctacacaagaatagaaactaggtaaattttcacactcttggtaacctgacaccttacgacttattcggaccattttaacttatgaatttggcttcatgctcttcatgacatttgcacttatcataatattatttctaaatgaatgtaattagaaaattttaatacataaatgtacttatattatacatttttgatgatgtgctgctttatattaacgttcttttattttgaataaaataatatcgttttgagtctacagtaacaaaactacataaaaaataagacttaatttattaaaaaacgatttatttagtcatttttaaatgttattttttgtattgttgttttgatgttgatttattcagaatgaaataacgccgacgccggtaattacataaatacgtaatagtgagaggcagttttaagaaaaataatgattattg

SEQ ID NO: 29483 - DNA, 1645 bp, Cannabis sativa
aatcgcaattctcgtgcataggcattcacacatttatgggtatgatcatgtcatcaaccaagagcacaagtagcacaaaagcaaaactttgaattttttcatatttttgcacagtcttgaatagatataaaatggtagatatcaatttaatttcatgacaaaaaattaatatattttttttaaatttaaaaggaaaaaaaataaaaactaaaaaaaaatagatacaaacttatttacaacgacaagaaatagtttataagtccatatatgatgtatttggaacataactaaaagaaaaaaaaacataaaaaaattcaaaaaaaaaaaaatcacgatcgttttgcagaagcgcccacacactcgtggaaatggtcatgcggtgcaccaaggatacaaacaacacataaataaaactttgaatttttccatgagatttgtacaatttttagacactaaaaaaattgatggatatcaattttcacataaaaaaagattaatatgttttcttaaataatattcttaataattaaaagaaaaaaaaatattccattcaaaaaaaaaaaatattaaagagtggaaagatcagtacaaacttatttataatgataaggaataatttgtaagtgcatataggatgtatttgaaacacagctaaaagaaaaaattaaaaaaaaaaatcacgatccttttacacatgcacccaaatacttgtgggtatggttatgccatctactgagggcataagcaacacaaaaatgaaactttgaattcctccattaaattttgcacaattcttggacacataaaacaaagtgacagatatcaatttttataacaaaaaaattaatatattttcttaaataattcttttataaattaaaggaagaaaaattaaagatagaaaaatcggtacaaacttatttacaccgacaataaatggtttataagtccatataaaatgtatttagaacacaactaaaagaagaagaaaacttgtgattctcatgcataggctctcacacattcgtcggcatggttgtgccatctgccaaaagcacaagcagtacaaaaataaaactttaaattttttcatgatttttttcacagtcttgaacacattaaaactggtggatatcaattttcatgacaaaaagattaatatatttttttaataattttttcaccaatcaaaaaagaaaaagatgtaaaaaatacaaaaattggtacaaacttatttacaacgacaagtaacagtttgtacgtccgtataagatatatttggaacacagtcaaagaaaaaaaatcaataaaaaataacgatccttgtgcacagtcgcccatacactcatagtcatggtcatgccatccaccaatagcacaaataggacaaaaaagaaactttgaattttttaaataagattttacatagtgctttgacacataaaaaatagtggacattaattaacatgacaaaaagattaatatattttttaaataattttttcaataattaaaaggaaaaatttcttaaaacaattaaaaattttgtacaattttatttacaatgaaatgaatagtttgtaagtctatatagtatgtatttggaagacaagcaaaatatacaaccaatttttttttttttttt

SEQ ID NO: 29484 - DNA, 2169 bp, Cannabis sativa
ataaaaactaatatcttttattttcaatcaaatataacgtaagtgtaaattcataaaataagacatagttaatttatgatttttaattgattaactaaatcaattatttgagttttttttaagatgatattatctcaagcattgtggcaccatgaacttatataatcaatctttcaataagttgatttgaaatttatcggtccccataaattttctaatttattaatttctcatgactctactataaatttgaaattgcactcttgattacattgaacactctatatcctccaatatagatacactatgaatcatccattattttaatcaaatcatgtcattgatcctccatagatagtctacctcgagtagggtcaaaattaccattttactcttcaatgtatttatcctttaaacacttagctacttgtaaatgatattttagtaaactaacataattactaaaatgagtgctccaccatttaatctcgttaagacaagctcaaagaaaactatcgttttacttctaaataggtatataagctatatgattaacgctcccatttattgaactaccaagttcttaatgtaagtatgagctagaccgatgagtaagctagtaatgaataaatcaaagaattgtaataatacaacttaaagcttaatcatctcaagattgagatcaattgatctatgatcaactaagtgatattgatctggaaaatatataagagtaattttaagatatcttttctactatcaatatcaatccagtctgatgtaaaacttataaatttgatcctaggttactttttcaattctttggaataaaagatattccacttagccaagtgtaagtaaatcctatcgctaattaacatatcagtaaaactagtgtactagtaaatgaatttatatattaaacatataatcatgaaataaatatgtgaatgaagcaataggcaatagtaaaaaatgatctacgatatcttttattgatagttaaataagattacattgaattgtggttttatttagagcataaaatccaacaacaagtacacattgtgataatcacatagaaccgccccaccatgcgccttcttagctctaatctcaatcccgagatttccgacatcacactctagcttcaagagactctcgtatggcttctcccaatgataagagagatacaatacgtgcagaagtgattcaatagatacaatcatgctttggtttttctctctaaaacctttttactctaattttactaattttatttcagtttttgcttctttccaatatattcaaaattgatgcttattgtttaactatggttttcttcttttaattttgagaatgtttgttgacatcaattttaattaaatttaatggtgattattagtaagatacaatgacgataataattttaaatgtagtgacgactataaatgagatataataataataatagagataaattttttcttcatctttcaatttatataagctaaagtataattattgttttaattataatctaactttgttagtcacataaaataaattctgtggcttgtagtgttcattacatttatgataaaccacatcagtagtttttatttatttatttatttatttatttttgttagttaaaataatatttaattcaaaaaatttattagatttttatttgttagtttatttgatgtgcttaattttgtaaattaatataaaagaaagaaaaatttattcgatttaactagatgataaatatttaaaaaatatctaggatatataatctataaaaatatctatgatatttattctaaataaataaatatgttaaattttaaaatttagatttttattttattcattaaaaacaattcaacaaatataaaattaaattaaaaaataattagaaaaatcaaaatatctaaactactgtataaataaaatatttaaaaccaccataagaaggacaacaatattatttagtttttttactaaaaaataatattttttaatagcaataaaaaataatattttttattaaagaacataaataataaaaaaattattaattatacagctaaagatttacataactaaaaaaaaattaagaatgtgcattgaacttaatattaatttagtatacatatgtat

SEQ ID NO: 29485 - DNA, 1518 bp, Cannabis sativa
tttactgattttgaaaaataccacattgtttctatcataagggcccaaaattttttttttccctatgaccaactttgtttccgggccggccctatcaatgatatgctatttgttggagatgctgtcttcaggaatgaagaaggggaagttacttacatctccactagacggctcacctattccgacccttttccaggtgagattgcggcattgatctggggtgtggaatctgtcctcagtaggggcattaacaatgtaattttccagagtgattcggctggcgcggtggaggcggtgctctggaagcgaaatgagatcaatgcattgcaccacaatgttcaggacttggtgaagacgtttcataactttgctaatcgaccttgcctttgggaggccacctggatccctagaaggcttaatggtgtggctcacgatgtggccaaatgggcaattagtgcaaaccaattcgggagcatcgatctgtccaattttgacagctcccttctcatcggatgagcagatggttgttttagttttcttagtcttcttagcgctttgttgtttgttcttttcttgtgttagtttgttggtttcttagctttggtttgtactctgttaactttgggttgtgttggtgtttttttcttgtgtctattgagtctaggaggtccgtggccctagtgctgctttttgttctttttgttgtttggggtgctctctcggagcccagtaatataaaaaaaaaaaaaaggtaattccataaatatagaaaaaaataaagctagtttagataaatatggtaaggaaatttaataggaaaaaatatgttatttaaaataaaaatttaacatatatgggattgaattaccataaaagatattaaaattcctttcatatttttttttaataaaaaaataaaacaaatgaaactacagtgattgccgaagttgttactattgtcggaaaaggcatcggagttagctgtggaaacagaaaagttgctggagttgctgttggcactagaaaagtcgctggagttgttgtcggcgccgaaaaaataatcggaattgacattattgccaaaaaaatcatcgaaaaaaataccaaaaaactagttttttcatcaagaaattggtttcttggtgatttttttaataattttttccgcgacaatgccaattccgaaaaatttttctggagtttgctttcagtaccggcaagtcaccggagtagctaacgttgtcgaaaaaatcgtcggagttgctaccaacgccaaaaaattcatcagaactggcattgtcgttagagaaataccaagtaatttttaggtgactataccaattttgatacttttctgaagtttaatgtccgtgccggaaaggtcactgaagtagctgctagtgtcagaaaagtcgtcaaacttggcattttcaccggaaaaattaccaagaaagtggtttcttcatcaagaaaactggttccttcttcaagaaaccagtttcttggttatttttcgac

SEQ ID NO: 29486 - DNA, 1899 bp, Cannabis sativa
ttagacataaaaaatctactggcattgattagaccaattgcctacattttattataaacacggaaatatgcatgtcttgctgtaattttctgtacatctactcttcctcataaaatatggtattctttttacattatcattaatagtaggaatagtcaaatcactttttttcttcatattatgcagttttaaattatgttacttaccatcagttgtttttagatgaaattacaaattacaaatcaaataataattatcgacatttgtcttctctaattaatgtttttataatagtttacttttagccgaagtattaattcattactttttttgttattatttgagaactgatcagtttttgttaaaatgaccgtggttaaattgaaaaataaaagtaaataaaattgatagatacaagtacaacctccgacacccaaccacttgagttctaacatcgaacctgaaatatctttataaatgcttaaacatcatcataatgtattattttattagaaaaaagaagaaaaaatgcatagtatagaataaactttttttgctataatgataaatatctatggatggatatgaagaggcacgcaggaaatgtaagtaacaagtatgcgcccttgcccttcagtcaagatgattacaaaggtaattttccgctctattagaattagtggctcgtggtagcctctgctctgtcctcacgtatattttttctttttggttctctcattataatttattgatatgcatatttgctaaatattttcccaaaggaaaaaataatgggaatgtatacaaagatttgaggcttttaaaaagcaagactccaaatatataactgcatgtgatgtgagagatgtgttgttgagctttcaatggaaaacatgaggagaagcataatactcgctctcattgaacacaggtcttaaatcttcttggcacatgaaatccaaagggaatgaaacgagatgtcccttgacagactctaacctgtccatgggatctgatcttttaacatctccattatggtaagattctaacttctctggggctattcctaaatcgattgttgtgtgtccgagtttttccttccagcaagccatgctttgtctaaatgcagctctgtatgaacaacaacgacagagattaacacaacaagagcgttgagccttataacacatctaactaactgaatatagcatacctggaatgtataaaatcgtttggtgtgcaagaaaatacatcttgaaagatggcagtatttgtctgccaaataaatcacaataatacacggttaacttaatacttagtcaaaagttcaaacacaagtgctgaatcagttatcttcatttttttcgtcttaccttggcagttgacaaccagatatctctgtaagttgaatcaacaactggatcgattatactctgaatctgatgacatttgaagagggaaaaaagagaaaataaattaggtaacaagtctggtcaattctacataaaaatgtcattagcacggtagttaacactttggaaagaaacagagaatttgataagtactaacctctcctgcacgaagaccgaggtgttcagaccacaaagacaatcgcagactcgaagaaaacttccctgccctccatggctttcctcccatatatgaattgactagctctttgtcttctataagtacaccaatctaaagcacaaaaggcaaataaccacataaatcaggagtaggcttaaatgcatacttttttattattgttattgttattcttaaaaagaaaaaaaaaatctgtcaatgtactaaaatttgtatgttgtataatattatggttaatgactaaacattattcaaagtaacaagattgctccacaagagtcctaaggttca

SEQ ID NO: 29487 - DNA, 1920 bp, Cannabis sativa
  modified_base (1657)..(1663): a, c, t, g, unknown or other
aaagcttacaaagttaaacttgtagcattgggttacacctagtgagaacgtgtagattatagggaaacttttagtctagtcaccacaatcaaaaccatcaatatactcttattcataactgccactttcagttgtgaaatatgaaatatggatgtcaaacaacttcctttaaaggaatattagacaaaatcatttatgaattaattagaagtttcaaaatataaggataagaagggaaagtttgtgggttgagtaagtccatttatagacttaaaaaaaatttctgttcctagaattatacgtttgatgtgatcatcaaaatctatagctctaaaaaaatattgttaagccttgtgtttgccaactaattaaaggtaaatcaaattgtggtatttaaggttggacatccgatccaattcaatatttttctcctaatttgatccaatccaattattggatttagaaaattatcattcgatctaatccaattagacctcaaaatccaatcaaatccaattactaagtagattggattggttttctaattggatatccaattacatatttaatttttaatattaatctagaatataaagaaaaatacgtaaaaactaaagatcatccttcatttaagtttaatactccataaagatatcatcctttcaagtttaatgaaattaacaatttaagacaactaaaataacaatactgtcaactaataaaatagaacaaaaattatgaaaacaaatacacaaaatagccaaacattactaattcaacaagaaaaacatgattaaaaaatattttattattattttttcatattttttattatacataaataaatataaataattttttaatatatgttaaatgtaattagattagatcaatttttaattagattcttagattcacatccaacaaccaatccaatctaattagaagccaacttttgacatccaatcaaattcaattgtaattggatatccaatttattgtaattggattagattggaccgattcggtccaattagattaattggatcctatccacccctagtggtattcttagtattttatgtagatgatatcttattcattagaaataatattagaatattgtcagacatgaaaggatgagtaagaactcaaattcatataaagaatttgggtgtaacaaataatgttcttggtattcaagttattaaaaactgaaagaacaaatttcttgatctcacgcaagcaacttacgttgataagatgcagcaatccctgatggattctatcttccccaaatcaactttgatcccgtctttgctaacaatgtgcccaagaaaggacacctgagatagctagaatttgtacttcttgaatttgtcatacaacttatattctcgaagccattgtaaaaccatttggagatgttactcatgttcctttttggattgagaatacacaaggatgtcgtcgataaattcagtaacacaaatattgaggaaatattgaggaaatccttgaatactctattcatcaggtccataaaagctgcaggagattggttagtccaaatgacataactagaaattcataatatccatacctagtgcggaaatctgtctttagaatgttctcctctcagattctcaactgatgnnnnnnngatcggagatcaatctttgaaaaaaccgtcttaccctgaagttgatcgaaaagatcgtcgatcctaggtgaaggatgtttattcttgattgtcagtttattcaattctcggtagtcaatgcacatccgcaaagacccatctttcttcttgacaaacactacaggagctccccagggtaacacactaggtcgtgaaaaccctatgtcaagcaacccctggagttgaatttttagttctttaagttttgttggagccat

SEQ ID NO: 29488 - DNA, 1830 bp, Cannabis sativa
attaaatatctctaaaatattattgtattattaagatgaccaattaatataaattagaaattaaaaatgcgtgtaaattatcctcttaattaatttgatttgtaaacaacgaaaacagaaataaagtgtattgattgaaattttgctatttaattttagtactccacgttaagaaattattattattttttattttttacttgaaaaaaataaagaaaatttggtaattattatattcattaataccattttatctgataattacaactcttcgcgtgactaatttaatatttttttaatacgataataaaaatataatttcaatgtataataacactaaaattatattatctaattctatattattaattttaattttttttaagaagtttaaaacttatacaatcaatcacctggattgaactaacttgtaaaatattattcttcatcattaacaatgacacacaacaagagtcttgtcttttgacatggtgagtatgttcttatagtgattgttttgttatcgttattttgatcatggcgtctagtagttactcaagaaattgaagaactctatggaaatatagagatcgaaggggaagatgatcgcattactacgtttgagtttgaagaaccagcaaccgagattacacatgttgatctatgcattgttggtcgttttctcacggccagagcaatagattatgatgttatgcgccatatgatggcctctctttggcagccgggcaggggtatgtacgtgaaacaattagaacctaatcgattcttattccagttctaccacgaactagatctcaatcgagtcattgaaggaagcccgtggactttcaatcgaatccaatttgtcttcacaaagcttaaaccagctgataatcctcgcttagttcctataaactctcttgatttctgggttcaagttcatgggttacaatacggcttcaaatctgaaaatgtgttacagagagcaggaaaatatattggtacatttgtcgagtcagacccgaagaactttcgaggtctatggagggactatatgcgtatgagagtaactgtggatgttaccgtacctttgaaacgaagaatgaagttgagacgaagtaccggtgatgaaggtttttgggccatgtttaagtatgaatttcttcccacattttgctttatttgtggattgcttggacactctgagaacttctgtccaaaacgttttgatattcctgtagatcaaatcgttaaaccatatggtgtgtggatgagggctcagcctcgtcgtcgacataacctcatcggaagtcagtggctgcgtgatggtgaagatgatgatacagctcataccggagggacatccagcagtgtgaatggacagcagcgaatcaattatgttcctatgatcaaggaaccaatcgcaggggatacagaagcattaattcacaaccaagtcaaccttggtaaatcaaaaggttatggggactgaggaaatcatggagactttaatggggaataattccaaaaatggtggaatgtatcaaggagatgtttttaatgaggagctggaggataatgtcatagttgaccctaaaaggcgtcgtacaaaaccaatgcaatctaccaaaacaattgaagtgggccactctgaagttaattctgtaagtgtaaatgggcctacaagtgaaactatggaagaggatgatagtggtgttattgttcagaaagccaattttgaattgggttcaaaaaacgatttattggtgggctctggttttcaggcccaccgctcaccatgagtatcttaagctggaattgtcgtgggct

SEQ ID NO: 29489 - DNA, 1654 bp, Cannabis sativa
aaaaaaaaaaaaaatagaaaacacgacgtaccatttgtagaaggttgtgaaataatgttacgaagagttgtgtaagtatccaagacaaccaagttgagaccagagaatctatttatcaagttttgaattgtaatatttagtcttgtgttgaaggaaatagcgtcgttgtttattctttcgacacactgattacttcctgagccaaatattgtaatcgcggccggtagacaacccattggtggcaatgttgtaactccaatctttcttgctcccatgccatatacctcctttttatattaaataataattaattattattatatgtaatttttaaataattcaactttaatataagatttatacacaaatttttgtgtttaaataattcattttttaactctgtattttgtaaaaaataaacttttggactgaattttagttaaaatatttttgattaatattactaggtttaaaaagtttgccttctcgataactttttttcatatattttttggaaaaaaaatgcattgtttaattgtggaatataattacctcaacaaattgtgctaagttttcgaagagaatgttgaaaaattggtcgatagtgtaagtgttatgaagaagagggttgatatagtaattttggagaaaatcactgctaccggcgctaattaggtaaattccacccgaaaaaatggatgaagcattggcagaacccaccatagacacaacctttccttggtaatctctatagtattctacttgtctcgatagaggaattgaatgctgcaaaaaaaatcatttcataacatgtaattttacgatttttcatattatttattaaattaaaatacgttcgttacaaatattatatatatatagagagagattatatttacatatagatttgctgtaacatcaaaatagccagaagaagctgaagcaaagttggccccaatcaataggtttcttccaacagctcttctgctaagataagctggtgggtatgcactgaacccaagcatttcagctgtttaaaattgcaataaattataaaatataataccatattagagaaatttaaagtaaaacataaaaatatactatgcataatagaagggattttatgaaaatttaaataacacaataaccataagtatatttgctttgtttcttatgtataatattaggtaaataatattttggactttctgtttttgttaaatgatgattcgaaccatgtttttaaaatggtataaaatagactttaaactcaattttcgtcattttgtttttaatataattaccaacctaaaatcagtttttagcacaaataaatgcaaaaaaaaaaaatataactatttttgttataacatcttcgggtcagattattattagattttaatttgacgaaaattaagctcaatgtctattttgtatcattttaaaaaaaatataaagtctgaatatttatttaataaaacgatgattttggtaaaacacagaatctaaaatagaatttaccataaaaaattccaaattaaagtcaagttgaatgtttctttgtaaatgtgttaaacaaattaagtctaatcctcaaaacagtaataacaaatttaacaaggtttttaataaatttttcttaaaataaata

SEQ ID NO: 29490 - DNA, 1498 bp, Cannabis sativa
gtgggaacaaccccagttgaaatacccggttttgacaaatgcaggagcctgagaaacaaataacaccgtatgattgtgcggttacaattgaaaaatcaaactagataaaggaagacaagcctaagtatgtttttactgatcaatttttagctcatctacttgttgaggtcaaaataaactgggtctgtcaaacaacctctattatgaatcatatcttgcaaaaatattattgagctaaacaaacggacactcattgacagttgtgatcaaccaatcatgtcttcttattcctaggatccatacggggctaccaattgctagacacaagaattaactattcaggctttcttttaatataagaaagtgatgtcagtcctacgagaaagatagactcagaaaaacaaaacaaaatcttacggagctagatattcgcaaaatgaggatattgcagaagcaacttcagaatagttttcggaggttgctggggctgtcacttcaaccaactgtattccaggagttacaggcacagcctcatcagtagcatgtagctttagcattttattaactgatgaaacagtgacggtaattttagcacctctttggaaattaaaggcaaatcccacttttagtaattcatgatccaacttgtagccaagtgcaaaaaataaacgaagcacattcttgcttgctttgctttccaccacggtcctgactacaactgaaatctgatcagcacctgcacccctcattgaaccccctacatgcctaacagtcctaaagatttgaagattactgtgaacttgtgtttttaagaagaaagaaaaacagggaagtacttaaatttgagaagaaatctcagaatttccatgttggttcggcctgttcaaggtcacatagaagccggacctcggaaggtacagtccctaaaaaataggatattatctcttagtcaacaagacatctcccatttgaatgcaaaataaatagaaaaaactagtaatcccacccactcaccaaggtttgggccacttttaaggcacatctcatggattcttagacgttctatatgaacaccacaaagaccctgaagaagaatctcaagggcctcaacatgctgcaccatgaaaagatggagaaatttcttgtttaaggattcttttcttttccaacgaaataatagagataccaatctaaacttgaaattcaaatctgatacatgcataaagaaatgagtgatgtgaactactaagcatctcaagcaattacaatgaagattgccaattatgtgtaaacagagcatttacaagaaatgcttaaatgaattaggccgtagagttgagtaagttcttgttctattcaaattaatgatgcctaaagaggtgggatatattatgatatataaaaacagaagagatgcataaaactacaccagactagatatataaagacatgtataaaaatactttctcttttcactttttcctgcttctgtaattac

SEQ ID NO: 29491 - DNA, 1596 bp, Cannabis sativa
aatacgacggttaattacgatatctaattaatttggtcaatgacaattatatatgatatattttataattattaagtaggactttgagggtatacaatcactggctaaccattaggaacgtacctaaatctcaactttgtatctccatggttttacttcgaacatcttgaacacaaaaattcacatacaatagtgaacctaagcctttctgtctgagccaagctatattataaaataaactattttttctttctacgtgcgatctttcaaattatattgtttccgattttgcgtctgcatatttgtcgtgtcaagctagggtaatttacgcactcggcttttgggtttatcattaattaactaccgaagaatacaaaatttcatacttgttcatcgtttttttttttttttgagtaaatactagcataaatacttattgtttttttaatgtttatttgtagtagcataataatactatatgttcgtaaaactgtaaaaaaatttttctaattttgtcagtacagactcagttattctcttaaactggacacatataaaatctaaattcttgatcattggatttagacagaaacatatagtattaattacttccgaaacgttatttcaataaattcaaacgaagtctgtactgatgatcatctccaaccctttttggatttggacacaaaagttaattcggtttctttctcagtgtttttaacaacttgttttatgctcatcgatatttaagtcgagaatattgaacagggtttgtcatgttattctccattattctaatttgaataattgggtacatatttttattagaagatcattggatgaatgtcatttcacatgttcatttggaatgaaaatttaatattttttgcattactttgatattttactactaaaaagatgggcattcccgtcgatccaaacgtcggtttatttttttagtcacaaaccactataaaagccactattagcgtcgggtacaaactagcgctaaccatagcgtcagtttataattgacgcttgaaataatatattaaatatgttaagaaataatatatttgttataattatatataagagtgtttttcaaatatataaatatatatatatataagaatgttgtttattgatacaaaagtatattagtagataaaatatagggccatagcattaaaaaaagatgatttatggattaaatagattcatagagtttacttacaagatacagattggtgggactactcagcaacattaatttcagctagaacatttttacatcaggggtctaccgatctttgtccgcaagatggaagagttagatagaataattaagtatggaatagatttaatagccctaaacatgctgtgattgttagctgtctgttcaaaatagactaaaaactcgagacagattactcaaactcaatatatattagaattcgacttgttttttgtgtggtttaaatgagaaaaattttaaccgtctcttttttaattgtcatgtgagtatgaaatgcataagggcaactatggattggatggattgacacaccaatgccagctctattgtctctttat

SEQ ID NO: 29492 - DNA, 1368 bp, Cannabis sativa
ttaccatcacatcatatatatataaatcacttatgaaatgaaaattaatagtgacaactagttactacatatgttatcttaaagaataaaagtaaaaacaatattataaagaaaaaaattaacatttaaaaaaagaacaaacaaaaagtagtatttgtatggtattattttttggtctatttttataaaaactaactttgaatttgctgttattttgtaattttttctttacacatatcatgcaaatattgttttgtaaattatatatcattatttgatcattctagaagagatagaatcgattattaaaattattatattgttatgcttctttttgtgataaacaatattggtttttatgtttgatctctacatgaactatatatatacttaatatttcgtacgaagtaaaaggtgctctgctcttattaatttgccaaacacaaatagatgcatattgggctacgaagcataaaattaagaagagagaactggaagagaagataagtagagaaattaagtgcaccataataaataataactttttgaagaatgttagtacaattatttaaaggatatatataataacagctcatgacgtactgatcatctacaatgctacaagtttccaatgtacttcttaattataatgaaaggtacttatgagacattaagctaccttacttcgctatattacaaataggccacaaccctatactaactactatcattaaattttttcttttattaattactggcaatgccatcacatatagcacgctagctaagaaaaactatgtcataaaacttttgagatttttcaattcatataccatatacagtataataaaaaaacacatcataatcaatcttaaaagaactatagaaataatggatatactaatttaataattcaaaaaaaaaaaaatagtactgatatataataactaagaagcctaaaaataatataaaatatggaagataaacagtccatttcgggactttaggccctaaagtatatacaagttttacttttaggagacactgacgtttgttaattgtgtaaagtggcatatatcgatagacgtgtaaaactgtgtgattattgaatgttaaatatattagatatggcgttgtctttgtgtagacgaattaatattatatatagtaacatcttacgtaccgtttcattatttttgatttattaaaagagttttattgatcatgttcatggctaattgtggggctttttaaactttattcgctgcaaatttcgatatgatgaatcaaagatttggcaactcatgtatgaatatatatatgatagctatatacattgtttactatattgcggctggggagcggttt

SEQ ID NO: 29493 - DNA, 1824 bp, Cannabis sativa
tcgagaaggtgctaggcaccactggtgcctaatagcaatgttctatagtttaatataataatttttataaagtatcgctaaccaatcgcaaagtaacacgtttttagaaggttctaggcaccactagtgcctaatagcaatgctgtaatggtaaatataaaatcatagcatttaatgtaatgtaaattttatattatgctatactgtgatccaaatttaaattactttttgttatgtaagatatttacatcacaatttaagacactattagaatagactttctgataaaataaattatattttacatttaaatttcttatttgcatttttattgaagacgctgcctcaaaaattcaaagcatttgtagaaagcaatatttaaagcattttgagtacatgtaagttataaaacctccatcatctattttatttaaaaataaacaaataaatattattttatttattatcattgttttgtgtcttaatttaaaatgtacttaagaatcattacacttaaatatataaaataaaaacccatgatataaagtttgtactaaatttgtatatgtatatgtatagatttgttggaattaaaatatagagagttattggtttgttgaaatatatattaatattatcattatggctaattttgttttgataagacattgctcgtattaaatacaattgtagaggtttaaaaaactaaaaaatgaaagaccactattgagcatggtattcacaattactgtatattattatttttacgccatacaaaattggtacaaattcagaagacatgagtatgattagacacgaaaaaatatgaatttagacataatatgacacaatactacgaattggcacaacataacacgaaaaatatatctttaatagcacgagacaacacaaaaagcacgaaataagggctagcatgttaagaaataagggccaatatgagcaaaatacggtacaaaaatattaggtttatggattgtgtcccgggacggacacacttacagatttgtgggggctaaaaaaaattaaatatttttctttttttttttaataattatagcacaaaaaattaaacccacataataaaaattatgtgtccgtcactggtcgtattgggcttactttttaaaattttgattcggcacaacttatatttttctgcagcacacagcacggcccattttttaaaaatcataaataaatacagataggaccagtacagcacgcacgaacttacatctgtatattagaaaaagcataattttattaataaaatttcttagacaaaccatacacaaatagttaacatgatcatattacaaacttaagccaccagaaagacctaattaaagcaactacatatataatggaaacgatatatatcttagttctctcacttttaatttgtaatattactaatattaactacatcataaagtagatcggataatattgagattctgatgaaagagcttctcaaacattttcatgtgttgtggctggagagctatgcccactaataaactcccatcattagttggacaaggtataacatatgattttccctcgtacataatcccaccaggtccaatataaataggttgaccccaaccaaagtcaacctcataatttatcaatctaacccaactagtaatcccaagatttggattcctatatgtgtgggccccacgtctaatggatgacaaattaggatgaagttccaaataatcaatacttgataataagtaatcattatccattctcttcacacttccattgatgcaatttacagcataagaaagtggc

SEQ ID NO: 29494 - DNA, 2650 bp, Cannabis sativa
aacttttaaagatttgtagctagttccatttaccaagaattgctttgtattccattcaattcaaattcaaaataactacttagaggaaacatccaataatacaatgacagtgttcgaccatgcacactagtattaaagcacgctgaactaaatgtacacgtcttcgaccatgcacacacgctagtaataaagcacgccgaaccaaccaatagtcttttttttttatagaatatgaatagtctttttgttttttgaatgtgattaataaataattaagtattattaacttttttaaaaaaaaaaaaaaataggttcgggttgcgggttccaacccgaccaaaaaaaaactacttatctacacccgaacccgaaacccatttagaggctttttcgggttgaacccgacccgactacacgggttttttggtgatcggttttttctgcagcgggtcggggcgggtggccgggtttttcgggtttacgggtctaaatgtgcagcccttgtggctgtctcggcaacaacttgctaccacctatggatcaataggaacaagtgtatatttgagggatactctaatactgtttcttttgtggttaaagagataaaaaaagttatgttttatagatttcagagtcaatcattcataggcagatgactagaggggaaagggtgtaagtagagggtgtttgtttgggagcttttttgttatgctcctttgtttgtatttgcttgttgattaatgaagtcatttccttcttgataaaaaaaaagaagctgatcgatttacattagatataaaattcttagcgataaaaaccatgtacggatttgttaaaaaagtgaaaagaaacatgtactgagaagttacatatacataaaaatatattttacactttcccaatcctttcaatactctgctttcaatctgatgccgttgccatctcttttaaaatttctagggagacattattattctattctttttccaaatgttatcttttacctaatcaataatcacttctgataggcctactccaatgggagcactaaaatgtccatgtttattattacagcattccttcatgtaactcttgcagtagcctccaaattctcttttctccaagctcaggcaagctttggtggttgcagagtttgggatctcctccttatgacttccacaacatcctttagattcgctcttctccattgtcatcaaacaagcctgatgaactgtctttgactcagcatggcttccaccatgtattattacgtcaatgttgttgtggtctttatcatgtttcttagaacaagaatgaacctcaagatgatgctgctgaccacaaattggctcaatatctgccgtttcaaatgatacgttgctgatgtggctcttaccatggttgcttgagttgctttggtcagtaattgagagtttttcactctctgccaaaacagaatggtcacaattctttgagtgatgatgaccatgatgatgatggtgatggtgagcatcttttgcggaacaatcatgcgtttcatttgagttatgataatgattagtttcttccaaacatgacttcacaacagattgagagcctaaacaactgtggccatgtgcatgctgtgactccaaatcatgactggccgttttgcagcctccatggtgatggtgttgcacagcatggtgcttgtgagccgagttcccgctcttcttttcacaacaagagcctgaactgattattctagcctggcatttcgagacattgatctgtgatgaacacttctgagatttgcaaacctttaaggttttatcgttggagcaacatttctggtccttctcgggtattaatttgctgtgatcatccttgcaaccatgtttgtggacatgagttgttgaagaaggtttacagcacttccctttgtgtgaatggggatctcgtagaagtaacatgctgttaaaaatgaccagtatgcatgtcccaacatcagcaagaactgcagcccaaacaagaggatggccagctatggccaatgcaacaatggctgccttagtaatgatcgacaaaaatatgttttgcatcactttccttgtcgcctgtcttgatagcttgatagcttttggtatctttctcatgtcatttgacaagagaatcacgtgtccggtttcttttgcaagtgcagagcctgaaattcccattgagatacctatgtcagcagtggctaaagctggggcatcattcagtccatctccaatcatggctgttggtccttgttttttgaactcttcgatgagtttcgccttgtcttcaggtaaaagttctgcatggatgacctcgatagcatgtcctaactgcataccaattcaaaattttcattgtgtgttaactcctttattggtactgctacaagtaaatcaatgcagttgaacaccccattagactaaggaaaccattggtaagatgaaaagatgaaataatttgattattttccataaagggtatcttgatagaaccaaaaaaaagagtataattggctccctaaacaatttttttattaagaatctagagatttaccttttcatgtgtatgcatggctgcagcattgctatcaccagttagcattgcggtttttatgcccattaacttgagc

SEQ ID NO: 29495 - DNA, 1921 bp, Cannabis sativa
tatatttatagatatagcaggttgtatataaatagaagtgaggagagggttatatttttctatcttgtttttctcaaaaagaaaaaaaagatatactatcttgccttatatatgggtatataaaggtacactgaaacttttatttgatgtttttgtattcttcttatttatcatatacgatacagtagaacaaaacaagataaaagattatgatcaaatccacacaatataaaaaagtgagaactgaaattgactaaacacatgctcaccaatttaaaacatgcatgttctataataatatatatatatatatatataaatacttatcgaaagtacgtacctactttactttttcataaaaataaaataattaataatacaaatgataacatgaaaacccatttcgaaactgagagatcacataatttatatataataactcacaagtaaattcatgatatctatttccttcaaaaaaaaattcatattatataatatattatactagggtttgtaaaatagtaaaaattgattttatttgactagtaatataaatatgcttgattcgaccaataacttaatgcgtccgtctatctatttgttaggctgagtttttagaccaataacttgctaatataatatgagaattagtctagtactcaaagctcataaccatactagctaaatctataatcaaactaaacattaacataataaacatataaaataaaagaaaatgagaagaaaactaatttgatattgtcacggatcgccaacttcttgctccaatcttctttttcttctttcctaaggtttagtttctatctctagctagctaccccttattttcgaagtacctctctctcttttaaaacaaaagtttcagccaaaaacacgcgaaaagacaaaaaaagtctcactttgcacaatggtggcgccgcggtgataccaagcctccccacggcgactggtgcttctcgaaaattcattttggctctataaatttccgtcgcggcgactgtggcacaaaaacatattgcatgcataaattttttcagtttttgatctcgcattgtcctgttgatatttgaccaaattttaaatccaaagtgttggaacctaaaaccaaagaaattggctaaaaataactcagtagtgcaattacctcatttaatttaatttgagctatatatatattcccatatatatatgatacacaccacaacaatattcacctctcttttgaatataatatatatatgcttactcctcttgataaagttcatagttgcagtagcaataatattataccaatttacgcgatagccaaaactccttcactatttctcgactgtaccagcacagcacctatgagtatatatatatatataatacaaacacacagacacctatatcatcatttattactccatatatatacatacaaatacaacatatctatccactctcgagtttgtaatactgtaactttattctttcctccctagttagctagctcaaacacaacaaatatattaataaatacattttatagtttctttcatgcatgtgtactgatttcaatattagatagttttaactttaattttgtgtagatttgtaattatttcaaatattgtgtaaatttttaaaataatttatacttgttgaaaataagaattaaatagttttgttgaatgcttcttttactttatatgttgtttgaaagtaaattaattatttttaatttttaaacttttaaagaatgtaataattaataaattaaaaaaaaaataaaaagaattaagaaataactatttagatattaaaaatataaaacaaggaaatccgcatactcatttttaaaattgtacaataaaaatattatttaataaaatttattaggtagaacagtacattt

SEQ ID NO: 29496 - DNA, 4378 bp, Cannabis sativa
tgttcactgcaaaggaaatgatgtcttttctctgcgtgttctgagcttgtcaggtttcggggtttagtgatcgatgagtttttcagtgattattggttatcctagcataactgatggaaagcctattttgtgctaattggatgttgcatcacaaaacatattgttcagtggtgcttggacattatttgcttgttaatggtacagaaattgtaattgaatataggttaagaaaaatcattattgctggtgtagtaaacctgctttccttaggttgaggatgcttacacaccattttcctttaagaccctcagaactgtttatcacactcctcatttcctttttatataaactgttttctgggtcggatgtgcttgctgtactttctaatgtttctaagttatttaaattcttctgcagctggtaacatgcgtcatttgatagttgaggcttgtattgcaaggcaactattggacacatctgcatacttttggccaggctatataaatggacatgttagccaattacctcaaggtgttccatctcaagtgcctggttggtcatcatttctgaaaggggctacacttacaccattgatgataaatgttttggtttcaagccctgcttcaaggtatacttgcaaaaacgtgtgaaataatttagtcaagtcttttcaatatttcatgttggtttttggtactgcactattactggcgtcaaacattattttaaatattattgcatacgtgatggcttgagcaaattaagtgtgttttttagtaaggtgtgtgccatgttctaaggtcttattacacatgtcatattctatacattgtcctttaagagtaggaggcattccccattttgatggtagttcttgtccatgaaatatttgagggaaaactccttcccggtgactttaaaattataaattttttttagttttgcctggtcttcagtcacttctttttctttcctgaagccaggtatgtcagatgcgcttttttcagtaaatttattcataggtaaagccactgaatttaagctcatggatttgatggaagcttagcagaaatcgaaaaagtatttgagattgcaatcgatggatcagaagatgagaggatatccgctgctacaattctttgtggagcctcactaattcggggatggaatatacaggtaaagagaattagttataaagataaagccccaactttaaattcatcaataaaggcacaaatttcatcactttttttttctcatccaacttaccttcatttaattttctactgttacatatgaaatatttcatcatgttaatgtctcaatgcaggaacacactgcccattttatcatcagattactgtctcccccagttccggctgattactctgggactgacagccatttaatcggctatgctcagatgctgaatgtgctcattattggaatagcttctgttgactgtgttcagattttctctctacttggcttggtatgtatcgaattatcttatgcaatgctataatattagaatcaagattaggtaaagggtatagggggatggtgtggatttcttactagcttaactagtcattttgttttcaaattttcttgccaggttccacaacttgcttgttcgctaatgccaatatgtgaagtgttcggttcatgtgtgcccaatttgtcttggactctcaaatcaggagaagaattttctgcccatgctgtgttttccaatgcatttattcttctgttgaagctatggaggtttaatcaccctcctcttgaacacggagtgggagatgtacccacggttggatcccagctaactcctgaataccttctcgctgtacgcaactcacatctaatatcttctggaaattccttcaaggaccaaaacaagaggagactctcttctgttgcaagttcatcatctcctcaacctgtgttcgtagattcatttccaaaattaaaagcctggtatcggcagcaccaagcatgtatagcatcaactctttctggtcttgttcatggaacccctgttcatcagatttttgatggacttcttaacatgatgttcagaaagattaatagaggaagtcagtctttgacttctgctactgggagtagtagttcttcaggacctggaattgaagataactccctaagacctaaattgcctgcctgggatatactggaagctgttccctttgttgttgatgctgctcttacagcttgtgctcatggaacgctttctcctcgtgagctggctactggttagtttttcacagtcacttttcttgtttgccttgtccactttgtataaagagcttgtaaagcgaagcaaattagttttgggttttaagtgtgctgctccctaaactatacttgtttatgcacttaaaacattgactttggtattacagggcttaaagatttagctgactttctacctgcatctttggcgggcattgtgggttacttttctgctgaagtaactcgtggaatttggaagccagcttttatgaatggaacagattggccaagtcctgctgcaactttgtccaatgttgaggagcaaataaaagaaatcctggctgcaactggtgttgatgtccccagccttgctgcaggttatttcctttatttatgttagtttgaaggcttatatttttttgcatatgcacgactaatgttgcctgctgcatgtgggcatctcagcaaatttgcttgttcaccaaccattactattgctaacattgaaaaacttggatgttgaacttattaaagtactgcccaggaatatttcctattcctctttccagtaatttgactatgtctgaattgtcactgtaacagggggaaactcaccagctatacttcctttgcccctggctgcatttgtgagcctgactataacctataagattgacaaagcctcagagcgcttcctaaatttggctggccctgccttggagtgtctggcagcaggttgcccatggccttgcatgccgattgtggcgtccctatggacccaaaaggccaagagatggacagactttctagtgttttctgcatctcgaactgtcttcctccacaacagtgatgcggtagttcagcttcttaagagttgcttcactgctacacttggtctgaatgccactcctatgtcaaacaatggtggcgttggaactcttcttggtcatggatttggatctcatttctgtggcggtatgtcccctgtggcgcctggtattctttatctacgtgtattccggtcaatgagagatattgtgtttacaacagaagaaattgttgccattttgatgcaatctgtgagagagatagcctgtagtggtccttccagagaaaaattgggaaagttaaagacaaccaagacaaatggagtgagatatggccaggtttcacttgctgcagcaatgactcaagtgaaactagcagcttcgctcggtgcgtctttagtatggttgactggaggcttagttctggttcagtcactgttcaaagaaactttaccttcttggtttatatctaagcataggtctgaacatgaagaaggatcatcagaaggaatggtggccatgcttgggggatacgcactggcttattttgcagtgttgtgcggagcatttgcctggggtgttgactcatcatcagcagcatcaaagcggcgtccaaaagtcctggggacccacatggaatttctcgcaagtgctcttgatgggaagatatcactcggttgtgatggtgccacatggcgcgcttatgtatctggttttgtgagcctaatggtgggctgcacacccaaatgggtgctcgaggtgaatgtagatgtgctaaaaagaatgagtgttgggctgaaacattgggatgaagtagaacttgcactggcattgttgggggtaggtacagtgggtgcagctgctgaactaatagttgaaattgagatgtaaattctttttacacttttatttttgaaaatcttaggtgccggccatacatgtaggtaaattttagttgtaaattataaccctttctcttgaaggtcataacttagttcaatgaaaagcattcagcagattttgtcacaaagcagctttgattatttcagacaataatgttttagtattaacatttgttttctcctttcttttgcgaaattcattagactctaatttccattatgatcagtgtgggaaactgaaattgttgaccccctttgttaagaaaaataagtctcaacccaacaaaggtagaacaggccaatagagaaagtatattttgatagtcactcttcctactgaacaaaactattcaagcatttcacttgtgtatcataattcatacaacaccgcta

SEQ ID NO: 29497 - DNA, 1193 bp, Cannabis sativa
cttaatcaaccaaatataatggtacttttatgtcttttgaaaatttgataaaatttcagtagcttcatgtatgtatgaacaaaaaaactctaattgtacctccatgacatctccaatgttaacaaccagagcatttggaagtggtgtcactgaaacccaatttccatcctttcggatttgaagcccttcggtatcattgagttggaagaggattgtaagagcatcagcatcagaatgaggagtaaacccgatagccaaatctggttcggggcaaggaggataataattcatcctaattgattgaactccttcaccaaacaaatctctcatttcctcaccatccatcttcaaagctttcgccatgtgatctaaaatcaccatagctagctttttcacttccattgaataagcttccatagtgtctctgaaaccaaatcgaaaaactgaaataattagctgagaattccaaacacaatttgtcaaaaatcacagcagtagaaagaaagaagagacaagcctgagttcgattggaagcttttcgaaaagctgagtcttcctcaagttaagtggcaatgtggttatgtaaaacatgtctgaccaatctaacttctgctcttctgatacaacaaacaattgcccgaaaccttcatgattgtctggctgctgccataacctcttcttttcctcataaggaagtttgaagaaattctcaacctctgtcctgaacttatctagtaatgaagtactaatcccatgatttataacctaccaagcacaaacaaatttaaacaagttaacaaagctaagacataaacaaacacaattaagccagccgtgttcaagaacataaattgaacaattaaagaacagaaattaaacgcaagaaaccgaaacaaagctgtgtcagccttgctcctactccaattttagaaccaccgaatcgttctctttaatcattcaaacaatctacaactacattatcacagtcaagcaaatctaagagaaacaacactccctcaatcctcgagttcaactctttcaaacagttagttaactcaatacaaaatcctccccaaaggaaatcttgttctttctctctctctctcactctctctaaactctctttctccttgtcttgaatgaagaccttattctaactccttgttgacttgtggaaactaacattacagaat

SEQ ID NO: 29498 - DNA, 1644 bp, Cannabis sativa
gccaaacctgcagtaacaacactaaatgttatgcaacttcatttgtaaaatcaagtcattttagcatttatgagaagtgctgaaaatgagaaactgactattaccggtaaatcgcgcaagcaagctttgcagttacagtttctgcggcatacaggacatgactcagcaatgtcctcttcaggtatattaggatacctgcacaaggccattcccaatgaaaacagcaacaaaaaaaataattgacattttcagagacaagatcatcaaaaattctctttatgagcaaaatgtacatagttattagaattacctctgtcctgcaaaatcgctctcagacattttcagtattaataattgacattttttccatgacaaattggcaatcacaacacaagttgttattacaaaaatcaatactttgatctttaggtatgatacaaccacattgccttcatttttgcttctgtaatttatgtaaagctatgatgctcaaactcattaaagaaaaaaacgagctgaatcatccggtacagcacaaacttcttttgtttactttttcaatttcaagaccaataaagacgaaagaacaaaaacattagaaacataagaaatcaacaagtaggaaatcaatgcataccagttctttaggcaaggtatacaaaaccgttttctcttacactgcttacaactaacaaccctgcctttgtcgttcctttgacactgatggcacattaaggattcgtgacatttcacactcgacccaaggacttccgccagcttcgttttcttcctctttcttagatcaaccgcctccacggaactatcatttccctgacatttcttcttttccaaactttgattcaagagcttcactctcgcgcgctttcttcctcgcttattcccagaagctgaagctccatcgccgaccttaatttccacactctcactaacagatgccaccagctgcgcattcttccatcttgaactacccttcaactccggaccatcatatatcttctcttccaaactttcattcaattcgaagcgctcccgtctcttctttattctttctctccgtctcttcagagaagttgaaactccatgactgaccgcgtgggcagctgaatccccccgagcttcgacaaccttcttcttccaaccacgagtctccttcattatcacctcatgtcagttactactatgactgtgtcttatgtctatgagcacagaaatacagcaagaatgggatgggaattccccaatttttcaaatggcatacctacctacccaccatttttcttctttttcatgcctcacctcaaaagaaaaaagtgtcttgaaagaaacacagaatttgaagacacagtcccgaggctccgagactgtgcactagtgcctacaacttaagaaaataaaaaataattgttaggtggtgtttggtttggtgtaatagaatggtaatagtgatagaataagggaaatttgattttctatacttattaaacttaaaaaaaaaaattaaaaccaatacattttacactacaaaaaagtaaattttttgaaaaccctaaaaatacccccctcataactcaaaccctttctctctcctccctcaaactctcagccgactctctcaactcacca

SEQ ID NO: 29499 - DNA, 995 bp, Cannabis sativa
taaaggtctagaaggcaatatttgttttttagaattgctaaaaaaaaaaagggaggtactagaatcttctttgatgtcatattgctattgatgtaattaaatagcgggtcaaataaaacttaaaaaaataatttttagagaatattgataatcaatcggaaagtattacctacgaaaggtgttgggtatcactggtacccaatagcgatcaccaaaacttggtgcaaatcttatccctacccttttagtaacttagacaatcataaaaatcacgtgttagttataggggtcttagagcatcttcaataatggtattctttaaagtgtcaaaaacctctaaatcacccaaaatataatattttattttatcactcttcctcgtcatttttaactttttttgttctaaaatatttaaatggtaaacacctctaaaaattattaaaataatatcatattattatttaatatatattaaataattaaattttcttattttacgacaaaaataataataaaaaaataagaatgataatatataaagtactttattgtatggcattctttgttggcctttttttttcactccaatccaatggtaagcataatattcaaatatgtcaaaaatatactcatgtcatcaaatatttttaaaagcattttcattggagataattttgtatttcattctcctttaattaagttatcagtatctactttaagagttctcatttcattaaggatgacactgccacaacaagttaacctctcaaaaggtcaagcttaaaccctttcataaaagcatattcatatcactacaccacacagcacatggtagaagacattttatgtcgagtattgctatttggcatttaagatatctttggcaagaagtaaattaagccaaataataataaaattaaacagagtgaataataaaaataatttttcaacaaattactattaatattgcttgaataaacataaaccctagaaaa

SEQ ID NO: 29500 - DNA, 2664 bp, Cannabis sativa
agaagtcatccttgaactctttttaatttggcaaccttaaagtgatcttatgatcaatagtatgagtcttgaggtagtacaagcctcccactccgtgcttcctcataggaccagctttgacagagtaaaaataaagaatttctagtggggtcagacattcccactctaggatcctatatgaatttggtgccaactgaaatggggcaatgctgaggtagttgcaaaagtctttaaagttttccttgagaggaagaattgtcccagctctcatatatttgaggctccaagcacctattctggaaggctcactggtactgaaaccttcatctcagactagacgtttaggggaataacagctaaattccccctgagcaacagacctaatgcaacgtccctgctcattcttgatgccacatgatcttaaaacatccccaacataaggtccaatggacctacctttagattctattaactcagtttcaaaggtaactgtgggatcttgaggagtctttgatttatgagctttcagagccattatctcaaagtctaagtcacctagtgaatatgcaacagtgactggaggtgaaaacatgggcatcgctaagggtatctcaactaaattggagggttggccaagctgcttctcgcaaataatggcacctacccttaataacctcttgtaagaatcacctataactgctagaggtttcttcctggccagatttaacgaggtgtttcctaattttttcatcatttatttcaagtatggtttgagatctttaaggtttgggcttaaattctatggcagaaaagtaaggacaaactaattctaagggttctgagattgtacactctgggataaattaggacatgattatagataataatgccccaattcctggaaaaatagagcacaaataaaagctaaaaatctgcgaattgtataaccttaaattttctagtcttaggattatttaaacattaaaaaaaaactacccaagcagcaaaacaatgcagacaagaaaacatataccaagaaattaaaatttaaaagcacgaaggaaaaaagcaacaaaaaagagtgtcacttactgttttgatgaggtattataggcagagaagagtttcgtgatggaaattccaaagatcgaagagctgggtcttgatgattttgaggaaggggaatgcaatcagataaaacccgcaaaaggaatataagaaacaaagagggcatccaaattcatatgagaggttggttgagatttttttgaagcttgaaggttcgtaggttgaaaatggcaaaaatagtgcacagtttcaaatttatacctaaaggtggcaatcgtttgatcaaatgaaatctgatcaaacagatgggaactgtacaaaaaaagaacagtcaaagccttaaataaagaaatgatgtgccttgaaattttgaactgccgaattctaagcatgcaaattttaaataggaaaattataatagtacccttgaagacatttaaaaagtcatttttttttattaaaaaatacttttgagggagcaattgttatacacaaaattcgactatcacccagaagctcacatgtgtactttagaagaaatatgaatcagcttaataaatgtactattaaatgcaatttaaataactcgcctaaggtattacggttgatagaaatattcaaactcgctcctacgtaagcagatgcaagataagagtaataactattacccgttgagattggcaaaataataagtccatctagggatagacatagtacataataaaagttgtccaagacgagataattaagagcttgcagctcattcacccacatacttgcgaataagagcttgcaactcattgacccacatacttggaaataagagcttgtaactaattgatccacatatttgtacgtggagagaataactacattcaacaatctcgccctccatacgttgaagtaagcatctcgctaatatcatcatagtaaaagaggacatgcgagaagcattatatttatacttagtatttttcctataaaaacggtaaagaatgacaactcatacttagcaaggaataaccagcataatcagcatagccatttaaggataatgataaaatagcgattgggtagttttaaatattttcccatgttcataaaaatgaaatgtggggaatgtccacgtttaattaatagttatgaatgattagatcccaaggaataattgtcaccctatacccctataaataggaacagaatccaaggtaaaaaagacgatgaatttgagagagaaagctagatataatatttatttagattatcgtactctgtatcccaattattatccctaataatatggactcgtggagtatgtatattttaactacaaaaccacgtaaaaatatttggtgttcacttattactataattaattatgtggtatattattacaaaaaatgtttaaatatttggttaatgaaaatctatgttaacaataaccaattaacacttactataccatgagttgaacgagtttttatagctaacgtacatatccaatcagtcttcaggatctttaaaccttagtcgctctaataccatattgcaatgccctaatcgtaagggcgccacgtgtgtgtacttttataaatt

SEQ ID NO: 29501 - DNA, 1868 bp, Cannabis sativa
ttattattataactattagacacacaaaacttatacggtcacactcacaccaattaatcaagtggttcgaatttatgaaaaagagtttagagtttaaagttcctctcctataaatgtatctgatacaattttccaacagtttttcaagaacatcacaatctcatttttggatatcaaacaaccaaatctcttcctaaatcaaccttttattgacacccaacttcaaatgtgttagtttttctctctatttctttgcatgctttgtttgtgactagagtctagagcagcttatttattcccatggcatacttattttctttttcgtaggcaacaaattcactaatgcgtcttttcttaaaaattgctactaatttcatccaaacgtaatctatgaatctcaattcaatacatttaggggctaaaatcgtttcagaaacaaataaatcataataatttttatttatattttcagccatcttttgatgttttgaaatgactttataaaaaaaaaaattatcaaccggttccttttctcagtacttttcacatggaattgggactgattcaaaagccaaaaaaaggcaaagatcacattttgaaagattaagaagatgaaatcgcagtagcttctacaaatacacaattgaacagtctttaaacccctcgtattgggttagagaagtttctactaatacaaattatcataataattttttatataatgtgcaaacgcaagtgtaaatttccttgttttatatcagtgaaaaagggcttcacaatcacaacaaatatatgtaaagttaaacttgtttaatctttcactatagtggaggaaaaacaagaggtaagataagattccaacagaaacatcaaataataataaatcgaattcttaaatgcttcatttggaagtctttcaagtgaaaagagtaagttgagaaacaattttatcataataacatcaaggatctggtattgtattgaattgttgtctcaagtcaagacaatgcaaggcatttctatttacgtttagaagcacgcttgccttgaccctttttaggcggtccctttcctcgacgtttcaacatttcgagtcttgataagcgcctgccaattaccaaatacacaaagtaaaagaagagttatgattcctttaaacatgcaataatgagataacattcttcaaggacgtcacatttttgacacaagatttcccacaatgaaggttcttagtacactcaacatacaaagactcgtaattttatcaggagaacaaaactctctaaaactatataataagatgtcatcttcatcatcataacaactcagagaaagataatcccaatatctgagagctcaagaaagatccaagtctacttattgatccgaatctcagtatctgagagctcaaggacatcacatttttggatatcaaacaatcaaatctcctcctaacccctatcaaccttttcttcatacccaagttcaaatgtctaggctctagctagctagccctaggtgagtgagtatggtggtgatcttatacaactttccaacagtttttcgaggacatcacaatctcatttttggatatcaaacaacaaaatctcctcctaacccctatcaacctttacttgacaccaaacttcaaatgtatcttatagtttttctctctatttctttgtgtgtgctttgtttgtgactagagtctagagcagcttatttattcccatggcatacttattttctttttcataattctgggcaacaaattcagtaatgcgcctttcctcctcaaccccgtctcggtctcattataactcattctaactagatgcaaaagtaggcatgtaaaaaagcaaaacaat

SEQ ID NO: 29502 - DNA, 1530 bp, Cannabis sativa
  modified_base (651)..(651): a, c, t, g, unknown or other
taaaaaactctaatcactaaactaaagaaattacaacaaaaactatgaagaaaatgaacaaatacctcagttaaccaataaacctagcttgaaaatgaaatcgacgaagagaccacacacacagcagcaacactcgaagcttgcttcgatcgttaatggcaacccagcacactgaagaagaagaagaagaaaccctaaactgagagaaaatgaaaggaaaatgacaaaatgtgtgattgattgaagtataagcaatgacggtaagcaatgagtactaagctagctccatgtaaaaagttagctacaatagctgtagcttaattttcttttgtaaaaaactaaaatacgggaattgggctaaagataacaaaaatatggctatcataaaacccataaaagggaaaacaaaacataaatcccatattcaaaatgctttattaaaaaatgccataaaaaaagtaaaaactaaaaaaaatctcataaatagtgtaatttctacaaatgaaattcacacttaatgcaaatcggatgtactatgagcgaaatagtggcgattggattgaatgaacactccatctaatatcatatcataaatattgtttgtagcaaaacacttccatttattatttattatagagtaatttgcggcanaaatacctaagtttaacttctagttgcaaataaatacttaagtttggaatgctactaaaccaaggcgtatgaaaccctcggtttcctctcatggtgaagaagaagcggacggtttcgaagccgatcaagagcacgacggtagtcgagacggagaccggtgacctcccctcaatacctgaaagcgatgaccaacccgcgactgaggtgttcctagacacgtgcgagaatctggaaggagaaccaatcgaagagggtttaactgagattcagaggccgactgtgttacctgcttcccccaaaccagtgcgttgggctgatgatgtcgagagggaggatttcagtgctcaagctaaagacgtctggagcaggttcaagaccaatcaggtttgtactccatccacacgtcttgaattcactgaacctattaaaattggggaccaatctgttgctaaattggacttagatgaggttgaatgtgaagcatcattctggaaaaactctattgtttgtattgttcttggagcaaatccaccgtttagggtctttgaggggtttatcaaaagagtttgggggaacttgggtattaaaaggattgcaagaatgaactcaggctttacgttagtgagtttcagggatgaggagactagggatttgattctggaaacaggggtcattcattttgataagaaacctgttgtgcttagaccgtggactatggacatggactcagcaagaatggtgaaatctgtcccaatttgggttcggttaaatggtcttgggttgcaatattgggggaagaacactctaagtgcgcttgtgagtaccataggcaagcagataatggttgacaagtgttaattccatttttggcatatttaa

SEQ ID NO: 29503 - DNA, 2239 bp, Cannabis sativa
attgttgtcaggggttcagcttctatccacttagtgaagtaatctactatgactacactgaattgtacccctccttttcccttgggaagttacgaattaggtctatcccccacattttgaaggcctatgagtcagcattatcgtgagcacattaggtggagttcttagaattttcgagaaactctagcacttgtcaaatattttgacgtattccattgagtcctcaattgttattggccaaaagtacccctatcggagtatcttattggataggctttgcctcgtggcatggtttccgcaacagccctaatgcacttcaatcatttgttgctcagcctcagccttggcaaaatatcttaagagcggcattgagaagttttatctctacattactctgtcaggattagatacctagcagcttttcttcttatcttttttgcttcattcttgccttctggaaaggaacatgtttggatgtaaagttcaatagctgtcatctatcttggacttttatccaacacgtcaaattttttatggattgtaatgttgggttcctctaggaattttattagcaccttgtttgtcttatcagtaatggtgttacttttcagatgggcaagtgcatctaccatagtattctgctctctggagatctgcgtgattgtgtagcctttgagctgacttagtaagtctttgattttgctaaagtaggccattttttcacctcgagttgtgtattcacctaggacttgattcacatctagttgaaagtcgctgaatatgttcaggtggttagcccgtacttcatgtgccaacttgaggctggctattaaggctacgtattcagcctcattgtttgaggttttgaagttgaattcgattgctctgtgcagttgcttcccctaggtgttataagagtaacgcccacaccagaaattgattagtacaacttcaatcaattaacatcgagtttccatgtcggttcttcaagtttttgttgcttctcttgctctcgcttcttctctagctcttacttttctcctggatcttaagatatttcaagagatgaatttgtgcactcggccacgaaatatgcaagggcttaaccgtttaagggtgttcttggttaaaaagtgatgtcgaactggcaaagctcaatggcccacttgagtagttagtctaatgctccaggtttctttaaaaccggccacaatagttgattggtgtacacatttataggatgtggctggaagtatgatcttatctttctgtaggccaagagcaagctataagccaacttttccatgagtgggggtgtagagtttcggcgtcgattagtctcccacaattgtagtatatagggtttttcacacttcttcttctcttgtgagaacaacaatcacaacatgatctatgattactaggtacaggtatagctcttcattgtctagggtttttgacaacacaagtggttgagcttactgtttctttagctcctagaatgcagttttgcattcttctatctactcgaattttttgttgcctctaagaatgtttaagaatggtacacatttttctgtaaacttggacacaaatctgcttaatgcattaatacattctgttaggctttgtacttccttgatggttgtggatgacttcatgtctaaaagggcttggatcttttctatgtttgcttcaattctcctggcattgactatgaagctaaggaatttttctgagccaacccaaaaggaacatttgagggtgtttatcttcatgttattgttacagaagattttgaagcattcatcgaggtcctccacatgcccttaaccattttggacttgaagagcatgtcatccacatacacctccatgatgcaactgataagatctttgaacgttttgttgacaagcctctgatatgtggcccctgcatttttcagctcgaagggcatgactttgtagcagtataagcctaagtctatcgtgtagcctgtatgctcctaatcttgtggttgcgtccttatctggttctaacctgaaaaaatgtccatgaaacttaggatttcatggttagttgtggaatatactagctggtcaatttgggaagcgagatgcagtcttttggacatgctttgttcagcttggtgaagtcgatgcacactctccactttttattaggtaagggtatcagcactgggttggatacccaaagtggatagaatgcctctattatg

SEQ ID NO: 29504 - DNA, 2244 bp, Cannabis sativa
aaaaaaaattaaaaaactagcataatttttattttttgtggcaaataaaattagtataagtaaaatattgtttttataaaataaaaattattaaaaatatagggtacaaatttttaaaatttaaatacatatatatatataactcattttttagatttaaaaaaaaaatcaatctagagtcatttgtgccacttgtcatcaatctatggtgtgatgaagctaagctataatgagatggccccacaagaatggtcaacattttattttattttgaaatggccaatattgatactaatgtggaaacctaatcttataatagtgctatgtcccttatctgctgatgagagaagaatcatgtctaaataagaattatataaaaatataatatatatatacatatttatgtcatacatatatatatatatatatccactcaagtggaaaggaacaaatgctcctctttttctatgttctatatatgtatgtatgcactataatgagatttttagtttaattaattatatgtttataggtgatagatattgatacgatattattctcttattatttgataaaaaaataatggatggattaatgtttctttttatattaattagaactgttaagacaaatttttttcatgacctttattggatgtcatcgatatcgatcaacgatgtaataattattggcgttattgatgtgtctaagaaaaaacaacgtcaatacattattttgatggattaatcgtgtcgatcaatacgcatcaataataatgattgttaacatgtttaatttgatgttaatagagtattgatgtcaaaacataacaaactattgccaaataaataaaaagtccacaacatttataaaccctaaaatataattctcccttttataagaaatttccctctagtttcccgactatatatactctcctctctcccacccaaaacttttaaaatataaccttttataagaaaatttctttcagttcctcgacaatacttaattccacgcaaaaattctaaattataattctatactttataagaaatagcatatggaaatttgacccgtgggaatgaatacccataggtacccaccctaaatggggcgagaattacttgtcttaatgggtaatgggacgggagtagagtgcaattttatatacccaaagcgggttttgggtagggttggggatggtactacccaccccatattcgactaagatatatagtttctaaactttctatataattttctaattattacaaattaaaattattgactatatatacttataaagtcgactattaatcttcttaatttactgtgtaaattttaataagtagaatgtttctttactttaaagtgaatatcttgtttattattttcattttgaattacattacattcttttcttcttattattattattgttttaatcttaatgggtacccatacgtacccattggagattccctacccctaacccatcgggaattaagctgggcgggggcggtaatggagggcataaatgagaaacgggggatgggattgggaggtgcattacctacttattacctacccaattttcatctctaagtctgaaatgatggcaattttatgtgttgtaattcttttgtttttatggtagaatatgtaataaatttaaaatatgtactataatttattataatgtgacttataggattaggattttactattaatataagctaagaaatgattattacaattatggaccgagaattaaaaataattaacatgcatataaattataataaatattttaaatttattacaaatctagaatatttattttgtgtggtggcttattcatcattaagaaaatatttatacttatattagatttacttttactaaatttatttaattttatgggggcttttctactattttggtctataattatcaaattaaaaaaaattacatttaattttttagaaaacaatatttttattagtgggggctattagtaccagtgggtcggatccctgtatacatggtcggcccaaacattagggagcttggactattgcataagatttttttttattatccctttatatatttaacataataaatatttttttaataatgaatacatatataaatgttcataatacaaaacatatatatttttataaatatgtacttataaaaaataatatattcttttggtctcaatacatatgatt

SEQ ID NO: 29505 - DNA, 4447 bp, Cannabis sativa
attgaagaaaggaatgcacttgtcgatcgatctggagatgaatcgacttagggcgaataccttcccaatcaagctttgtacatccttgtgtttcttcggggaaggcatgttcaacaaggcttgtattttttcagggtttgcctctacttcgcgttgactaacgattaatcccagaaatttccttaatttgacgccgaaggtgcatttcttgggattaagcttcatcccatatcttcggaccacttcgaagcactacgtgagttcatttgcatggcctatgcatgttttggatataactagcaagttgtctacgtatacctccatattttttcctagaagacctttaaatatccggttaaccattcgttgataagttgcaccggcgttctttaatctgaaaggcatgaccaggtaactatatacccccttgtcggtcctgaagctagtacactcctgatccgggacatgcatttttatttgattatacccagagtaggcatccatgaaggatagcagcttaaacctgaggtggcatgaaccacttgatcaattcgaggcaacaggaagcagtctttcaggcaggccttgttaagatcagtgaagtctatgcaaacacgccacatcccatttggtttaggcactaacactgaattggccagccactccgggtagtacacatcccagattaggtcgttggttagcagcttatccacctctttctctaaggcatatgcctttactggatcgaggggacgtcttttctgctatacttgaggcatgtctgggttaacattatggacatgggtgatcacatgggggattattcgggtcatatccctttggcaccatgcgaagacatccgtggctgcccttaacgtttttatgatcttggttctttcctccggctctaggttttctcctaggcgaataactttaatggagtcgaggtcgcacaaacttactttctcaacacctcaataggttttgtggttgctttagatcccacatggggatccaactcatcctgctatgttgcaatgggatcttcgttcctgtgtaccaccaacactaacaagtgtactgcgacattgtaacattgtgttgcctctccttggtttcccctcaccgttcccactccggcttctcgggtagggaacttgaggcacatgtgtcgaatgaaggtgatctttccaaaatcgaccaaggccggtcggccaaggatggcattgtaggcggtgggacaatctaccacaacgaaggtgcagtatttgaaagtgctctgtggggtgtctgggcacagggtgacacccttacttttcccatagggataagtgtcatccaattgaattttgtgagctgggaaccactaggcgataggtccctgtccgtgagccctatggccatgaaggcttctttgaacaatagattcacggagctcccgttatctaccagtattcttgccacgatcttgttggcgataggagtttctatgaccagagggtcatggtgagggaagcgcaccggttttgcgtcttcttttgtgaaagtgataggttggtccatgagcctgggcctttgcgctgggagttgagtgacttcccacacttcattgtgcttttatggccccagcataacgcttcaacttgttcttggtggttcctccaatatgacgcccaccatggatcatggctactcttccattcggtcgaggttgtaattcaagcgcttgctgagggagtgcccctccgggggttacctaaccttcaggcataccccctgttcctccctaaggcaagaggcctccaactgcaaccaggtttaagtgcggtaacctatttttgatccattcatacaagtgacctaattagattaggttctcgattttgtttttcaggttcttgcactcgttggtggtgttgtcaatgtctttgtggtactcacaccttttgttgggatctctccgggagctatccttgtactagggggaggcttttgataatgtgtagtttgccgagtggcgaagtacacacgctcctgtgtatccgtaagctccgtgtattgagtgtattgggggggtatatcccctccgctgtcatttgtcctcagtccgagtactgccctttgaggacctcttactctgggagctctgagaaggtcctgccaggttggcggcaggtgcggattgggatggagtttggacgctcaaccccaagggattggtcatgggtgccccaaagtgtgataatgtgggagctaaagcgaggctttgattatatcctagggtagcggagaattgtattctgcttgtttgaggagtggcaagagatggggctcccgaaagctgtgctccaagtacatatcccgatactctggtcgggtagtatcctccgtaagccactatttgggcttcttccaagttaatgtatttttggaccctcttctgaatcttggaggttagctgttccctcttgctgcagctcgttccagaaaggggtcaccatgcgaattccagcctaaagaagggtcagttgttgtctgtcatccaccttcttggtctttgaagcctcctctttgaatctttttatgaagttcttcagggtttccacaggcaattgttttatgttagttagggcgctgacttcgaggttgatcttccttgccgcgacaaactgacttgtaatttgttctaatagtccactgatcctggctccaactttttgaaccattccttagcagaaccgcctaatgttagtggaaagcatagacactttgcgtcattgctaacactcatgacggtcatcaccctgttaaaccatgacagatggtcactagggtccgaatctcccatgtaagttgccatttcgggcaccttaaattttttagggagttatgtccagtatgtgtcgggcgcatggctcccggtcctcgcaatcaaagtcgaaatcttgccctttttgtctctaggagactctggcaatgtctttgcgtagtattgccagttcagccaagattccttcattcaaggtgcctctagagactggcaatgcattttttttcttttcaagatggtttcttaagtcaccatgtttctcattgattttttttcttgaatcagctgggggatacctctgacttttcctccccctttccccaggttcttggtgcacggatacgctctttcggtcctcacgatcctgaaggccaagactcgctcgagggagcttgcccctctgcggacctttcccttttggaaaataagagcagaattttcacggatttgtgccctcctgtgtctcccaaggatcgaagtagggtttttctcagtgttctcctcggaagggtattgtatagggcttggttccctggtcttgggcctctgagtacttgatgaggattcttcttgtatttcctctggtcccgcgaggatggccttgggatgtacatgtattccaactgtttccatatctttttgcatgacgaccattatctcatgcatcctcttattctgttctttttaggcagccagttcggcttcatgatcagctaccttttgccttaggaccagcagttcagtatagctaccttcgtcgtaatgttgtacccttcaaagttttcttcatattcctcatcgttcgtctcagctcgttcctcaaagcccacatttacccgtgacttcttcgccttatgggttctgagtatcctggggaggatgaggtttgcgtgtgttgttttgagtttccaccattgttgtgcttattctttgactgtttttttctcaacaacgcttccgacaactctcaatgaaagcaccaaaatgttgactgaggtttttggtaaccaattaaatgagataatgatgagagttttggaataattaatgcaggtgatattttcgtggttcgggcattaatgagccgtagtccacgagtcgtttttattaatgagagttcttatacagagaatgttcttggtgagtttctctttctcttattttttttttcgatcgatcccccttcccattttgttcatgggtatttatagagtttggtaaggatagctaaaaatggatcacttgtctttgagtgcgagtaatgtatgtgcacaagttcctaagagatacaaaatagggcatacatgacctatgtcgtaggtatcatagggattaggtgagatttttatccttctttgattgatgtgattcttcataatggagtcgtcactaaccccttcgattatcgtggaatcgccgtaaacgaggcttaagttgtctaacatgttctcttatgggcgttccaagacgttttccccatgctgcattaaatgtgaggtgactgttcgaatagattttacttctcccggagatgcttcactgtatttctagctcccagagaggaaggacatgctttatgtacttctctgggggctcactccctgaagcacacttatc

SEQ ID NO: 29506 - DNA, 2866 bp, Cannabis sativa
aaaaaaaaaaaaagaatatcagaagccaattttacagtaaaaatgttatttttgcaaaataattctagaaatggtacttttgaactataaagtaatttgatatgatatttgattttgtgcagtattgggcaaccatgattacagaggcgatgcagaggcccaattgagcccattactacgcaaaattgacaataggtggatttgcttgagatcttttttcgtaaatgctggtaagttacttattactaccaagtaatttgcggtataaatacttaagtttaactcctacttatagataaatacttgaatttaatttttaactgtaattatgactaagttatatttcatggtttgttgaagaaaatatacacttacaaatatttaccaaaattgtaccatgagcttcaacattacatatttcatgaattttttttagagcgaatgctattttagatgatttattttacaaaaattaccgattagactttttattttattaaataataaattgaactatgtatttttcaaaatggtacaaatattgagctgattttttgtcaagctaaaatttaataataacttgatctagttgcattatagcaagattagttatattttttgtatttgttcgtgctagaaattatttttaagtttgttgtattaaaaaaaattgcggaaagttgtttagggtactatttgaaaaaaatacagagttcaatttgtcatttaatataacaaaaggtaaataataatttttgtaaaatacaaaatacaaaatagtattaaccatcgttttcataatttttatacaatgtgtgcaataataaaattattttaaagaaaaaaattcaagaacagaattaaaaaaaatatatggaaaacatagtgctactattttctttttctatatctttttaactttttcttataatttttttcatttaaaaaaaagccatatttttgtaaactttggctataaaaaaaaaaaaaaaaaaaaagagaaaatttcccttattattactacatttttctttatttaaaatcactcaattttcactttgtaggaagatcatttatgaaatttgattattattttttaattatttaaattttgtgtgcataaattagaatttatctaacataatttttatttatttgtagaattggcagatattatatttttggacacaactccatttgttgatatgtatttctcaaacccagaaaatcatacttatgattggcgtgccatttcttcacgaaaggattacatttcttccttattaatggtaaattatcatatttatttatgcaataattataaaaataggtttttaataatttattttttcttcgaaatactcatcggatagaatgtaaagaattttcgacatgatgtttggaattctctaccaagtatcgtaaaatttcgatagagtatcgagaaatgttagagtggttataagacaattataccaaaaattatcaaaacaaaaattgtcgaaaaaagaaagatatttttccaaaaaaccctaatttataattatgaaatataacaaagataaataataaaataaatttcgttacaaatatcttcggaactgcgttcttttttcatcttgccctaatcaactgcattcttgtaaattttaaaaggatgttgagaagattttaaaggaatcacatgccacgtggaggatagtggttggtcatcatgcgattagaagtgttggacatcatggtgatacaaaagaactcatagagcaacttcttcctattcttgaggtatgtaatattaagagttcattacatcaattttcaaaattatttgaaacatacaaaacttactaaatattttgtttcgataatattttaggaaatggaaattgttcgaaatatgtctaaaattcttgatcgaatgtctagaaatcctaacaaaagtttcggataggatacaacatcactacaagatgtcatgttactattaatgtaattatgtattggctccatatattttaatgtaatcattattatagaaaatgattaaccatttacaatggatcaccttgtgctagtgttcggtttactgatgcctaataagaatgttctttatgttgccctctactactaaagtaactcacttttgatgtgcgataatcacaggccaacgaagttgatttttacatgaatggacacgatcattgcctcgaacatgttagtgacacaaacaggcaagaaaagattacaaatattattaaatttttatttaacactagaaaataattaaaaaatatataaatatatattactaattaattaatatatttgtgtagtcccatacaatttttgacaagtggagctggatcaaaggcttggagaggagacataaaagggttaaacaaagaagggttgaagttcttctatgatggacaaggttttatgtctatgcaattaacaccaaaagaggctcacattgctttctatgatgtatttggaaatgttttgcacaaatggcaaaactccaagctccttcaatcctctatataaattaaaattcatttattttctattttggaaaatcttattttatttttctttctaaactttagaaagaaaaaaaatagttataggtttagtatagactagtttaggttagaagattatttactgcatttttgttcatcaatattgaataattattgatttttgggaaattacaaaaacaatattgtattcaataaaaatattagcttattttgttagatttataaaattaatgatgattagcataatatcattggtataatactcaataatagttcatcacaaagaatatcaataattttgtagaatattgagccatgca

SEQ ID NO: 29507 - DNA, 4329 bp, Cannabis sativa
  modified_base (37)..(44): a, c, t, g, unknown or other
  modified_base (4270)..(4298): a, c, t, g, unknown or other
ttaggatgttaatgaaacatatatggtagtaaatctnnnnnnnngtaaaatatatccaacaccaaccacgtaaaaaactggttgtccctttttataccttctcttttggttattatttcttcagttcttattatttttattctgttttcgaaattctctggaaacatttttggtactttcattgagagctgaaggaagtagtaagaccgccagaaaattacatctaagtaatcatggctctcgtttcaccagtcccagcgccaaagtacgagaaatgagaaatccttaagaggtgactagttgccaaaaaagctgtcaagaggaggactagaatttagatgctcccatcgtagaggatgcagaggatatgcatgaagatgaccatcaagacaaagccactgagaataatgttggagagaaaatccagcctgacgagtcagaccccgtggtcattatggcacgacaactgcaactgagcgaaaggaggttatctgaacaagatcaattcaacgagctattgcttggcaagatgaccagaatggaggatataatgaccgcattgactaagatggctctcgatgtacaagcccctccaacaataaatgcacctaagaaggctaatctgaagtatcctggaactttaggttttcacaaaaataagggcaaaggaatcgctactggggaactaaagaagactccatccatgaagcagccctagaattctaaagctgctgaccaacctcaacagaataggaaaggaaaccacgctttagggcatggagaccaaaccaattctagaggcagagtcatgcagagagacaagacagacggtagaacctggaagctatagtctcagaagaaaacaccccctcttagtgattccagtaaccatgatgaggaggttaaagaactgcatttggcgtcggatgacaatggaggaagtcttttaacaaacgacctcctaagaaaactagatgctaaaaccgaaaaagccagaccccgcaaaatgatgtgaggaatgacatcaacgatcgcattcgcagaagagaatccccaagtgatatgactcaacatcttaaagataaagttgaaaagttgatgaaaatcactgaaaagatctctaggaaacaaagtggtgctgtatccgactctgaggaagaggatacggagccttgcgtaaaaagaatcattgatgcaccattgtctgagcgtttcaagatgccccggatggaattgtatgaaggacagatggaccccagggaccatttgtccaaatacagttgcatcatgccagtagccaaggccagtgatgatgctaaatgtttgtatttttcattaacactaagtaagtccgtagaggactggtggaagaggttgtctttggaattgatccacaactagagagacctacaagtaatgttcaagaaacagtttgtaatagtcaaggattatgatttggaagctagctccttgacaagtgtaaagcaacaataaggtgagagtatgatgaagttcatacagcgcatgatgaatgtggctgccaagacaaaggtcactaatgacatgaaaattttggctctaacatcaggacttaaacgtaaaagggcagacaccttaagtgaactcttaataagagctcaaggattcataaatctagaagacgcttatgcctaagcgtatggagtactccctgcaccttccactgaagtaacaaatgcacaaccttcacaaatgacaactccatccatttaccctccaccaactgcttttactactcccacggtatatgaaaaaagtactttcatatagccagcagtacaagctagtttctctaggtattgggctacatagactagatacagtactgctcctagacaaataaactagaatcagagtgaatctacaaagaaaggcaagacacaagaatcaagatacactgagtatacaagtctcataaataaccaggagaatgtatacaaggcaacctgcaacacagtacactacaggaacagacctaaataaaaagtgtgagtatcattgtgatattggtcacactaccaatgagtgcgactacttaaaggataaaatagaagggctggtatggaatagacacttaaccaattaggtgagaatcccaatcatctatctaggacaggtagttgcacatggacaacttttcgttctcgaacaacagggagccataaatcctcctcagggagtagaccacccacagcttcctggagtataagcgcccaacgcagaagcccttcagggggcacaaaatgatccagtagtggcagtagtggtagcctctagtcctagaaatttgtaccctcctggagctgcattaccaactttgaatggtcatgcggaaactatttcaagtggaccacatatttttggaagcactcgaaatgcactaattggtacctaaatgaatttaaccaaggcaaagcttgtcacttagtacaatcacttgcccagcatttgagggtgatgaattcgcttatgactttcacagaagatgatgcccgacatgtccattttctacataatgatccactggtgatagaagcttagatagccaacaagagagtttttagaatcctagtggataactgaagctctgtgaacatcatcttcaaaggagccttacatgctattggcctagtaaaagccaatgtattaccctatctaattcaattatagggcttcaatggagattcgttgattcccatggaaaaattcagctcccaatgactataaatggggaagttcttcgaagcaatgcaatatcctccttcaagtacaacacatttatgatagtagagaatgttatcttgtgaagaccattcttaatggattttggagtggtgatatcaattcgacgtctgtgcttaaagttttcgagtaatacgggaagcatagtgaccatcagaggagatcaacggagtgcgcggagttgttacagtgtttcaaccagaataatacttatggtctaggtaggtactaactttgaaaccggaacatcttttcagccagtactgggggtagtctcgaaagatgagcttgacccacgaatcgacgtggagcgtgtcatagagccaatgtaggaagtggaagaagtctatatagatgacaaaaatcccaccaaagtcattcgagtgtgtagtaaaagaatatattgtctccataatcaaggcaaataatgatgtgttggcttggcatcatgctaatatggctggtattagtcccaaggttgtttgccatgcattgaacatagatctcaatgctgaaccaatttagtagaagtgaagacctttagatctagtaaggtcagaggcggttaaaacaaaagtggacaagttgacaaacatcgactacctcagggaagccctgtatcctatatggctttccaacccaatgttggttctaaagcctaacaggacatggaggatgtgtatagactttacaaacttgtacaaggcctgtcctaaagactgtttcccgcttccacgcattgattagatggttgatgctactttgggatttatgttgttgaccattatggacgctggctacaaccaaataaaaatgcacgtggttgatcaagagcacacttgtttctagactgacaaagggatctactgctacaaggtcatgccattaaaattaaagaatgctggagccacttatcagcgaatggtgaacaagatgttcaacaatgtcttaggaaaaatattgaagtttatgtcgacgacatgctggtaaagtagaagacgtctaaaagccattatcaagatctataagaggccttttccatcattcaggactataaaatgaagttaaacccaaagaagtgcactttaggagtttcttcagggaaattcctgggttttttagtgagctcttaaggaatcgaagcaaacccaaaaaaaatcaaagcatttatacacatgacctcacccaagaaacacaaagatgtttagaagttgactggaagaatagcagcacttagcatatttgcctccaaattcatagataagtgcataccattcttcaaagtacttcgagggaatcacaaattttaatggacatcagaatgagagacaaccttccaacagttgaaagaacatctagtgagggccccaatactacctataccagttgacggagaaccattctttttgtacctagtagtgtctaatcatgtcgtaagcgccgcactagtgtgaaaagaaagaaaggtactgttggaaattattttacnnnnnnnnnnnnnnnnnnnnnnnnnnnnnttattaacatcctaaataagaactttctaaa

SEQ ID NO: 29508 - DNA, 939 bp, Cannabis sativa
attcatttactgttatttattttgttcttaaataacaaatttttaagctaatttttttttaccacatttctattattttcttggaaagcttgtgaagtctaatgttatggatctttttctcaaccataatcatattagataaaattaaggtttagtatttgctacaattaataactttagttactattaatttatgtgaacaatatcaatcagttcacccttattattacttggcctagctactaattcagagggagagtcaaagtggtggaatattttctggcaacttcaccccaatgaaggctaatctttctaagagagggattaatattaatactgatctgtcttgccctgtttgtggttcccatatagagactacaactaatgctttgatcctttgcccaaaaaaagaaaaagccttgagtggaagcaattgcagaatggtacaagggtatggccttctttatgctaactttgtccatgtgcatgtagaggggtgggaattattgttgaacttattgacagagatacattggtcaaggcaactatcccaggttgatgcggctatcgaaccgaaccgatcgatggtggcagaagctgaagctattaggcaagggctgttattttgtatcagaatgggctttaaagaggtgatacaacaacaaaatttagatgcacataggctggctaaagaaaggttattgcagacagcagcttgtgtcaaatatttgctctatttgagttctggttttttcttgttccaatgaagtcttatttcctattcaaactagaaaaaaaaaaaaaaaaatcccaacactgaacaatcaacaaaaaaatccagcaataaacaaaaataatttggaagttgatttactaaaaatgccaacaaagaacaataaacaacaataatttatattatacataatgaattagtgaagc

SEQ ID NO: 29509 - DNA, 1438 bp, Cannabis sativa
caaattgttttcaaaaaacagttttctgtttttaaaaacaaaaaacagttttttagttatgatgtcaaacatgcactaaattttttcgatgtgatttagatgtcatagatgttaaatttttgaaacatcttggtatttcccccatcaaattgttattactggcatccaatatttgaagttttagaagcttacacaactaagctggaataagacctgtcaagttgtttgaacggaggacaagaaggcccaaacttggaagacttccgatccatcttggtatagttcccaccaacttattaagaccaagatcaagtccagataaagctaaacaattctttaaagaatctggtatttctccaacaaggttattattgcgaagatgcaatgactctaaatttcttaaaaagcctgtcgttctctctggctctatatctgaaaaaaatacttcattttatactgatctgtgattctgatctagggaatagagcttggaataattccattcaaattattgttttccaatacatccaacaatcggaatgtttcctgataataaattgttgttaagattaaggcttaattaacacctctctttgataagatgttggatcacaaagaaaattagaaatattacccgacaagtaattatttgaaagatctaacatgtccgaaattggaatacgtggtactggacctgttaaattattgaaactcatgtttagtaaacatgaaatatcatttggaaaattaggaatttcaccatagatttggttttcagaaatgtcaaccgtaataaaacgattagaaaagaaattattccaaaaccattgaagaataacacctaaaattccagtgttggagatgtcgatttgagaaatatcttttcgtgatttcagccatataggataatgaggacccaagttccaatttctcaattctatgttttcaagagaaaaaggaggaacccactttgaacctactttcatgcttagcttgtttctggaagcatatataaacttgagctttgtgagattggcaaaatgaacttcagacacatcatcacctttgaaattatttgaatcaatgaaaagatattctaaatttgagagagatccaaaacttgttggaagtgatccgcttaatttgtttgaggaaatataaagggattcttgtgaggaataacagagagagagagaatttgagctgaatgattttcagtattgagatgagtaataactcattgtatatatacaagcctaatacagttacaaagcaaacaaataataacagaaaacagctgtacagtaactaacttagtcaaaggaaataacagaaataataaacttaagtaatagctctaacaccccccctcaaactaagctgagctaatgaagttaagcttagtttgtctcgcagaaacagaaatctggaacttgac

SEQ ID NO: 29510 - DNA, 2583 bp, Cannabis sativa
  modified_base (2042)..(2046): a, c, t, g, unknown or other
tcctgccttcaaatgagacttccatacagccctgcactgcaactcaattttttacacttgctcaatacactgaattgtataggcttattgttatgcctctgagttaggcttggtctgatgtgcctgagggaggcctgtgttatgccttttttgggctgtttgttgttgtcatttttgactgttattgtaccattacattgttttgttatggattgttttggtgcttttactggctgtttttaggccttccgaggttgcttttgtatcatgtataggaatagtatggtgtttttatagactgttgtacgctctttttggatgtgcttgtgcgatgcttacaaactgcaaggtgcttagttttgactatgttgtttctagtagataattggcatcaacttggtttttgattttttatgaagtcttaaaatatatagaacttagttaacagaatcatttatgtggtggtagtagtttgttgagaaactaatgctttcaactttgattttaattttggaattttgcgtaatgaaagttaactcactgttcaggttggaatggctgcaaatgtgagggactttgtgataacaaattgtgtagagaaagaggtaatgcagtacttctcaagaatgaagtctgatgaagttgaatcatatagtgcctactaatgcgattaagaaccatattttgcaatgccatatatttgattacgtgttattatagtgtaatatatttgcttccagacgaattacttattattgtaactaatatagtaatatttgataaaacaattgataaacgtaaggatctcaacataatatacatatatagtgtatataaattaaatttgaattactgaaagaaaaattataactcttgaaacttattaaggttcttgtttcttttcgtatatttatcgaacatctaatccaagaattttgttgaagaatccacaccttaatattaagccaaccgaatagagtgaactattagatcttattggatgaacaaatttaggtattacagtgtgtactcaactcatgactatatatgagacactgtaatagagtttagaattttgatctcatacacacctaaataggtgacaagagagagtgtaggcgtgagagagaaagatgaacaaatttaggtattacaatgtgtaatcaatttttattttctcttcattttgttatgccttttctgtctgttaattgcttactaatttatgacactacatatcctaatgttataaataaaatattttaattatttatttaaaataaaagtaaatatctaatttgatttgaattataatttaaattcaaatataaatatctaataattaaatatcaaatatcactagatcttttatttttataattatccttttaattaaacaattatcatataatttatctaattcataattaaaagaaacttaatttgatttaaattattttaactaataaaataattaaaacaaattaatcatgcacctttatatatcacctgtgtgagtcataatttaaggtccaaaatcaattttttaattttaccataaataagatttattatttattctaccaataaataataattaattaattttcattaatttcttatttcaaaaggattaaaataaatattattttccttcaaaaaaaaaaaaaaaaaaataaatattattttctctaaaataatatatttctctatttaatattatttaagaataatattgtatttaactaattgatacaattttgtccaataaaattaaatagttaaatactattaattttacaatttataattttcataaaaattaaaataataatttcacagattactattttgcccttgagaatttatttccaatagaaattaatcttactcgaaatttattcaccaaataaaaccttcccatgtacactgttgtatagaagtgactcggagaccatcaacctatattttaaagctccaataaacccaagattattatcaatctcatcactagaacaatctagtttattaattctattatnnnnncactataaatatgaaattgtactccttgacaatatataattatatttatagaattcttacttgtagtctattgatataattaatacaagcagttctccctccaattattaattcataattagagttggtcaaaatgccgttttactcttctaattatctcttgattcttcatgtactattaattcaatgtgaacaattaatctgtaaattattatagatttggattcaactgttagcactcccaaaactttttattaaacaaatatatattgttttttttttttgaacaaaatgaaatttttattcaaaaactgaacaagaagctacaacacccacattagtacaaacagactaccagccttcaattacaccaagaaaataattatggcctctttttgcattggttttaagaacccccaaaatttgccatttaataagaaatctaatctcattacaaatatatattgttgttacactatatattatattttttttttctaactatataatatgaaatttactaattaaatggtatac

SEQ ID NO: 29511 - DNA, 4633 bp, Cannabis sativa
ctgaataaatgaaagaagagagcaagagaacagaacactgatctcatcacttacctgcactaatggtatcaaacatattaaggtctctaggcttttgaagtttgtaaatcacttttcagtacaattcattaggttgtcttatctaatccaagtgaaacgtgaacttaaaaagactacaaggttacgtgtgtcaatttatctattacaggtcctaggcatgaagaagggagattcactcaccctgacataatagccgcaatgctgtcaatgactatcaacttcaccggccgctgaagaagtgaaagtttgatttgttgcaaactggtgataaatcagacaaatataatcagctagaaatttctgacaaccgtgacacaaaaaaaaaataaaaaacatacgacctacactttcaccttcactactcaatagtgccatgaaaatcttaagccatgaattggacagttaaatttaattcaccagttcaaatcaagctctggtttactttagagcctacctctcagtaaatttagaaagtgtagttggccgcaaaactaggatcctacctgccatctgcattgtagaaaacaaccccttagtaaatttcgagccaacacttcaaagtacactcataaagatactaattctgcagaccagacctcctgcaccactcctttcatgttaaatatgtctgggaaactttggactccaatttctatcatcctgaggaaagaatcaaaattaaaaaaattctgagagaaaaccatcttcactgatatgattattgtgttttctaaatacctttttgaactaaatttggattcaacatcgatgtagataacatggccattcaaacctccataagttgtcggcaatgaagccaataatgagagcttcatacacaactgcaatttgcaacataatcaaaataaatggtgattaagatcttcattcaaacatgatatcaacacctaggccctagctcatcataaaaagcagacgaaaattcctaatacggaaatctcatctacataaaactgatgaataaggtttcagagaaattggttagtaatcatgatcatccttttttaagaatcaattttcatatataagatcaaaggaaacaaagtcttgtcaagcaacgaaacaactatgcagaatccgaatgtgcaatggataaaaagcttcattcttcagttcaattactcaaaattatatttttttaagaatcacatgcatcaaaagcatgttagaaatttataaaacaacaagagataatattgcatataatttattgagaaagacatacctaatcattctatagaattaattgagaaaaaatagacattagtagtgtaatactaacatattaagtcttactccctatctctaatcaacaatagttaaaaggagggggacctagcaacaaaacatactaggtttcctcgtcaaaagcttcagttaattagaaaaatccacacacttcaacgactaaaacagcccttaattatttatctattcatagtttcaataaaaccattaaaaaagccaaaataaaagtcttacaaaacattgccaaaccaacagaatcataaaatgagcatagcccaattagactaaaatgaaatcagaatcaatacttgtgttttgccaattccagggggaccaacaagctcagtaagaacaccgaatggtattccaccacataaggcttcatctaaccctttcagacctgttggaagatgaccaccatgatcctccttatgaaccctttgctccatcaaattcagtgcctacgaaaacacaatcaagcaatgaaacccacaaattacagaaagctaaaaaaagaagattgtgtgaataaaatagctaacagtttggtaaggagggcaagcgatttcgctaatgcgggatagtgcggatgagacctccgccattcccacatccaacaactgcatcaactcgaattcggttagggataaggcttcctgaaattaaactcatcaccataataaatatgtgaatattgaattcgaacaagattacaagaacaacccacccattaatggtgggtagtgattgtttaattgaccttggcagtggtgatgttacgcgctgcaaaaacgttggccattgctttggacaaacccatgtccttgatgagcttctccgccattgctttggttcccaatcgattttcccgccaaatactcacccaaactttgttcatatattgtttagtttctttctctattcgtataatgtttattttttgaaaattttacagctaaaattatgaaaaaaattacaaaagtacattaatattgaaaaaaaattatttttacactttaaattttttatttacaaaaatatttcttcagtcaaaataataaattacttttttagttgttttataatttatttatagttgtcatgatattgtttttaaatattttaggattcgtttataatttaagggtcgtattatattaaataataaataatattatgtttgcataaaacaatgtattgtagtaattattataatcaaaatttttaatacaatatatgttgtattatttaatacataacaaatggtccatattaggttgtattataatatttacaaatgatttggggtcaacaccaatctccgactcgaactcggattcgggacctggaccctaacccgggatgcgggactcagacctggacagggactcggacccagacccagacccaaactccggacccaaactcagacccgaacttcggacttgaacccggaccccagacctagaccctggactcgggcctgaacccaaactcggactcgaacctggacccgagacccagacctgggacccgagacccagacatgggacccggacccagacccagacttggacccgaacttggacttaggacctgacacttgaacccgaacccagacccgagctcgaacccgaactcggatcccgacccgaactcagaccccgacacgaacccggacccgaacttggaccccgaccctaacccgaacccagactcgaacctgaaccccgactccgacccgtgacccccgacttgaccctaaacgcaggatccaggacccaaactggttttagtgttgggatcgagtgtattgaaaatatattataactttacacgatcaattaatccaagtcaataccaaacattgtattgtattaagtaatactaatacaatacaatacaatgcaacacgatctaatataatacaatacattacgatataatactacgcaacaaacgagcccttatagtttatttatatttgttgtgagattgattactcgttatttattagttatttttttttattttctgttcattaaagtgtatttttataattttaaattttataaataaaattttttagaccataatgtcataaataaaacattaaaaaatattatatttaaaaattcccttttttttgcatttatttattttttctttttcatataatacgaataccacatcgacattttttttattgattgtaattagagagaacgttaaattagaattcaaataatatttttcacatactaaaaataataatttacttcaagtacaatttcaaaaaaataattcattcaaagtatatttttcaattacaatatctctcatttgtgaaatttctcctataccatattttggtattatgtatttaaaaatcaagttgttttaatttttggcttaaattattattatcatggctaaaaatacatctattgtattattagaaatctgcaaattaaaaacttaggatttcgaatttttaaatctttcaatatatggacagaaaccatatttttaagcaataaagaattagaatcaagttataggaacatggtgcgaaatatttacttatagttcggctaaattttattttgattggatccaacaacaattacaatataacaaaatcaatctgtggaattactcaaggaagagaaagagataaaagcaactttaaacctgtgtgctaagatgattgaaagttattcgaagtaaaaaagtaagataatctgtttgaagtttggagaaaaaaatacaacatttattcatgccaaaattaaaaaaaaaaaaaaaaaaaaggaagctaatcgaattgcttcttttgttgatacacgcgtgtggtaccttggtgaatgattatgatgaggtagtttaccattatttaaaccacttcaaaagctttataggcagtccaagttcgacctctatgagtaacaacgagtgtttgactatgggtgctactctgagtagtgatcaacagatttagttgattaagctttttactagcctcgatgttaagaaaaccttatttaatattcaagagttgaaaagttcaggtcttgatgggtttagttcaaaaaaatttgaagtgttataagctgacattgatcaggaaattttcaagaatgttgttgtaattccagcggaaataactttgaggattcaatcataaacctgcaataatctaaacacgtgaacagtaataatgaacataaaccaattaatcaacacaatgaatcaaacctgaaatcaaacaaagaacaacacaagattttatcctggttccggt

SEQ ID NO: 29512 - DNA, 2740 bp, Cannabis sativa
accaagaaaattcctacaaatggtaataaataaaaaatttggacatccacataattattaatatttataacaatattctaattcaatcggcaagatatatacgatttttaagtcaataaatcaaagtaaaatatttaaactaaataaatataatttctataaatataaatataaaaatcttatattcttataaaaaaaatatcaaaacttattagcataattttaaaaatattttctcaccaagaaaaatctctaactttatttcaaaaatatcaaacataacttattttatcatatttactaaatgtaacaactaagaactttacaatgtaacaattaaggctttatcatcatgttcattttcaactttttcttttttattaatttttaatttccataatcaagctccttattattacatcaacaaatttggcgaataatatagtaatttttttgtaaaaaataaaaataaaatatgaatcaaatatatatatggtcttactatttgataacatgtctgtcttgtggttgggtttatctcctgacagcttggagtaaatgcaatattggaaatggaccacactatatatatataagctaatggggacagcttaacatggcacacaatatagatgtaaggattaatatattatttacaattgaatcttataatattattacattagttgattaattaatatatagtactaaatactaatagaaaaattagcaattcatcattaatttcaatgagagtaagaccccctttaatcaaacaaaagctacagtatatatagatgcaccttccgtcatcaaccgctgatcacagtgacgtttttattggtttatttaacaattaatttcaacaaaggaatcaccctatttggtttattatatttagatattaatgtgattattattaatctcatttgactttgaatatttagaaagaaattataattaaaataagggtcctattattattatatagtctattgttcatagctccataattaagtacctaaatccccccaacttgtcaattttcgtatccctaaaaaatattgattaaacccaactagaccttaagccgtccaatctttaaaacattgtgataatataaatatattttgtccttttgcttccttaaattaagctttttctcactgttttaagtatatatgattaagacataacacatggaatgagaaggagggttttcaggctaatgaaagcaattactttgtctttgaaagaatacgtacgtctcggttcggttaattaatatattttcatctttttatatttttctagtaaataataattaaacccaattgagtctaattacgtgtttatattcatatttaatgtttatgcatcttgtcaaaaaaagaaaaaagtcaaatgcatgcattataagtactataagtctatgtctacaaaaaaacgaaaaaaagaagaaaagattgtctattttattttattaactataagtctatcaatatagagaaatgttaataattaaggactttagtggtaactattcaacatttcaacagtagcacaacaatttgtattatatataatataatgaagtatggaattttatactttttaatttaatatttatcattaattcgtaaattaaaaatcactttgaagtaatctcagatacttttactacctactagctcatgaatatatagaatattaattgattgatatttgacattttaaaatgattaacatatgtcattttataattaattaataattttttattttattttacgaaataattttttattttttttattaagttaaaatataaaaaatttcatattaaaatacactaacaataatatattatttttcttatacttggcagcaacgactttatcatttctctatatataaaaaaataaaggaaacaacttcttgaaaaattttatggagcaccttgatacatcctttatataaatttttttaatctgtgatgtataattatttaagatattttatgaaatttaataaattttaaaaaaaaaattaacacgtcaaaaataaggtacttgagacaatcttttgaacacatgactttttttttattttattttatacatatagtgaataaattatttaaacatattttcaatattataaattattataaagttcttaaaatttacaaaatattaaaaacgtcataaaaaaaattaaactattttcttttatagatactaaaatagtaaggatctatcggtgtaccttctttccaggatgcaccatagaagcttcccattctagggatgtacattttttccatgagaatgagatcttgcgggaattcgtccctaatgaagcaggagtttcgagtctaaatggagaacagagcacgaactataattattttttatcccccaatattaaacagggtacgaacggggataggatgacactccccgctccgacaggaacctgtttaatattttattttatatttttgatgatattttatattttttaatttataattgtatttgtttagtacaattatatacttttataaattttaagttgtatttttcataataattaatttgttgaataataataaagatgtaatatttgatttttatgtatttttatatttttatatatttaaaattttgttataagttttatttttttattaggagattcctcaatttcattctcatcctattttcaatgaagaata

SEQ ID NO: 29513 - DNA, 5155 bp, Cannabis sativa
  modified_base (5084)..(5094): a, c, t, g, unknown or other
gtccgggtccctggtctaggtcccaatccgagtcgtgggtccaagttcggtttgggtccggatctggggtacggggtctggatttaggtcccggatccaagctggggtttgggtctaggtctcgggtccacgtctaggtctggttctgggtctggtcctgagtccgggtctagtcccgggtttgggtctgagttcgagtctgggtctaggcggggtcaagtctcgttctggttcttagtctcgtgtccaggtttggatctcgagcagatccgggttcgtggtctgagtcttgaattaatgttttttaaatatattaaaaccgaatcggataagttcctatccgaaaaaaaaattaggtggggcagagcgaatctgattcgagatccaataagtaaccaaatgtttcggattgaaactccgacctaactaaatggctctttctgacatgcctatccaagatgggtgtcaaaatacattaaattcattgtaggttgaggttgttattaagttatttttatttttgatagttcgaatgttggttagttagttagtgtagctttatttcaaagcctatataaaggctccctctatctgaaattgtataacaaagagaatcaaatcaataaaaacatttctctttgaattgtaattaaaacatgaataaagtttttacgttatgaagctaatcaccccttaattattatgtaaaatcacttaatgctcaaaaaaaaaaactaaagcttcaaagtgttgttcttgggtaaatatgagttggtaaacttgaggaggtggaatataagtaccggacacacaagagagagtagatcttttttctccatataattgaattaatttattaattattattacaatcgtaattagattaaaactacaaacaaataataatctaatttaataaagttttgccgctaattatagttttattcacaatatgattaaagcatctttaaactaacccagttaaacaacatatttaatactatatattatacaaatatcagcttcccctcccaaattaaacatatccaattaatacgacggcgtattaataggtaattgccatcgaacatcactttacatggtagatatgatgatctgacgcgtcaagctctggagatgagggagccaataaggcctgcgatgagcgtcgtcggatctcccaaaacggcagagatgacgaactgtacggccaacccggccatctcgcaacactttttcaccttacccctcccggacttcctatgatgcgtctgcagcgtgtttttcaggctcggaatcgtcgacctggaaaacgaggacgaagacgaagaagaagtaatggccttcccccttccggcgtatatatcggaccagctctccatcagcatctctctcacgcacgctacgtgtagattgtacttcttgcacttagaccggtagctccagctccttcccttcctgccgcaacggtggcacgacgagctcacctttcgatacaagtacagcttcgtctcaccatcgtccagaatcatcggcagcttggcgcagcacgggtgaagatcgaatccgcaagagttgcagtggtaaacaaatctgtggtgattgattattcaatacaaatataagtaatgaaattaaacattaagttgcatgcgtggatcatgtgtatacgaacccggtaatatctttctcgcaggcgttgcagtagcgcggtgagttgcctgggggcctggagaggaactgaaaggagcatttggtgtaaaaagggtggcaaatgttcggggaagggagggcacagtacatgtgaagatcaaagtcacaaatggggcacttgtagcgtgatccaatcccaatctctttgcatccatcgcacttgaacgggaattcagagtactcgaacttgagcttgtgataggggtggctgaagtgggagatttcgttgtattttgtcatggctttcttacaatagaatgttgggtttattatattgtaatttgattggggaaaaagaagacaagattaaatatatataatactctttttaatgggattagatctaatgtatacatttttgcaatgatcagttaataagttacatatatgggtgtatttattgtaggggatttttgtttggcttcaggtttaagcaactgttgtaggggaattagaatgatgctttgggatggtggtaaaacgagagtgcatgagaatccccactacgacaatatttaagatgggaaagaacagacataaagcatttatatctggtcatgtcaacgtatacttaagaatatatacgaattaattttcactttacacgagtatatattttaatttttctgatcagctaattatgttataggatgcgttataatttagcaaaataagatcttttgttctcaaaattaaaatacttataaacatcatctaattattaccccatctattgatgaacttacatatagggaagcgcaaggcaggtgcggtgtcaccatacaatctttttcataattagtaactttaatttattttatatatatttctacatatgagaaaaaaaaaattatagttaaactctctcatagtttacaaatatagggatatgattttgtcccgtgatgtacttttacggaatgtatttcgtgatacattagatgagtctcagagtacattaaatgagagggtacgtttccactttttaaccttaattacccctaaatcaatctcatccgtcagatcaaataactctttcatctgacggttgtcgtacatcacggattacaatccgtgaaagtacaataacggaacaaaatcatatccctataaatatatatatttatatatttgtgtaactgatttttttacgggatcgtaattaatgagaattaaataaatagtgtgcaaaaaatgtaataaatgacaccaaaatttaagaagattctacccaaaatattgatagtaacctacacgtacctcttgtatttaattaattttggttgcaaaacaagaacatgctcttgagtgcaataagtaaaaattacatagtttctaaaataggaatttttgatcctcctccatgttcaggtatgacccattatatagaaagggagttggtgtgtctatctttcggtgacacaaccaaaggctctatcaaaccctaagtgtatacatagaattatctcaattaccgttcccttgattctcagaattagttgagatccaattattttggttatatcccgctattttcttgggtctttaacttcttttgagcttcaagcgggtgttaacccaaaaaattgagagagtgaattttcgagattagtcaacaattagtctagccagtcgagaaacgttgctagcaagagtcggtcgaggaatgattgaatcaacgcttgtggcctagggctcgttaatttcaaggatcaatgcttgcaagtctccaggtatatccgggcaactcagaggtcaacctcacaacaatacacgagtagagttagtaagatcaacttactaagtaacaattgttagaggattttcataatgatgcgttcaaaattagatcttatcataaacataagatccatagatctctttctcatatttccaacgcacttttaatcgtccaatttcgacatatatcgagaaagttatggccaaaatactaacaccactaaattgtgacaattgggtgtgcgagccatgagctgttgtgcgagcccatgaggttttgtgcaagcccatgagctattgtgtgagccaattagatcttgtgcaaacccatgagccgttggacaaatcgggaagcatttgggtgagtcattgtgtgtgttgtgtgtgtgtgtgtgttttgggggttgtaaatgtaaggtgagaggtgaatgcatatcgacgagaatgacattgaagaaggaatcaaaggacaaggcgtgcaagggaaaagcgtacaaccacgcctcctgaagactctgaaagtaagaaggtacgagtagcggtgacaatggtcctgcgagatctgaggacctgacaagggtacgctacaaccacccttctacaactgataatgaccacatgcctgtaatcggggatcacctaccttcaactgtggaccacccgcctgcaacctgtaactgaggatcacatgcctataatcggggatcacctaccggcaactagggaccaccctcctataacctgcaattggggacctcatgcttgtaactagggatcacctgcctggaattggggagaacccttcagccacatgtaactgcagaccacatgcctgtaaccgaggatcacatgcctacagctggggatcaccccacacctgataggggtacgtacgagttgcaaggccacctccagcacctgtgacatgcagcgtgaaaacgatgctttgtccccttgggaccactttttacctcaggcaattagagcctataaataccctttctcagatttgagaggggttggaaaatcatacttgtaaaaccatattgaaagaaatagaaatttttccataattctctccatttcaagatgacaatttaagtttatatttcatcttcctcttcatctcatttctgaacttgaagcataagttggttttctaaccacaagttagttgaggagttctccccgtcaacaatttggtaccgtctgtgggaacaacaagcttaagcaaagctgcttccttacacacaatcgatacaaaattccaagatgctctcgctgccttcaagacatggagatttgccttgacgagaactagttggtcacttcggagtaagacctacctccacccatcatcataaaagaaggccctaatggtcacatccctcaagtcagaggagaaaatgagaatgttgtccagcctcaggtagggggagagggtgcgggcaggcaggaatctcaagcaaaacatggagaccgtcgccgcaaaaagaccctagttgataagcagcatcatagagttactgcctctgtcataactgaaggtaacactacaagaaaacctacttatgcgccgacaaaattgttggaagttattttaccaagagcttagatctactcacaagtannnnnnnnnnncaacctaaatatgaacttctaaaatgacggaaaattaaacacataaaagtatcagaaatct

SEQ ID NO: 29514 - DNA, 4828 bp, Cannabis sativa
tctcacttcttctctagctcttgcttttctcttggatcttgagagatttcaagagatgagtttgtgcactcagccacaaagtctacaagggcttgacccttgatggctattcttggttgatatgttatgtcaaactagccaagctcaatggcccactggagtagttggcctaatgcttcaggtttctataaaacctactacaatggttgatcgatgtacacctttatagggtatgcctagaagtatgaacttagctttctggaagctaagagtaagttgtaggttagcttctccatgtgtaggtaccaactttcagcatcgattagcctcttgctaatgtagtatacagggtgttgtacactgtcttcttcttttatgaggacaacactcatagcatgttctgtgactactaggtacacctagctcttcattgtcgaggggttttaacaacacgggtggttgagctaatcgtttcttcaactatttgaatgcaatttcacattcctctatccactcaaatttttggtgcctcaaagaatgttgaagaagggtacacatttatttgtagacttggacataaatctgcttagtgcaacaatgcttcctgttaggctttatacttctttgatggttgtgggcgacttcatgtccaaaaaggcttggatctttatagggtttatttctattcccctagcattgactatgaagccaaggaatttacccgagcctactctaaaggaacatttgagggggatgagcttcatgttgtagctgtagaggattttgaagcatttatttaggtcctccacatgcccccagcctttttggacttcacaagcatgtcgccaacatacacctccatgttgttggccgatgagatttttgaacattttgttaacaagcctttgatatgtggcccctgcattgtttagcccaaagggtatgactttgtagtaatatagacctaagtttgtcatgaagcttgtgtgctcctgatctggcagatgcatctttatttggttgtaacctgaatacacgtccatgaaactcaagatttcatggccagttgcggcgtccacgttctgggaagtaaaacgcagtcctttggacatactttattcaagttggtgaattcgatgcatactcttcactttttgtttggtttgcgtaccatcacagggttggatacctaaagttgatagaatgcttctgttatgaagtcatgggctcgtagcctctcgactttgtccttgagtgctcgggcgcattctttggctagtaacctccttttctgttgtacatgttgaatgtttggatcaatgttgagggcatgggtcatcacagaggggttgattccgaccatgtctctatgtgaccatgcaaagaggtccagattggcccttataaattttatcagtaatgattttatttttggtgctaaacctttcccaatctttagtcttcttgttggagaagtgggatcaacctccacttcctttaattcttctataagtctgaagctacctgtaggatccccaaaccgatgatctatgtttgtatccccgctttgggctagacttcattgccctttgctaggctcttctttagagctcttggtagacatcttctctttcttggctttggacaaggtcaagctgtaacagtgataggaaaattgttgctctcccctcaaacatcctacctcatgccttgttgaaaatttaaggtagcaatggtagatggatattaccgccatcaagtgtataaggtcggtcggcctatcaaggcattgaaaatcgagggaacatcaattacgatgaacaatgttatcagagttctagtggttagattttctctaatagtgtggggtaatctgatatacctgataggtgcggtgccttggccaaagaagccatacatcacttgcttgcaaggtgccaagtcagtgagttggagccccatcatttcatatgttgatttgaaaagaatgttggaagaggctccattgcccaccttgcatcttgccatagtcatattcccaatttgttcagtgatgaccagggagtcattgtgcaggaaactaacatgagtagcatctccttctgtgaaagagatcgtgggctctccatactttggttgtttgtagcctgtatcctcgactgccaggatgtcacttttaggctcgtgatggagtgtctaagcatagtgatccatagctttgctggtcttgcctgcaatatggagtgtaccaataatggcccctaagtgtcctgccactggtggtggcattggatctccattctaggcaccttgtgcctaagtttggtcgttacgtacataatgatgcatgtggggattattcttccttatgatgaattcaatctccctcttcaaattctgacactcgttggtgtcatggtcaaagtcgttgttgcgcttgctcctagtgcttttgacactggaggtttgggcaaagttgttggtacctgcctatgtgcgtggcaagtcgtgaaattgtaggatgtcttgtgactgcctattgttgactttccctgtctgggcatgtcatacaacttcttctaatttgatgaagtcgccagctctgtcgagaaactctcatgttgttagttgagatcctccggatgtctttctaaaagtcactcaatgggaggatgccctctagtatggttgtatatcagccctcttttgtaaggcctttgaccttggtaaccttgggcatgaacctctagatgtaatccttcaaaggttctccttcttgttgtttgacttcgacaagatcttctagcagcaatggtatgagccttgaggacgagaattgtgtgtaaaattcttgagaaaactcagcccaagaattgaatctttctgaagcaagtttaaaataccattgttgagctgtttctaacaaagtgaccgagaatatgcgatagcgcacatcaccaataatcttctggagatcgagctacatatcgaagtatttgatgtgcgtcagtgggtctgcaagcccagtatacatcttccataccaacatcttgagttaggacaagggtaaggcatttatgtatgcctagaatggtgatccccttaaccgttctagctcaagatctgcaggttttggactagctaagcccttgatcatgtctcttagttggtccaataatgcttgcacagaaggatctattgttgtaggaatttgactgactggccctccttggagggcttgtaggctctgatgtgctaggttctgtctggccatactttgagagaatgtgtggtggaggtcgaccaaacctgtgttatgttgtaggccttggccggccactcccatgtagggatgttggctctgactggccacgcctacacttggcaactgtccatggtcagccaaccttgtatcaggtagggcatggccgcccgtgactccccagttggctgatgttattggtgtgttgataggaggtagatcgcaccaattgctagagttaggtggatctaaatgcctcaattgatcaatttcacttctcaaatttttgctttgggtgtttccacatgctcccagtcctagtcggttgaagattggcctttgagtggttcgcttcccttggggagggagcgtactcccctggtaggctagaggtattcttgcagctggctagccaaccaaaggttggttgatggggactattgttgagcttgagatccctggccgaccccccagactgctggttgccgggatctggcagttcttgccattaaaccttagtgggaacacctgtcctcctttgggtaagggaaggtctatcctggctcttaaagaacctagtttgtcaaattgctcatagaccctccctgatctatcaactagtcttccttagagtggatctctgatgagatcttggcctcttccatcaattctcttattgaacgaccttatcaggtcattggcttctctattacgacaatcccgctttgcctggtgagattgaaggatgtactcttgttcatccatccatctcagggatttacatctcaactgagcgaatacatcgcaatcagcaatgcatggtttttcagttaggccagcttggcaaacagcctctctaagtctggctaactcaagatcttctcccaagtccacatggggcttgccaattcctggtcatgtctctccaacatagtaacagagatgagatctagttgttgtttctgggggttgttccccaagggtccttccttcagtgggagacaccaatggagggttcccctcagaggcaagggcctacagtttagatccaccaagatgtttgtgtcactctaaccagctgtaatggctacattcgaggtgcttgcctaagcggcaggattgaccacatctacagtgttcatgggaattccagccatgcctgaaacatggacatcaagatctatagtctaaggggtctcaaggaagactcaatgatgcagatggtgcaaccgaagctcttctcgtgttaaccatagtatttgatcagatgtgatatcgacttactctcaataaaagtaccaaattgttgacctaagaaattggcagactgatgcttgccacgtgtgtcacatttagaactagaaagtaaaagaacacaaagatttttatagaggtttggctcccttagctagtaggtaatgacctactccccttttagttgtattgatactgagagagaacactatttagatcactataggttggatttgatatagctcaattaaagttacagaataggaatcaaatatggcaaatctcaagtgttgagggatgttatagtggaca

SEQ ID NO: 29515 - DNA, 3097 bp, Cannabis sativa
  modified_base (42)..(54): a, c, t, g, unknown or other
  modified_base (745)..(760): a, c, t, g, unknown or other
  modified_base (1090)..(1094): a, c, t, g, unknown or other
ttatactaagcttacctcaattccaaattcaggtgtgccggnnnnnnnnnnnnnaacaactgctcggcgaattataggctcctaaatcacatcgataactatacgaataagtgtgactcgctaaatcacaaccgggacttaggttttaaaccaaaaacatatctacatcaacttagtatggcaataccctaaactagtagaaccataaacctaaaaataggacaaatcgacgagttgaaatttttggggaaccctgctacaaaaaccagttacccagttttctgcagaaaacccaaaaaattacaaagctcaaccaaatcgattccaaaccaaatcaaaccttccagacctgcatattatactccaataaatattttccaagtgatataataactacccatgctcagaattgaaaaacaccattaaagggctaagcttgagttctaaaactcaaagcttgctcaatcaacaaactacctaccaaaacatgctcaaatcaacctaattaaacataatttaactacagaaaacataactaaacaccagcagcaagaacaacaaccaaaatctcaaaaacatgcataatccattttctttaaaattaagaaactaaagagggagttgcttaagactttaccttggcttggataacacaaagagctgctataaaaatcattgaattgaagcagaaaatcaagaaccctagctggttctatagggtttcaaaaagagagagagagagagnnnnnnnnnnnnnnnnagagagagaggaaggaaagagaggaagctttttcttgattttgtatttcttgtaaaaaagatttaaatgaaatgattcttttgttttattaataaaatatcagcataaacaataaaaagaatctgatttattaaagtttacataaatcactaaagacaaaattttatggggcaaaatgaccattttggtcattttgcccctcccatactaaaagagcataaaaggcacttaggggtattttgggaaattataaaatcccaaatactcccgacattcccaatgtctacaatattgtcctgctatactaaaaatactaggatgtgattctannnnncaaacaccgcgttccaatgttgtcgggcacaaaacatgcaaaatcatgaaatttctatatatgacataaaaatacattctgaattcaaatatatcatcataaattaataatttaatactaataaataatttccattattaagccctaattatctgctaattccaaattaaagctaagcggtctttacagttatagagtatttttacacaagagtgttcttgccaaagttcaagagccctaatctttagtcctcaaattgtgaaatgattttctaatcctttgcatgtagaggtaatgctctatttataggcttgagtcgagtttatgggtagacccgaacacattaggattgaaatgtgttaactaggcccactgataaggtaaagtacagtttatatttttaggtaagacccaatttatgagataacagtcattcatacgtatggggaccattttgatgatgataggtgtcatgcgcaccgaagtttttacaataaatataagagaatatggcgttggagaaaaatgtatgttccatttggtggtgtgcgcaattctcatgttagcgtagaggacaaatctctaacttggtgggaccctgtgtctagaagatgccacgtaggatggtttttggatgcctccaagtgtatcttcaattgcccattacggattaccctatgaaggtatccggatacgtttagatggactttttgtctttcgggcagatggtccttccaagaccaatatagtatggctttatcacatctatgagacttacgtctggatccagagctgtaacccaacttcattgtgggaagatttattaacttaattaggcctaagaattggcatgtttttgttaattttatgcattagaagtacacgtgtcattaatccagaaacacagataatatttacccctaagtctttagggttcaagagtcacggaggcttgcaacttcttttcagattcactattgaatgtgggattgtgaatgagtttggccttttagaattccaaggaaataggttgtgaaagctcacaaacctttcatttcccctagtagagaacacatgttatgaatctttttgtacgtgtgtgttacgtgccttgggaaggtgcgtgaaatttagggacgcgagatgacgactggtcatgtgtaaagatcgtctaagtttaatatattggtttattaaaaaattaggttttatttatgagatttaattattaattatgatttgcatgattgtggagatttacttaattttaaaatgtattaattatgttgtatatgtgaatttcttattttttgtgattgtgctcggtagtagtgggacgcgacgttgggctattagagagtcacactttcatatgatttataattttgataatagcagggcgtcatttttaggtattggaagtattgagaaatcggcggggtttgaaatgaccaaactacccttggttgtcacttaacctttgagttttaactagggataaaatggtaattttgttggattagtcttttgtcattttgtgaggttagatattagataataatctgaattcttttatttattttgaaatataagatatatgccacattattgaagaaaaacctagaaagtcaccttcttctcccaagctctctccttctctttcaaatcacctagaaccagccatgggttttgattttgttcaccatatttcagtgagttcagataggatttgaagctttaacccaaggtataatactctagcttgtttcttcttgatttctttagctgcatgagttttaggatttaagttgttgtatgaattggggtggtttgatttcaaattctgaggttaggttgtaattatttaggttattctaagctgaattagttgaattttgtgatgtttgggtgaagttagagtttggaagctcaagctttgagctctaatggtgtttttattttttgagccatttattgtgttctactgcttgaattggttatgt

SEQ ID NO: 29516 - DNA, 2146 bp, Cannabis sativa
tattctctaaaaattatattaaattaattaaattatataaattatatggaatatatggaactcgatacttaatttaactaatagcactaatagcaatattaacacataagagagtgttaatcatcattagtgtcttttagtatttctcttaatttacttggaaaaaattatttggtgcatatatagtttttttaatttttagaaacatatattttttttttttttttttgagctcctcttaattttagaccttccaagcattgtgccttttaatggaatttttctgttttctttaaaaaaaaaaaaagaaaaatagttttgaatttgttaacaagtttgggtatttcaaatttgttaattaataagaaaatataaaaaattacaaattttatattttttatacaatgtcaataaatatatttttttttttcaaaaaaattattttacgataaaaattctaaagaaaaaaaagttaagagagtatggaaaaaataatgaagggtaatcatttacctgttacagtaaccagtaaccagctaccttggagcaaggtaactagttattttatattatttttcaaatatttcttaaattttttttttatgaaataattcttttgaaaagaaaaaaaaaacatatttttataaatttgtaccttaaaaactataataataaaaattctcgaagaatataatgcatgagaagtttttagttacaccaaaatgaaagaactttcaggatttggagatcttaaactttagggggttgggcctaacgtaaaatagtatttttgtaaagaattatgtataaaatggtatttttcaaaattggaggtcttattttttttaacacatttttgttgttactttaatttgaagtccatcttgaagcaaaatgagattttactcgttatattgtcaattaggcaataaaaatataaaattacaaatgttaaaaagataattatataaagtactatttttttttttgtaaaattttaatatttttatatttaaataaaataatataaaaataataagaacattaacaacaataaaaaataataacaaattaacaaaagtacaacataaaaatacattaaaaaatcatatttcttgtaaataaaattataaaaattataaaaatatttaaaatactgtacactataattttttattatttttgtttatttgtgaaataattacaatttttaattatgtgatagtggatggagtaattagtaattataaactaaatcttatgtatgagacatttgctataaatgttgttgagcatattattactactctagtgtattattagtgtgtgtctcttttaacaaattctctttgttttgagtgaatagagaatagagagggagacccattgacacacgtgtgacacgtggggttggtgtggtgtggtgtgggagagacacacgtgacacgtggctaatatagaagggagagaatttggaacataaacaagaacaacataataataataataatagaagagagacatagattacgttgttaaagagttccattttggagtgtacattgttatacaccactcatttcttacttaactgtcggctgagtcggttcggttggttggttggttgggtcaaccctttgttctcttatcactccaaactccgcccacgcccacgggtcgccccacccaacccaaccccaccccaccaaatcatcatctatatatatattgccttcttattccttataagatttcacacttaatatttactcaaaaatacactaattataagtaaatttataagaatttttttttgaattttaactaaaatagtaataattttatataaaaaattttaggcggccgaataaataaatatacaacctaataaaaaaaattatataaatatttcttacacacattcaacccacatgatccacgttttttgggattgaaatcttcgtgtgatgcaataaggttggcaatgataaaaaaattccagcagacgagaaagcaccattaattttagcgacatcaccaatcggatcccatggtccgaccatcggaccccaatctctcttcctctctctgaaatcgcaaaaaaaaaatatatatatacaggtctgatggtcggactattgggttc

SEQ ID NO: 29517 - DNA, 2204 bp, Cannabis sativa
tttcttcttattcttttttaatcagattttctttttgtcttctcaactctccttaaatttctctgtgtatagatctttgttatatggtattacctctgactctcttgttgaatctgggtttgaatattttctctacagatcggtggaagatctgtatcgatggggctcaaaaatggttgggctcgagttagtttcagggcacagttagtcagggacagagatcggagctagaatctgtgggaatcaattatttttctaactattttatttgattcaaatgttcatactcaaaattttggattttcattgttaatagatttgtattttctttttaacacttatttattcttttgcatattttgagaaaactcttcttgacgagctagcttttgttgggtctccaacaagtcattggatactcgaaccaaatttggatcttactcatgatggtatcgtctttatagtagctgtctttgacgtgtccttcatcctcttcctccttgtctttgacgtcagggtctttgccttcgacttgcttgcaacgtcgagctgggtcgtcccctctgttgtcaacttcagatgtatccccctccatcacatgactcggttgagcgtgcgtggaaggtcgtagggttacatcctccatgacaatgttagggttcacttgaggagttttctctatctttgtcttgcatgtagccaccatgatgtagaaacgcagtggctcaaatctttcctgaactctcaatgaaagtactaaaatgtttaccgaggtttccgaaaactaattaaatgaaagctttagaaaataaataactattaagtaaatgagaagaaggattttacatggttcgggcattaattctccctagtctacgagttagtatattggccttgtaggcttttacaaatgtattacaagtgatgtttacagagtaaaaccccaactctgcttctctaggtttcttctgatgaagaagagagcttagaggatattttggcagagcttcggctatccttttttcgattccccctacatgaagaaatgagaaggagtttatataggcgctaaagtttgggtccaggcccgattaaggtatttgaacaaagtctacccactattagggtaaaatacattatataaatgactattgggccccttagaagaattcctctcgtgggtcgacaattctgtacaactgggaccactgttggtgcaagacacgtgtcgggcaaaggtcacgtctggcagacaaattgcttagaggagcttttggacaaggtattcagaagaggtgcacgcactaccatgcgcggacacaggggacaagatctgatcttgtgtcaagaaagtgaacacgtcggggaggatgtccggtttccatttcgtagtaggcttccagtattccttgtgcatgcaacaaccgtcttggactcttcagatagcctccaggcattatcctgttagcttaatgggttcgatcttcttcgagtctcggaaggccgagaaagcttctaagttccagacagttactttgtcttgtggcaaggtgctgaacctttcctattcctaagcctcctttgagttagcccaatctttttgcgagtttctgcaattaaagagatttaagaaattacttagatcaccatcttctatctttcgtcacgtgtccttattccagaaacacgaataacaatatacatataaattaaatgtgtaatgctaatcatgttaatcaatatgtattcattgtattgtaagataagtatagttgacacgtgaatacaacaggtcaagttaggattaaagtttcttgacacgaaatatatatgagtcagattaaagttaatcaattaggcataacatgaacacaaatatgacacgacaacacgaattgtcacccctacatctaggatccttatagagtaaatctcagcctcagtaaaaacattgccaagtcatggagggtgagtacccaatttgaacttccataaaagaattttgagaaaaatatctacttttcagcaatatattcagttttgccattgaaagataaacataaaataaaaataaagctacgcaaatagtttgttgtgtatagtatcatcgtcatcatatcataataagagggtaaagctttataaaatgacaaatgagaagaaatcaatctacattaagatttacttagatcatgctatatact

SEQ ID NO: 29518 - DNA, 4436 bp, Cannabis sativa
  modified_base (4007)..(4035): a, c, t, g, unknown or other
  modified_base (4292)..(4294): a, c, t, g, unknown or other
ttgaaaatcggagtcatggatggtcgagatagggtgtgtaccaggggttttgcacgtggaaatctcagacctgaccgagatttcttgatcgtgtctgagaaatctcacatgcgcacatccctgggagccactgcttctttccgagcacgaagaccatgcgaacacccctataattcgcatgcatttttcttggtcaagcagcgcccgtgagtgagaaactcagacaatgcaatgcccatatgtgcacgcacataggcagtttgcatggtccatgcgagatggtcgtatggtcctctgaatttcatggatttttctttaaaaatttgttttttaattatttcaaatgccgaaatcctatataattagtgaaaattatgatttttaattttgaacataaatattttttataaattaataatgtaatttttttttaataggttattactaatttgtagaattaagaggtttaaaattaataatattatataattcttttaaaaaatattatatgataattgtcttatatgctacttaaatattaataaaatttaaaattagtctaaatagtttatagatatcataacaataataatttcaatttgaaattgacatttttaattcttattttcaatgtttaaattataagttaagaaaaatgataatagaaatatctagatatttaattatttttgatttattaagcattttaaatattaaaaataaattaaaaaatgctaagatattttgtagacatttgaagatgttaaaattgagatattttaaggattttaaaccctaaatttcatgctcccctttatattatcattttttattttttttcataaaaagtgataatatcctaactttaaatatctagtttttttattttattattttaatttattaaattataagattggaaatattttaattttcaaaattttatcttaatgattatttaattcatttaaaattattgaaataacttagaaatttgaaagttagttcgatatttattttgaattgagatattttaagattgtgttagatttaatattttaatattatctaacaacctaatttgtaattaaaattatgatatttattttcaatgtattttatttattaaaattaaaaatatctcaaccaactatcttagttaattaaattattttttaataaacccataatttcattgattggctacgattaacttgttaatggatcttatgatccaaattaatcatagttaattaattggtcataaatcaattaaataatttcaagtaaattgcggcataaataccttatatttcaaattttatacacttaaataccttatctttatttttagaggcaaaaatactcaatgttacaattttgttacatccgttactaccacttccgttagctcataaatatggacacgtggagggtccagatgcattacatttattttttttattttaaaacttaatattcttaatgtcagaaacaaaatactacttgtttttttattaaaaaaaaaacagttctcataataattttgacatatactgcaattgttcactcattaatggtaatttagttttgcatctctcttatttcttttttgaaacaagtagcatttagcttttaatattaaaaatattaaattttaatataaaaaaaataaatgtaatccatttgggccctccacgtgtctatatttatgagctaacggaagtagtagtaacggatgtaagcgaattgtaacattgggtatttttgcctccaaaaataaagataaggtatttaaggtataaaatctgaaacattaagtatttatgccgcaatttatccaataatttataacaattaattttgtaattttctttcatctatcataaacttagtaacatgataagacacatccaaattaatgtttatgtgagcctatatgcttacttttggcttagatgatataggagcccacttaattctaatatttaaattgactaagaatctaaattaaataattacacaatgatagatattattttggctcaattagtatttgacttattcaattgattacaattattttaatgaaggttaaattcctcttattttgggccttgtatgagagttagggggatcattagtagtgggtacgacatactaaactcaaccctttctcacctcacatggacaattccaattgtaaagactcatttgccttatttaaataattgtattaggctaattacattaatttaacctaattaaaattgattagcaacaaaattaattgtatatgaatttaaaaaaattatatttaatttaagaaataattctatataattgatatctaagtaaactaatttgtatttttttcaagtatttaattaaatataaaatttatatttaagttaaatttttattaaaatcaagataatttgtgatatttaattaaataagaaaattatatttgtgttaaaaaataaatttaattaattttaggtttctcagattagggttttggcgtgttgtttacccatttatgtaatgtgactagggaatccatccagcacgaggttttctgttcaggtcggccgtctcacttgaattcgaaaacgaggtaagaatagcatagaacatattgtatacatgaaaatgcatgtatgtgtgatatatatatatatatatgcatgcttgttgtgattcatacactaccaacacttgtacggtagcgcggtatagagtgcattggtataatgtacaatgtttaaagagtacgttacgatgttaccagcataagtacagaaaggtacaaggtgggtgtggtacaacacttagtggtattcggggtacaagataaaccctaccaacactcatacagtgatggtacgtagtgtatgaggtacagtggatgtaccctagtaaaaaacattcttactcatttgttgagccttgtagataggtgtatgggcgcctagatataagtcgatattatatgatttgttatatgcctttcttactgagtctgtcgactcacaattgctactttcatgtgtaggtaaaggaaaggcaaaggctaaacatgagtgagctctgagctaggatggtgtgtttgtacatgtcatggcgacgcgacctggattgttcggtcttgggacatctgagattttattttgtagtcgctgtgcgagcagattaaaaatatattttgataacgttgtaaaaatttaaatacgagatcccaacttgtgtaaatacatgtataaaatttaataaagcttagcaatcaaatctacagttttaatttgacacaatttttaggaaaaaccctttaaataccgaaggtggcattataattgaaaaatcactgtagcacacctaagtatatgggcgttacattttcttttctattcactgttggatcaccaccatccctaccataaccagaagtaggaagagttgtggtcctaccaacacttagagtcccttggggctcttgtagaaattcaaccgcaccttttactcgaaaagccttctctaccatctcagcgtaagtggtagtgtcattggtggatatgagtttctcgttatatttttaaaacggtcactctagattttaccttatgtaaagaaatttgaaatgtatgaatttctagcaatggtgaataaccagtaaagtaagtggttaaagatcttgcgaactgataggggtggagaaacgtttggatataaagttcaaagatcattaagttgattttttttgaattgtatccaaacttacatccctagaaatttagattgcatattgatgaaagtgtaaggtctatgattatttactagtagttacctaagtccttctagggaataccctagtgataggaaaatttcagaatgatagaatggttgtatacttagcgtaaaccattatcaaattcaaggatgtcctaatagtaaacttacgaaaagctaaaactgttaaccagggtttgcatgtttgatagctattnnnnnnnnnnnnnnnnnnnnnnnnnnnnngtcattaagataagaaagtgtttgttttaacaaatactacttttcttagaaaatgactaagtctgaaaacaaagtagcaaagtagaggagatatttttttttcttgattctaaagtgttctatcatcttattttatataagatggtcccactgccattgttgtcttgatacaaccgatgaggacagtaccacttatgttctgacacagaaagtcattgtaccttgtcgtagtgggagggtgttgggttttgtgcccnnnataaaacccatttcaatataattaaatttcaaaaatagcttttatattgcttggttcacatgatttatttcatgattatgtttaatgtatcaattctattaagtccagaacatatatataaatatgtatatatttgtttatg

SEQ ID NO: 29519 - DNA, 1481 bp, Cannabis sativa
tggtaatctctcatattggtattgaatccaaaggtccttgataccttttctgcgcaggaagaatcctgagaacaggggtttattcacatcaaccgttgcccgaaatcgcagggtgcccataccaaacaaacctcgttcacaattattctcaatgtgtctgggcagttcatagcttgtagagactttcccagccagctccttaaggtttgttttgttccagtagaatgggggaatgctctttagtcggacccaaatgggagtttggtcgaagactacctccgagattgagagccaggacggccatggcataaggacaagtaaatgaccacaaaccagccagggacgtctaagtaacacattttctgcatccattctagtttgaaaggtgaactgtaatatgccatcctccctttccttccaactccaacccgtcagggagttccatgcatttcttagagagccgtggatggctttaggtcccagcctggaataacagtatattttgccaagtagtattcggctaggttcatcgttttgatcgacttctcccggatggaggtcatatgagagatcctttgtcgatacttgaactgaatcctcaaataaagcgctaagagttgcatccgccattgcttagttgaataacagaaatctcagcagtaaacgaaagagaaaatcataaagaatggtaagctagttaatcaaagatactacgcttccatacaatccagccagtgtggatttaagcttccatttagggagctaaccattgacccttcacacattagtaaaagagtgcaagatgtactataactatacaatttaacattattctacgaaaatatttaaaaaaaatgttgattgaatgactactcactaatatctttgattctctttaatgaagttatttcatgtcttagcaaaaaaaaatggagaaatgatccaaaatttaagcaaaatggtcatgtggtgctctatcctttattcatgcatcaaagagagtgggcgtggaggacgtatacatgatctttgtgcattaggtggtggggtccactcgtatcaagtttgatggaagaggtggcttcatgggccacgcgcgcgtcagtgtgtgatggagaagaaaaacctggtaaaaattacctaaaatatagaaaaactagggaatagatccgcgcttcgcgcggttttaataatttttctaaaattttacattaagaaaattaatttttagttatgaatgaaattttaagtctaatattttttaattatttttttatgaataatataaaattgtataatatattatgtaatttttatttttacataattagcataaatattaatcataatataataaaaataataatgaaattatttataataattaaaagctattaaaaatatattctttttaaatgagttagatattataatggtataagtttttaagtaataagaaaatctcatttttcttatttttt

SEQ ID NO: 29520 - DNA, 1446 bp, Cannabis sativa
ggaggccaaagtaaggacctagcgcccaagttggcactttgttaacttcggccattcagaagaagtcttccaagaatattctctattttcacaaataattaagatttgggtgcctttggagaacaaacaaagtcatctgtgagccaaaactgagacccagcgcctaggttgacctaagcactgttttcaacctgagacatttctaatccacttttcacagaagtcttctgggcatattctctgttttcatgaataattaggatacaagtatttttgggaatcaaacagatgcattaggtggcaaaaaactagacccaccacctaagttggcactgtgttgagcccattgcgatatttccagtcacttttcccaaaacgtgttctaagaatctttttcgtctttataaataataaagatacaagtgatcttagggatcaaacaagattttttggggtcaaaatagagacccagtggctaagttgacatgggcactaggccctgcgcccaggttgacatggaacctggttctcatgtttttgttcctcaaatgaaaattttgctgtgaatattcttcttattttggttaagaaaatggtgtaggagaccttgttttcaatctcaaattccttagaagtatcaaaacaagcaccgagaagtcaccgaagaagcacccatcgcctagttgaagtgtgacctagtgagctgagttttgcttatcagaatccaattccgtctcaaacatccgactatttttcatagtaaatgagagctatgacttgtgacagatcaaattcacactttgatatttcaccctttcaacaaggtggaatattagcaaatcgggaagtttcgaatctacccgatttcaccaaaaagcaacatcttcgagaactggcgaacaacttctctaaaacaaagaatctaattaagtgatgtcaacatatcacttaggcatcaaaaaaatacaagtccaatatgtttttcacttacccaacgtccaggttgacgtcaggatgtcaacctgggctttgggtgctgaacaaccttcaataaaacgatcataactccctcaatattgatttgattgatgcgattcaacttgcattttgaagctatttcaattcatgtatcacatacatattgcaattctgaatatttcaagtctaaaatttatgccaaagacagttgcaattttcccaaagattacctgaaaatgatttgacgaacgagatttaagctctgaaaaattgacgattttcatcaagagtcaattttcaccgttagatcatcatcagtggtcaagatcaactcaaattgattttttttttttttatatttttgaattattttattaatattttaataatagtatctctctctactttttctctctggaatttgaagttctttccttagctagttttcttgtatttctcatgagaaat

SEQ ID NO: 29521 - DNA, 1475 bp, Cannabis sativa
ataataataaaaatctcatacataaaccctaattatttaataattcaaagtattattcatatgcggtctttacaattatgataggacctaataaaagttttctaagtgttttactttacagatatttcttacattatattataggtaatctaataccactattttgtttatagtgtgtccgataagtagattttatattttaaatctaatctaatctataatagtgtagattaaattaaatcgataattttaaattaattacttttaatgttaaattatttaatattaattaaaaatatatattttttttcacatcaccaaaaaacaaaatcattaaaagataaaacataagatatttgttttaaagtcttcaacaacaaaagaaaataagttgttattttatgtttctaacaataaattaaaataataaacaaaatataataaaaacaaaaaaaaaattgtatgtaaaaaaaaatagttacagttttagattattttctttttttataaatatatttgatatattaaattttaaaaaagatatgaactatacattagttatatttagttactttaaaatattaatattatatttaaattttttaaaataaatataaataagtatgaattggattgtatctgttatttttgtatttgaaacaacatttaatccatacacgtgtggattttagagtttttaactcaatctattctgtacaaatataaataaaaatatttgcactttataaattatattgggtcgagtattttatcaacaccctcattataaacatgcatacagtaatgatacacacaaaaaatacatcaaaatattacacttaataatataatagtgatatctaaaactatttgtcttaataaaacaaattaaatgtgatcatctaaaaactagtcctcttaaatatcacacttaatgaaatagtgttttagtgcatattttgtgtcacaatatgtatagcatataaccaaataggattgtcctcttttcttttttcattaaaaaaaataatattgcattccattccaagttttgttttatgtattttgtttaaggtaatatatactctaagcttggtttgatttactttgacttttacttaatggctgacctaagatttaaagtgaaaaggtgtgtaattttttttcccgtaaaacagggacaaaagtaaattaaaaaaaaaaaaaacttttcatgagatttgaaccgtgacctctatcatatatgtaatctaatttaactattacaccaaaactaatatcatatttataaatatcatattttattacaaatatatgtcgtaactaattacaaaacatatacatctttttctcgatttttttatagggatttctgtcccactttatttctatgtgaatctgcccttatttctacacgaaatgcagagagagaaagagaaagctttggtggctatatagtgggctcctcatgaaca

SEQ ID NO: 29522 - DNA, 2821 bp, Cannabis sativa
  modified_base (26)..(30): a, c, t, g, unknown or other
ataaaatggattacattgaaatggannnnnatttagggcataaaacccaataggcatcaaatcataagccgtcgtagaaggtgatgtcaagaacaacttgatgagtagttacttgatctttcaagaccttgatttgatctctaagctcagcagcagcttaactatgtacatcaagtgcaagacaagaaggctcttcaatacccaaagtcttcttccgagcaatttccaagcttttcttcaagctactctcttgagctttggcaccaatagccacttctcaaagattagtcaactcactgtctagagaatcaatcttctccttcaaagcagtcacctagtcttttgcagcaacatcacgatcttctatagccttgagcttcttagcaagctcaactaccttcttgtgttcgttatccatggtgtaagtataaccaacacaagcctgaagataagaaaatgatgtcaggtgatgttaaacaaaagagagtttagcttgaaggagacaaaaaaaaaatagttacctcgaagattttggtgaagcatctttgagcaataacatattgtggaggtttggtgctgaccaacttttgtaacaggatattctcagccttggaatcaatcaaggtatcaccatgggcaagaagcccggagccctgtgcacgcagctgctccactaaatccaaaccagagttcggaacaccagtctcagcctcatctagagagttatcgattgtagttctctcatcagcactagcagtactaaacttctctctgctagagtcttgagtagtagaagcaacatcaataggtctactcctctttttgactttcttctttaaagcaacagaaacaacagggataccatggacaacttccctgattggaggttcaaattctttcgacaccagaattttttgtttcaagtttgaataagatgccatagcagccaaaagactcatattgtctacgaagaaaaaaagataagcagttagtacaacatgaaaaaagcaaaacaaaaaagttcaacattcacaacatcagccacctgtgattgattccccatcttactttgaagtagtttgagtggaggtaacttcttattttcaatggataagatatatagatagaaagatggataagataaatagataactgtaaaaggaatgaaagaatattatttcctcaggaaaaaaaaataaataagaagaaagaaactaagaatatatgatcggataccacgttacagcactggtttctaggattaataacgcaacacgcactctattaaacattttattcatccttatctcctatgtatggtaaatatagcatatgatatatgtataatattgcataaacgcacacaacaataccagtactatatataattattagtttatgttgttatatagaaatattggtggtgtttttttacttcgtcatagtatatattgtagtgatatttgggctaagaaaatatatatattatgagaattaattttaatcgggcagctggtgtgtggtggttaggttatcctttttcatcttccattaaagttgcctggtacgtacccttgagagacaccatagtgttctaaattaagtgtgacctttacaaatggagactctaaaataacactttttcatttattatttttaataagtctttttttcttttaataatttaaaacaatattaatgaatatgagactcagtatttatttatactaatagctaaagctagccttataaagtgttggacacatatatatatgtgagtcaaaataaaatgttcaccacaatttttgaatatgtatgtatatgcattataataaatctcactcacggattgattgatcatttttcttttttctcacttttttacaagggaaaaggaaaaaaagaatataaagaaaaagaaaagtaattaattcgtgtcattcacggaaagttataataagtatgatcaagtggtgagaatcattattctggatcaaactaattaatatagtaacgcatttatatatatgtgtatatatagcaatagcactaattgaattaatgatctagacagcccaaaaattaatattcagctggggaaggtggagactacattatctacatacatatacatatataaatacaataattaatggtatatatattatatatacagcattaagaacgacccatctccactactatcttctcttttcttttcgcctctcgaatgttattgcatgatcatggagcatatatttcattatctatactgccacattatccattttttttttctttctttttcatcataaaataaatttgttattatttttatattatataatatgtggactatattagatgatcattccttattataaatgtattttttgtatatatataattaacgcatttatcccattattaactactaagtcatgtattttttgtttgttatagttttactactgtttaacacctcctgtgtatgagattatcacattttatactaatgtgcggtttctaataatattaaattaaaatatatttattcaaaatattctttttgacttaaagtttgttgtattaattaaaaaaaaaaagtgtaaatccgttaattagcataaaaatcattcggaccccgctaatcaatgacttgaaaaagaatagccagagccaaacaattaatcatcttgttcagatattgtttaacaaaattattaaaatctaaaatattaaatataaatgttagagagagctttatttacaccttatttaataattttttattttcaatattgtatgtgtgtcaaaaaaa

SEQ ID NO: 29523 - DNA, 5357 bp, Cannabis sativa
aaaaggatatgttattattatttacaaaataagaaagtattaatatgtttatatatattgggggagaagggatttaaatttacttttaaaataaatgcatatttatatttacgttttactttaataagatatatatttttgttttaacttttttaatcttaataattatatgcatctagaataatgaatgaaaaaaagtgaatatattaattgaaaaaggtatattttatacaacgtaaaaataatgaaataggataactttatgaaattatgagttcaaatatatatgaaatagactgttataataataatgttgtctttatgtttttctttatatatataataatagtaatgaagctgaggtagttcatgagattttcaactcgatacgagaaaaattaagatccataccttcatctcaacatagtttaaagcaaggcattgttggaattgatgacaagattgcagatctcaacaatctattgtcaaactctgcaagggtgggcatttgtgggatggggggcctgggtaagaccaccctagctcaaattgtctttaatcaatcctgtcatcaatacgatagtcattgttttttccgaaatgttcgagaagaattccaaaagcacaaaacaaatttgaaagaagaatttttccgtcaattatcaaatgaaaaagacttgcgatatggagatttgggttccttaaaggaaaggttgggccacaagaagttgctcatagttcttgatgatgtcgatgatttggatgaatataattgtttacttgaagatggtcattcctggctaaactctgaaagtaaagttattataacaagcagaaatcaacaagtgcttcggaatattattggcaatgatgagaagatgatatacaacttgaagcaactaaaagatgaggaagctcttgaactcttttgtttgcatgccttccaaagaaaatcacccaaagaaagttacgaatatctttcgtcgaaatttgtgaaatatgctcaaggccttccactagctcacaaagttttgggttcttatttattttcaaaaagcaaagatttatggcaaagtttgctaatgaagataacaaaagtagatgctgatgaaaaagttacaagtacattaaaaataagtttcgatgggctatcttctaaacaacagagtatatttcttgatatagcgtgcttctttcggggttatcaaaaatataaagtgaaagacatattggatgattgtggtgattttaacattgccattgaagttcttattgacaggtgtctggtaactgtttctgctaaaggcacacttgaaatgcatgatttgttgcaagagatgggtcggtcaatcgctcgtggatcaaatcctaagtgctttgaaaattatagtagattatggatggccaaagatgtttgttctttcttgaaaagtaataaagtaagtgttattctataatgttatatattagagtagagagtcttatattaataatattgtactgtgaaaacttaacgacacatatatatttttatctttatatattaaaagtgcttataatggtatttttttgtttaacagaatatactttaaaaataaaaaaatattctgttaaatttaacgatattagtaggtttgatcctcccgttaaattcttaaccattagttttataaaacatatcgtttataacataatttataattagtcactaaattcttaaacaaaaaccactagaatttaaaataaaactaatatttacgaggtttgctatattcacctatttttaattttgtgattagtcattaatttgtgtattaatttgttttgaattttcaattcttaggcttcttccacaattgaagcaatatcttatgttgattatggaggtggtgatgatgtcataaacttagacccttcttcattctttaaaaaattgccaaatctaagattactgaatctatcgcgattactgaatctaaggccaatatatcgtgaaattggatttgaatttcctgatggtcttcatgacccttttcctggtgagcttagattcttagaatggcctcattgccctttggaatcgttagggtcaaatttcacaccacagaatcttgtttatcttagtatggaggaaagcgaacttaaggaactgtggaaagaaaatcaagtaagtaaaataactatatatatgctttattcattaaatattatcaatttcatacattgttttaattgatattattcttctataatcaaatacaattatatctatttgatacataatttacggtataattaactattttttgtgctgtacatatatatatgcaggatgttagcaatttaaaaaatgtcatcctttctaagtcaaagaagcttatgtgtctcccaaatctctctcaagcgaatcttcacatgcttcgtctagatggttgtacaagtttagttaatcttcgcccgataagatttcacaatatttttgatgatccagataaagaatctcaagtgaagtacggatataattctttgatggatcagttatttataaattgtgataaaaaggttgaagaccaaatgtctgaatggatgcccgaggagttatctactaactcgcttgatcttaatgggtgctccaatctcacaattcttccaaagatttccggttatatcaaatttatatgtttacgtaaaacagcaatcaagaaatggcacccatcctttttctgtctaaaaaatcttcttgtacttgatctaagtatgtgtaaacatctaaggaaacttccgaatgatatttgtgagttagagtcattggaatacttggatttgggtggatgtgtatcctttgaaaagtttcccaggcttccaaaaagtataaaaggattaaatttgaacgaaacatccatacaacaagttgattcgtcattattcgactgtctaccttctctcaatgtcttattcatggaggcttgcgagaagcttgaaagcctcccagctaccattagtaagttgaagtctcttgtgcttcttagtcttaaaggttgctggcaattgaaaagctttccagaaatctcggagcctatggagaaactagagacacttttgttaagtggaactgggattgaagtgctcccattatcaatagagaatctagttgtgcttgaaagcttaaacttgatggattgcaaaaatctcaagtttattccaactaccattagtaagttgaagtctcttcaagcacttactcttgaagattgctcacaattgaaaagctttccagaaatctcggagcctatggagaaactagatacacttttgttaaatggatctgggattgaagtgcttccatcaccaatagagaatcttgttatgctaaatttgctctacttgagtggatgcaaaaatctcaagtctattccaaccaacatcttcgatatgcgcaacatttctgaaatcgagattgatgaatttccaaaactccaaattctgccatataatggtttaccagtagaagattcaagtgaaaccagtactagtcaactacttctaacacatgatcaaccgtatatttgcagtagttgtacttattctacagcaatcctaaatttgcattatcatggtgttgatttcacctgttgtcagtgctttctattctacaccatacataacattttggctacccaatatttcatgaataacattttctttgtttgggaaacagaaaaatgcaagtgcaaagaaggggtatatctctcttacttatattgaataatagaataaattcaatagtatagtttttcacaattaatgtttacataaatgacttttgtttttcatgtattgtaggatttgagtgaagctattagaacaagtttttgttattcaggagatacaattactcaatggtttgaccatcaatctatgggatcatcacttcaactaaacttacctttttcctctttagaagatcttcgcaacttcttaggctttgctttatgcattgttgttgagtttgaagcgacaacattaaaacctgatgatgtgttgaaatgtaaatgcaatctgaaaatcaagaatggtcacaattttcaattctattcaactctacaatgccaaaaagctactcattttgatgataatgatgattctaattcagactcgtcctcaaatcatcaagtgttcgtatggtatctataccgcaaagacatttctgatgattattgtgagtttcatggggaagagagtggaatatttgagtttcagattagcaaaggaacaataaaacaatgtggagtccacttgctacatcgccaaatatgttcagattaatcgtacatatccaagtgattactattcctaattcctattcatcaaggtaatttattactatatatataaagcttctctattttgtttctacctttattaattgttattcttattatcatcaacacgtctaattttttttttaaaaaataatgaacgttccttaaaaataatttaaagttaataaatcagcatcataatttaagtttgatttgactttaatacataacacgtctaattaatattactttctactcacaattacatataatacatgttattatttaatttatttagtaatacaagtgtatttttatgatttatatatggggatgtatacatatataatagatttgtattgcaaggattaaataccttattttccaactaaatatcatcattctttaacaagaactaaagtgtcattatcgtttttaattaattaatttcaggttaatttctcatatttccagagaaggaaatgaattaggttgcgtctaagcttttgaagattttatgtgttggatctcatgttgtacttttcttaaagcgtggcactcttttccctcttttgaggttttatccactcatgtggtttaactctttaggggttttgacgaggcttcgatatatatcataatttatttagtaattttgtttttgcacaatcaattatgtaatcctttttgggtgtttagtagtttcgatcatattaatttgtaacccaaactatactctgtattagttcttatatgataattgaatagttaagtgtagacgatggctttagagttgggtgccgacctagttgggatgcttctttattagcctgattatgcatctctaatcacatttcttttaaaagtattatttgtaatttttcaaaaattagtaatatattttcctatgagaacttatgaagatgctttttatgtagcactaaaaaacaactatttttagtgataaatttttagttactatataatttttttttgactaaatataacttttagttataataaaaagttacttgt

SEQ ID NO: 29524 - DNA, 2339 bp, Cannabis sativa
  modified_base (649)..(667): a, c, t, g, unknown or other
ttttgtcatttaacaaaacacatggtccaattggtaacttttgcaaaacagatggtccaaaatggtatttaccctaatttttattaagggccgttattcggtgtgtaaattgtaattaaaattgagtgtaattttgaatgattatgagattggcatatttatttgactaaataattataaattagaagaaattgaagaattttttatgatccttaccagaatttaatgaattctagttcattgttctgttgttgttattataaatttcactcttctttctcccatcttttattattattatttttcttctttcttctttctcactctcttgagcctctctcttttttcgaccacattgtccaactctaatggaataattctggctgcctatggtctaagctaatctcgtcgcccctaaaatactaaaatcccttgagactgagaggtgagttaggggtttattattttaaattttttaataaattattaagaacattaaatgatatattatattttgtgtcaaaatctataattatgcaatagagcacactaataaaaattggaataaatagcggcataagtatttaaagttttgagtttgtaatcggtataaattttaaaaaaaaattattggatttatgccgcttannnnnnnnnnnnnnnnnnnacttatgccactatttacccaaaaaaaaaattgatataaaatgccacaaaactttagtatcaaatatagctcactcaactattaagatggtcacttaaccaaaaaaaaaactattaagatggtctaagtgtagtagattagatttgggcctctctttcttacttggccacctctgtctgtgagacttgaaaatggttggttccagcccacttcacaagtaggcccaatttgatagcccaaacccactcactgaaaagattcgggactcagttgtctgaaaatccaacaaacaactcttttttccgatttgacgatcgactgaacatttcatttcttcgttctatttggttctttacatcccattcttgcggtaatcttctgttcatccctaaagcattttgttgttgaaattgtgtctctttctttgtggagaagttgcagagatccaaaacactctctctcatttcaatgataattttgaattgaagttccgaaattatcactttgtagagcttgtaaacaatacatttggagattcttgatctatttttacagaatttatcttggcattccaatttccaattgaagattcttagctccaaaaatggctttagttgatgtcaccaaaacttgcgtcgactccattcgtcaggtatttatatatatacttttagttcatttatatgtgaatgtttggagtgaattaaattttcgttgtttttagtaggataattttgtcatcatcatcatcatcgttatcatctgcttttcaatgtatgatgatgtttgtgaatggataagattgttgtttattggtagaagcctttgaatacagttaacacagttactatacaaacaatgattgtcggattttcaaattcaaatgcaatttagggtaaaattaaactgaaaaccataaaagtaggtgacatcctgtgtcctctgcattttttttaatgagaaatgctaagtgcactctttctagtttcttacactcatttaaactcttctacttcagtgtttgacatgtagacgttactaataattatatgtacttttaaaatatatatttagttaacattcacatattgtgcactatcacagtaaagtgcgaaaaaagagattgcaaaagtgagtttcctaagcatttctcattcaaattttatcgtcccattaaaggtttatggtcctagtgtgattctcttttgttttctttgcattattttttgtctttacgattgaataccacataatagttcgagcacaactgcttcgttggttaacatctctacttctgggaaccaatagagattatgtctcacataaattcatataaaaaaaaatgctaggctatttatactcgtttgttttttcaaatatagatagcagagcacgtagatggttcgattgtttatttagatgctggctctacagagagttttcaattaatgggagcatttccagtgttactggaccttggagcacgtgctgtgtgtagtctggaaaacatgtgttcttctgaccaagtaagtaatcttttccttaagtacaccatagtttctgtttttccgttttagatttttttttttaactattgacaagcatattcaaactttgaacactgtgcaattaggaatttaggttgtcgattctttcattataaatcaatact

SEQ ID NO: 29525 - DNA, 1039 bp, Cannabis sativa
atatactgcaagtgaaagttataaacgaaaatctagttgaagaaaatatgtataattgaggagatatatgatatctctattgttgcatggaaataatacatgatgtcagaaccttttataaccaaataaagtgactttcaagttgtatattctaagtttcaggactgacaaatcttatattatttttgtttcattaatagtttgtctcacaatttggagtgtatagtgctccctcattaattgttaagtagaattttactggtttaaacgtacaaattaagtatcttacatgatcttattagtttatatattgatgtacaatttacgatatttggacacctttttgttagaatatagttttttaaaaaatgctacaaggtaccaagaaccactagttatgttatattgttatttgtgcaattgaaaactacactatttttttttaacagagggtctcacatattttgatttaataaataatattgaaaaccactaaccactcacaacatgccacattggtggtgttgggcaccttaaggtatcactattaaaaaacctaaaattctcgatagtttcacactgtcgggtaaaaaattctcgacagtctataaaaccgtcgcccatacgagcgtcacgaatacttagtagaataggcgacagtggaaaaatatcaatataaaagagttcccgatactttaaaaccatcggctatagtcgatactataggccatggtttaaaaccattggttatactagagctgacggtttgaaactgtggcctatagtatagccgacggttttaaaccattgctatagtggattgccccccaaaaaaattatcgtcttcatcctcctcgaaaccccttctcgtgcagccgctctaaaacctttacaagcttcatcctcctgtatcgtcgttgtgctcgtcttcatccccgaagttttcttttacaagtttcagattgcttttcacttgatgatcctcgaaactttcttcgatttgcaagcttcgaaacttattttgaacacacacagatct

SEQ ID NO: 29526 - DNA, 5575 bp, Cannabis sativa
ctcatgctcttgctcgagaatcatggttataagttgattgtagttatttgggtagttctatcccgagtaacattcttgatgtgatggtgcatgaaatggtttaataaaattctattcaaaaaaaaaaaaaaaaaattcgagtaaatattatttttaactttgtatgtttgtaaaagttattttttgaactatttgtataaaatagacaataagtgagaattttttatttgcctaatattaataacacataatcatttcaatttaatataaacattaattattaacgacttatttatttatggctaccgtttactgagaggttgaagatattttgaataaacccggggaacaaaagccccggttcgaaccctcctaattctccaaaaatggcagcaattttttcattttcttctaacatttcccatctcaattcccagaactatttattgattcaacaaccaacaaatcctcgccggagtttattaagaactcgctgcgccggtgaaaatccaccaagcaattcggcaaccgagcctgaaaatgctttgcttaaggtagcttggaatgcctccgagcttttgggaatcgccacatcattcttccgatcgccgaacaacgccgaagctggtgaggtggctcttgagctcgccagagatgcgtcgggattggtcgaccgggctgcgattgtgaaaaccattaaagaagacttcgaaagatcatacttcgtcacaggtttctcaataacctatttcggacttttggttttaaatgtttatgcctttgatgctgcttgtgagctttgacaaagatattggagaaatagtgcttttagttagttgttatttgaattcgtccaaggttttcgaaaacccatttgaattttgataagagcataatgttcatcttctgttttaaaacttattgtgtaaggatttttatcatttgtgggtttcagttttatttctctagaaattacaagttcttcagttcaacgttgtattacttacttaattccatgctttcaaataacccgcacgagaatttcgcagaaccatgctgcttcggaaatagatttttcttaccgacatctcttcatgaagtaattgtatggatgataagtgctctagtttagtgtttgtgatacttcatactgagttttcgaagacccatttgggaatttttgctgaaacattatcgttcgatgatggcttgtgataacaatacaatctggttttatgtggtttgatgtaggtgtaagtataatctgtgtttgtcttacttggtaccaagttttttcaaaagaatgagaattttgcagacatgttcttctggtatggaaatatggacaataattgtgataatgtcatccctggatcgatttcagttttaattttgatgtaaaagtatgagtgattagtcttagattcagttttaatgatgctcaactgaattgttgatatatgacaattaggtaaccttacacttgatgcttatgaagatgactgtgaatttgccgaccctgcaagctccttcaaggggcttcgtcgtttcaaaaggaactgtacgaatttcgggtcccttcttgagaggtcgaatatgaagcttatgaagtgggaggactttgaggtgttcaaactttataatctcttagcctcttcttataatttaccgttctcttgattagcctgatgaaataaacttagaatttaatgattctcttcatcacagtacataactgaagaatcctctttcatgagcttatgtatgatgtaaaacccttttttttttttttgtgtttgacacaggataagggaattggtcactggagatttagttgtgtgctatcctttccatggaagcccattctttctggcaagtctttcgttgtcttattcaaataattaaaaaatatataaatggtttgataacaattatcaaaggaagcataatcttacatggggtcaatgtttttgagtttggaagccgatgtcaatagattgttttattgtatcagagaaatttaaggcaagaacttttatttttcattgttgatcttcgcgagtcaccgtttaattgggatttgtttgccatgaaaaaaataaagttaagcttgataatcagaaatcaatgtttttgtcaaaccatgcatataacataaagagtagaaaattaatctctatttcctattttctttatttatctgattagttaatctatattgcagcaagcggttacacagagtatttttttgatccacagtctggaaaagtatgcaggtaactaattaattcttttacttcatttttcccactagagagtgtcatataaaaggaaaatttcttataaatgaaattttttgtcaggcatgttgagcattggaatgttcccaaaatggtattgctgaagcaaatatttagacctagcaggaggttgagatagagagaaatagagatttatgtccatatcaagaatcttgtacataataaatattatgcatttttgagttgggcaactcaagtctctctgtccagttttggtgtctttacttttctgtttatggttacccatttgtgatatatgtcgctgttatatacatgtttttagatcggacgctcgtcatagtttggtagttggcttgaaaaactgagacaacaagaagtgatttattggcttaaaattacatgtgaagcactttttagagtattgtaatggggaagtgtatggttaagacagtagaataagtgagtgtatagtaaggtgcatgaggtttcattttaaaactaattagcaatgagaagagtagctaatgcatcttatatatgatgtttagttttaatacattatcaatatggaactctctaacatagagaagtgtttgcaattatttctacttgtaaatgatctagtgtggttgattcgtataagttgtttgttgattaataaagttttttcttttttatgaaaagaaatatatatgccaagtacatattattccaagtcaatttgattttttatccaaatttgcttcagagatataaaagaggaaatgacattatgcaatatggatcccttacaaaaaaaatggtatgtttgtcatagtttttgcttattattatatagctactcacaaatgtctcaaaataaaataaataagtatcttgatttaatacagcaaaaatattttttaattttaaaagctaaaaataacttaaaataagctcatcaaagttagaaaaaggaagattggaacaggacttgaattccattttgtcttcttctaacttgcgatcataaactgttgcctttttagtctgaaactaggttgataaaagaattcccaaaaattaggtcgaactcttacgaccacccagtgccatatttaaaatatctgcaaaaatatttttattcttttcaattttgtttttttgtttacaaaactaaatattttataatatgttctgtctgtgactgtgagatttaatttagaaactaaatacacttaattattgaaaaaaatcagtcgtctataatttttttgtcacattataattattctttaaagctaaacaatttttattctaaattatttttgacgtcgtattttggtatttagttttaacttatttttcgtttggggctaaattgataaaaattcagtttttagggtatattgtacaatttttaaaaatgaaagatgagagtaaaaacatttcttagggaagagaaacatatcgtagtttctcggttctgcaatagaacggaagaacaaaatccattatctttctcgctctgcaactctgctcattagggttcatcatggcatttccttatatggaagcggttgttggtaatactttttcctctacttccttttcccttcccatataattataatctgtatatacaatagaaggcatatgtgaaaatattcatgaaatctttatctttttaagattttcggcggcatttgagagtaacagctacgttttcatcttcttcctcttcttattagttattcgattatgcgattttttatcgatttctttcctgacaaattttgtttcggtatcgattgcgagtgtgtttttgcgcgtttttctttctttggattaagatacttaccttttaatatgaagaagctagggtttcttttgaaggtcctaaatttatattgtgtgttgatcgtatgggcgttgcatcagaaaatcttcgattggttgcttgggtaatgaggaaaaacatcaactttataaatattttagcgtcttttattatcctcaaaggcaatgatggactaataacattctctctctctttttggtgaagttttaattttagggatctaggctgtattatttgtcagctgaaataacatgtttctatttccgttagtattttgatcaatcttatggtcgtatcaagtacattgcgtaaggatcttcgcttctcataatgttaattggagtttttttaggaggatcgtataacttacaagtacttgctcatgttttaattttgggacagttttggtcgctaccttgtttccttttgttgttttgtattccacttattttgaaatgggccaaatggcaattacttttatgctaattagaagttttttgttttttctttcctatatttcttatcattttttttttctttcctgtttctcctattttatttttcagggtttatgatattgatgtatttcttcgaatcatatttggatttgcggcaacatgcagcactaaaacggccagttcttccaaaaacattggaaggcttaatcagccaagagaaatttgaaaaatctcgagcctatagtcttgataaaaggtatgatatgcttttgtttttaattcacagcgtgagtgtgtggtatatggccccatatggctatacgtgtgtgtgtgcatgttcacatttctgatggatgttattaactttcagccacttccattttgtccatgagtttgtgaccatactaatggattctgcaattttgttctttggggtattgccttggttttggaaggttagtgatggaattttggtaatgtctcttcctttgctgttgtgttatggatgtttaatcctacttttcaactgcagaaatcaggggattttgtggtgttagctggtctcaatgcagagaatgagatactacacactctggcatttttagctggtgttatgttttggtcacaggtgggacatgatttctccaaacattgaattgcattcaaggaagtagtattagtgtactttataagagtgttgtatgtagtgtaaaagtaaccaaacccataattgtgtgggtacttttattgtataaagttgaagtcttataatgcattaggatctacttctgagttatgaattaccgacattttgttctttggaatgtctgcagatcactgatttgccattttccctttattctacttttgtgattgaggcccgtcatggatttaataaggtttggtttcctgctctgattttgtctcgttatatttgttttttttttgtattttctaacacacgcgcgcacatgtatatgttacttttttttttt

SEQ ID NO: 29527 - DNA, 2220 bp, Cannabis sativa
  modified_base (1593)..(1598): a, c, t, g, unknown or other
tcaattaattagaaggtaaaaaatttaaactattctaacatatatatatatttttatgtaaaataaaccaattaaaaattataatttcaatttgtatgaagtatattttctagtattaaataaatgaaaacttaaacctttaatgagtgtaagatatttgtttttttatcaaatgatgtcggccatgaaacatattatatagaaaatgtgggataaaatactgaagaaaatgtaaagtataataattaaaaacaatgtatatgccaaacttttgatgtcaagaacggctggattaatctttactatatatatatatattatattaataatttcatttgtagtcaaatgcctaataactaatgttaaaatttaggatatgataattaagaattagttcattcatcttatatatgataatttatttatacacataaataatgtgaaactaactttaatacaccctctttatgtttgggcctgaaaaaatgtgaatataacgatcgatctttaagagaccacatgaccgaacgtgacatttgaaagaatcccacaaggccaaatatcgagaaatttgtgagtgtacacgtcgagaaatttgtatattttgaaacaggtcaaagaccccaacactggaaactaacacacattggccgaaaggtcccaaatagagattaaaggagagacaacagaaatatctttttggatcggcagcactagctcacaacggatcactaacgattttctggactggtggcaatttgagctcacaatatattacaattggctctgatactatattagaatttgggataagatgaatgaggttccatcttaaaaccaattgacaatgagaaaaataacttattcatcttatatataataatttattttcacatataaataatttgagtctactctaataattaataaggcttcttttaagagattaaaagaaaagctgactaattcctttttttggggggctgtttattgattggaatcacatctaattatagtgcccaatatcataagacatgatgaactcttcttctaacaaaaaaagaaaaagaaaaaatgatcataacacatggtatattgtatacacatatcaatttaattaaaatgaaattatgctgaatgtactatttttttactacaatacaataacagtacaagttgttggcaatgcaaaatttgaatttatatgtatatatttaaggtatattaaatttttaaacacaagcttacaaaaattaaaaaaataagtacattttatattcatacccattatacctttctctcttttcttctcttctcttctaactttaccatccataccccgtattctcatctatattgatggtggtccgatagtgacccaatgctatctattttttttatatgtttgtacataaaaaaaagtaccatcaggtgactatcagaccaccaccggaccactatcggatcaccatctgaccatatctgctaccaattttttttttatgtttttgtacataaaaaagaagtagtatcaggtgaccatcggactactattgaaccaccattagaccatatctgctaccattttttttnnnnnnatgtttttgtacataaaaaaaaagtagcatcaggtgaccatcagaccactatcggaccaccatcagaccatatctgctaccaatttattttttttatgtttttgtacataaaaaaagttgcatcaggtgactatcgaaccattatcggaccaccatcggaccatatctacatttaaagatgttaaactccattcattaagctcccgaggaaggcatcgagccaccattagaccccatcgaaccatatcattgggctaccatcggaccttcgtctttaacctttactcattttaacaataggaaggcatcagaccactatcggaccaccattaggcctgacaaaaaaaccaattttttacccaaagctcaaatctggctattttcgaccctaaatctaacatctactcacagataacaaacattaattatacaatttatttctttgacaacatttccgatagtgaagccgtggttgatggagaaatcgttgggtctgcggtggtcattgagtccgtgggtccttgggtctgtggtcatgatagtcgtgggagaaagaaccaaggttgtgggtcgattgtgtgctcctccgtgtgcgtatttacgaagagagagagagagagag

SEQ ID NO: 29528 - DNA, 3640 bp, Cannabis sativa
tattagtttgttcataatatacacgttaaaatgttatattttaaattatatcacttaatataaatacaatatttatatataaaaattataaaagttagacaacaccgtgcgaaacgcggcttacttccctagtttttatataaataggggttcatctatcgaaataaactactgagaaaattctctttcaaattttctctatgttcatctatttttttttcttctcaatttggagttgagtcaagacaatgaatggtcgattggggtttagggttttagacttttagtatgtgtctggaattgtaggtttggaaagcttctcaagatagttggaaaaattaattagcaagttttgggtattttcatcgttataatatacatataacaaaaataacaaaaatacaatattccgataatatcttcattttaaatgagttttatcttcaattttttcacttatctatcctcgtattattatattatttttaaaaaatagaaagtacattttgtcaaagtgtattcataataattttataagaaataataatttaaatatttattagtaaatttttaaattttaatatttctaataaatttcttctgtatcatttgtcaaaaattatataaaaattattgaaactataaaactttaataattatttcattaattgtaaaaataaaatataaaaaggtaaaatacgaatttagacccaaataaaacacgactcaactcgcattttttaataacataacatgacaacttttttatagcacaatgcaactcatattttctaatatcatgacacaacacgattcatatttatggcatgacacttatttagagcactaaattccacaatgcaatgtaggcttacaatgaaaaggaaaaaagtactatgtaggtagataatgcagaacacaatagaacaatttggagcacattcatacacccattatttaaaaattatagactattattagttgggaaagtaaacagaatatcatgggtaaacaatatcagttgggttgtcgtcaaaactcaaaattaccaactgagccaaatagagttctttcccaatatcccctgattcagtcccaaagttgcacataaatcttatgtatgaaagaaaaaaaaaacagttactattgactctataagaaacattccccttttactcatttctgatcaccaccggcttttactggctcaacaacctcagcctccaaggtttctgtcttgctctggttgactatgggatgttgaacatttgcagctgttgaccattttccagaaagggccattcccatcatctcatatatcttaccacccaattgtgctggattgtcaggctgcattaccaccaacaaatttatcaataagaaaaccagtatatgagttatatctgttcacaactcattctaattagctgcgctttcaattataatttatcatccttaacagaaaaataaagatggattatgatatcaatacaagagaactgctgagatctaatttaaaagcccgaatgcatctataaatggaaaaggccgcacttagaaatagtgtaaccacttacagtgtaaccgctagaaaccaaagctgtatcatacaagagatcaatagctcttagagcctcttcatcatttggattactcctgcttgcagcctgcaaatacagagtgaaattgtcagtatataacatataaaaggtgccactgaaaaattatataacaaagaaatccttgttcaccctacattcaagcttttaataattgggtgttcaggatttatctcaaacacccttctgcctctcatgtactccaaactagaattatcacccatagtttgcgacttcatcaacctgcaagaagatcaagttagctcttacaataataatttaataaaagcatctgaaaggtcgttatcatcagcaacaggtgagtccctacctttccatattcgctgaccaaccaaacttcccagatacaagaacacaaggtgatgcgctcagacgattagagatttgaacactagcaactttatcccccaaatgcttcttaatccaatcacatgtttggccaaattcctgtttaatttccttttctttctcttcattcttttcacctggagtaattgattgttccagttagattttctttgccaaatgccaatgataaatgaaagaagcacatcacaaacaaaattaaaaagaattagaagtatattaaaaagaaagtactaaataaactaacctaagtccaagtcttccttgctaatatcaacaaaatttttgtccttgtatgatttcaggttctggactgcaacctcatcaataggatcaaccaagaatagcacctacaaaaaattgaatcacaatataagcatgagctgacatgaaaacaacagcactaccagcatcacaaaatgttaaggccaaaacatacttcaagatccttctcaagaagtttttctaggaaaggcgtatttttagcacttgtcaaactgtcagaagcaatgtaatagatgttcttctgctcaggcttcatgttttcaacatattcatctaaactgatcaactcttcgtcactttgggaagagaaaaatctgagcaagggagcaatacgcttgtggttttcacgatcttcaatacaaccgagcttcaaaaatttgccaaagttttcccaaaacttctcatagtcctgtggcaaccataaggaattcaggtgaaacaaaactctaagagagagaaagagagaccaatcatgaatattccaaatctaatcaattgtattttgtaagtacattggaaaatgtctttcacaaaaaaattggtggatgaagacggtaaagaaagatatacctctctattctcactcagtgatattcccaaaatcatgtcaaaggccttacgcactaaacgtttcctcataatccgtaccttcaagcagacagtagagatgaattataaaacaaacatagatactaaaaactaacatttaaacaacgatagaagtgaaaatagagataaatttgtagaaggtatcaatgtaagtacttacaatgcgactttcttgaagaatttcacgggatacattaagtgggagatcatttgagtccacaacacctttgacaaagcttagatatcgtgggaactattcaatgattgtagactgttagtaccatatgcatgatttccattttacaacacaaataacattaatcaactaaaaatctatagtattttcctaccagttctccatcaaagtcatctgaaataaacacccttttcacatgaagcctaatattttttgtctttggattcaccaagtcatctttccctgtgggagaaatggctggtacaaaaagtatagatcggaactctacttcaccctgtaataacaactcatcagataagagaccaatgtgagaaggttgtgcaacataacacacttacacctggtcctacggaacaaatgttgcttctttctctataaataaatttggataacacagtgaatcaaaaaactttatgtcatcaacttttcaatcaatataagtttttgatataaaatgtttataaacttggccaactgcaaccaaacccaaaaaaaaaaaacaaaaaaaaaaaaacagatttga

SEQ ID NO: 29529 - DNA, 1066 bp, Cannabis sativa
aaagagattactctacattccattgtgtgtataaatgttctaaaggataagcaaaaataaactaattataattaagttaaatattgagtcatatacaatttaatataataatttttaaaggtagaaagtgtttgatactattaacatttaataacaatgctcaaatttataattattagaagaaaggaaaatcttaattaattattcaaagaagagtctctcttcctttgaatttatatatacatatataattttagtatttaagtgcgcgcgcatatgtattattatttatttttcataaagtgggcgcaaatatataaatattattaaatttgttgatagaataattattattaatatttaaaatgtgattaaataaagagtaaagcgtgttttcttctggtcggtcaaatataaatatattccacatccaatatctaaggttgacggtccaatttaatactattaactaataattgcacaataagggatatctttagttgctatatattacttaaatattgaagcctacatatatatagtgtatatctgagtttgatcactagctagagctccatcacaaaattatataatgaatattatctgcctttcactttctatattcctttaattctttttttttttttgaaacaatattcctttaattcatatatatatatatagggagacgattttgttccgtgattgtacttttacggaatgtattccgtgatgtacgacagctgttagatggggaagttatttgatctgagggctgaagttgatctaaaggtaattaggcttaaaaaataataacgtaccctgagacctattattacgtacgtaccctgagactcatctaatttattccgtacatcaggaaatacattctgtaaaagtacatcacatgacaaaatcgtgtccctagaaatttgcgatcatgtacttttttgtctaattagttgagtactctcaaattagtaattgtgggataaattgtgtaagtccaatttattataattatttaaaagtccaagtagcaagaaagatccattttgaaagagtt

SEQ ID NO: 29530 - DNA, 2661 bp, Cannabis sativa
ctaaaaatccagtcaacacttaacaatgtcatgtctatagtatagttggtaagaacatatattacatatttagaatacacagattgtgggatttttacaacttgccatatctctatgatacgatcccagatttatagggattgcttttatgcttcacaatgcaagttctgttattgctaagtgttaatgcactgctcagattgtccactgctcggctgggaagacattatccgtgcaggtgtatgttgtgctctgttcggaacatctcttcagccatatgtagggaatcaggtccatgtgtcaccagcatgtgctgccacacgatagtgcaaaaaattggataacaatgtgattattaaaaaataaattttgggattaaccctatttgtgaaatcctaagaatgtgtgactaggactaccgatgcttgcttaggaacatccagggattcagaatcttcacatacttgggatatcaggtaagacagtagttagcacgtagagttaagcacggtggcgctcatgtttggtattatgctagtgattaggtgagaaactgtgattagggttattaacctaaaatgagcggttatatggtctagggttattaccctagtgattaaataattttgaatgtaatgccatgcaatatatatgttgagataaagaattatgcgggtaaggcataagaagcagatcactgtgtctaagtcctctgttgaagctcaatacaggtcctagctaacaccacgtgcgagatcctttggctcatcaacatcctctctgactttggaatcaaacattcacaacctgctaccctcttctgtgacaaccaagcttccatacacatctatgagaattctgtcttccatgaacgcaccaaacacattgacattgactgtcacaatgttcgagaacaaatcatcaaacactgtatcaaactctcccatgtttcttctcaacacaacatagcatacatcatgacaaaggccctcttcccaacacaattcaacacattattgtccaagatgagtgtcaccaacctcaacacctcatcttaagggggagtgttagaaaccatgagtgagtatgtgagggtccactctgtttcctctgcactctactgcaacatagtttaattccctgcaactgacaggttgttattatgcaatcattactgagggaatattatttccctttttggttatgcattgttttttgtgtatgacacttgtcactattgtattgattcctattgtattgtaaattcctatttaatgaaaagttatgcatcagtctcaaattgggctgagaaatccattgctgcattttctctaaaacttaacttggtatcagagccaatccggccttcgccaatgtctacaggcaactctcagactcccctccaccctaccaatcctaaccagagtaatcatggagttgttactggaaatggtagcagctctaatacctacactcacaacttcactcaaccctttaataccctaaaccaacaattctctctcaaactcgatcgcaacaactacacactgtgtaacagactcgatggtttcatcaatggcagtcgcccctgtccaccggagttcataccagcaccaacctcaactgatgaaaaacctaaagtttgtcttaaccccgactatgagcactagattttcagtgaccagctgctcatgggctggatttatagctcaatgactgaatctttggctaccgaggtcatgggttgtgcctcatctgctactttgtggagtgccctagaaaatctctttggggctcactctcgagcaaaaatcgacgacaccagaacattgattcatacaacaagaaaaggaacaactcccatggtcgaatacctcagacagaagaaaatgtggttagacagccttgcccttgctagagatccctacccagaagcacatcttatttccaatgtgacctctggtttggatgctcaatatcttgctattgttgttcaaattgaggctagatctaacatttcatggcaggaaacacatgatatgctactgagttttgatagcaaattcgagagacttcatgctgtaggagggaacaacaaaggcaatggcacatctgggatttgtactagaccttcagcaaatctagcagcagccaacatacttgggaatcaacaacaaatccgaatcgaggaagaggaaatcatggtggttactttggaaaccgtggtggttcatccaacaatagaggaggttaccaaggtcgcggaataggaaggtccaacaactcaaaaccaacctgccaagtttgttgcaggtatggtcattcagctataatctactacaatagatacgatgaatcttacattggacatgaccctaaaacaaagcaaaaccagcaaagtggaggcagtcacagttcattcatagcctcatctaaaatcgtggatactgatcaatggtatactgacagtggagccagcaaccatgtcacttcctcatcaaacaatgtcaatcaaaaaatggagtatgcatggtggtaaggatcatctaactgttggagatggtagtcaagtgactatatctcacattggcagctataaattaaaaaccaacactgctagtgatttggttttaaaacagctgctacttgtccctaaaattg

SEQ ID NO: 29531 - DNA, 6626 bp, Cannabis sativa
  modified_base (1611)..(1618): a, c, t, g, unknown or other
agttaaaccacataatatataagtcaggtttattgcttttgctattattgattagtttaacctggatacttttccaggtctctcttgcgtgaatgcagcaagactggcggtttgtatttagaattctaatgttgttgacaatgaatatgcttttaagataatttgtaaatgcacaattcacaatgacgtaatgagaaaagattcttaatattgatttgcttcttgtgatctttgtatttggatactgatactctaggttgaaatccagtttaggatgggaggaatatcttatagatgatcatttctatgattaatagcagtcattttttttttttgcttaatgattattagcagtcttgaatcttgatataatgtaatagctataacatgggctataggagtttttattgcatttgttttgagttccagacttctttctctaaagggtgacagtgctagataaagtatgctgtgctgtgaaagaaccataaatgatggctctgatagtccaatcccagaaaaatggttcttgaaagctgggaaaagatgtgtgtggggtttgtctaaattaaggacctaattaaaacaatgatgaaatgatgggcatttgatatttggattgattaccattatgccaaagtagagataaagttgagatacatagttgtttgttctacatgaaattttgtctttttggagcaacaaaagaggtgaccaaggccaaaaatcttatctcatcattacaaaattaataactgtttcttgatatgcacagagagtgttctaatgaaagcttctgataaggtttgatcaaatgtctcacttatgtgattgcttacattcatttgataatatgccaaagaatacagtttagatctattgaaccaagttttcaaatcaaagacatctgaaccttgatctctactttaccatcttgttctttaattaatttagtaccaattattaattgaaataaaccgctttatagaaatattttgatcatagaaggggaatttgatttgatttttatgaatatctgttatgattagcttttgaaagagcatttgaacttggatgaatgtatatatatgtacatatatacatatatgtacaaacaggtccacaatccacataagccattgaccacatatttggagtgaagattcacaccactccatccacatccttcgtactctggtttttttttaccttgtatcaccacgtggcagaatgagaaggatccttactattatcttgctggaatggacgctttagaaagcaaagcagcaaacgacgacgttttgtgtgtaaatcataagccaccttctcgttaaaggacagtgacacctgcaaccgtgagcgactgaatattattattgcgaggaaaatttaagctccaagcgcattttaaacgcgttgaacacttacctcaaaaaatagaagtcacccataaagatattttccttttagcaatactttactctgaaccccaaagttttttcctttttctattttttttatagaggtgaacctccggttgataagaattgagcgaaagctgatgattttctttaatttaaaggagaattattttatattttttttattttnnnnnnnntttttttcaaatttacagtttgaatttctaaagtggttgtagcactagttgcagtagaaatttttatacaatttttgttgcgatttaggttgcagcgttagttgcaatatgagtttttatataaaattttataaaaatacaaaaaaaattattttgaagtgtaaaaatgaaaaaatcctatttaatttatttatattaagaaaaaaaatatttttggtaattgatgtaatgaaaaaaattagtgagaattataataaacaaatgtgcgaagataatttgtgacttcattgacattatctaaaaattaacctaattaattaatgtctatttcagctaatcccaagaaaagaaagggtttggtggcgtgcgttaaacgcgctaaaggtgcgcctatgggggaaacatgtctccttctcgctaacgtacgcttggccatttcatcaagaacccaaaggcagacaccacaggtaaaagagctagtctttctctctctcacagtgttcttgcttctaaagtatacaaaagcagtcctctcctcaaccctccaatccaacaaccctcgattaaaaactaagctaaaaaaaagcttatcatcgagtcagccatggcggtaacctccacttctctagcttcccaactcgcgggacccacaaacttctccggcctccgacgctcctgcttcaagctcgaccactccaactcactctcacccactcaatcccttttccaacacctccattcccatctccgcctctcttcctctcgcaagggctctagagccgtcgtcaccatggccggcaccggaaaggttttctttttctccattaaggaacaaataaaaacaaaactatgtcgattcttaaaaaaataattattcttagatttctgttcatggttttatttattttatgtttgtattaaggaggaaagtactaaagattcattgttcatttgtattttttttttgggtttagaagaagtgaagaatttttagtacttatgattgaagaaatgaaataaaatcaatgtgtgtttatagactaagctttcacaaaaacaaaagcctaaagtatgtagtggccgtatttctatttgatcttcaaattaggaacaatttttaatttcttttcttgctgcagtttgttccaactcttcagatttatagttgtgtaatctctctctctctctctctctttaaataatggtttgatatatgtacttatgaacttgtaagatgcaattctgaagcaattagacagttttaatcataatttatttattctggtctgttctgttgagtgttttttgttttggaatgtttggtatttctcaattctcatgtttctgtattctaatttgtcttctcgtatttcacttgcagtttttcgttggtgggaactggaagtgtgtaagtacaagtactatcttaaaaaagattcatttattataccaccattttatctttttatagctttagtgtaaaatttagcaccctctttaaaagattgtgtatataatactgttaatagtagatcctgactttatcagtagaacaagaaagtcaaattagaatttcctttgaccacgaattttaagatgcatgctaccaatattatttgcatatccacttctgttctactttagagatgcaaattagttgatgattctttttcttttttactatttagaacggcacaaaagactcaatcaccaagctggtctctgatttgaacactgcaaaattggaggatgatgttggtatgttaaaaatattatcgtgcaaattttaatagcctgcgtagttaagcttgttttaggatatttttttttattttgtgggatctctcgatacatgcagacgggagaatagttcgtgtggatgaattataaaattgtgcttgtaggtattggatcaagatcagtaattaatattttaactacttaagctccttggacttttctatgttatgttgaaaaggatcaaaacatggatatttgattgtgctcaaaactgctgttggatgtgtgtgtttctctggccagtttgtctgattagggtttcctaagcagtagaatcttagaagttggttcttagtttcatctaattcacaatttttcatatcaataatttgattagtttcatctaatgtgcagatgttgttgtagcaccaccctttgtgtaccttgatcaggtgaagaactcattaactgatcgcattgagatttctgcccaaaactcttgggttggaaaaggcggagctttcacgggggaaattaggtttgtttctacttttttttttttttggaaaacatgttattgtttcattacagcataatatatgtattttcctgggccttttataacgctgatgtagtattctatcaatgtttattctctacaattatctagataggaagtatgtctagagcttttagtcatcaggacaatcaccatatacttatgtttgtgcaactttgaacttgcatgtgtttaatatgcatattttgtttagtgtcgaacaattgaaggatattggtgccaaatgggttattcttggacattcagagagaagacatgttatcggcgaagatgatcaggtgatacattaaagaactttagttttagttaggtttcttggagaacatatctgtccattatatttgatggtgtgtacttggaatcacactcagcttttgttgccttcagtttataggaaagaaagcggcttatgccttgagcgagggtcttggagtaatagcttgcataggggaactattagaagaaagggaagctggaaaaacttttgatgtctgctttcaacaattgaaagcttatgctggtaaaatttttgtgcacttttttctttttcatggattatctgttcatgtggaaatatatttgtatttgtgctattgtatctcttaccaattttagatgttttcttgtccctattttgcagatgcagtgcctagttgggataacatagtcattgcttatgaacctgtatgggctataggtaccggaaaggtggcttcacctgaacaagctcaggaagtgcacacagcccttcgtgactggctcaaaaacaatgtgtcagcagaagtagcatctaaaacaagaattatttatggaggttattatatgcaacaactccattttgtttgtcattactctgtattctatgtatttacagaacttgctaatgattccaacgatttcaactcttgttttagggtctgtaaatggtggaaattctgctgaactcgcgaaaaaggaagatattgacggttttctcgtcgggggcgcttctctaaaggtaataataccttacatttatgttgaagtttgttgatgatattaattttccaattttatgacaacttcaggggataaaattattttcttttttgtgttttttgttgcagggtcctgaatttgctaccatcataaattctgttacctctaagaaagttgctgcctaattttactctgttttcacctacaagtgcaaaaataagggaagagaactcaatccaagcataatatgagaaatgtaaaagtacgagtgagtttcattgtatggggtttttgtatcaattttgaatgtcttcctcattatgaagaaaatattatttgattttcatgtaacatcataatgagcataaataattcctgaacaatatatattgggagtgtatttcagggtttctgttttctggttcaatgtgaacaaattatttgatttctaaagcaccaagacagcctagttatagttacatgctattgctaacatcctcacacttgtggtatcagcttaacctttcttcttgacccaaattctctatcccacgtgggaattgtcagctattgccccttagtttacttttgctcgatgagtaaagtgacgaaagttttagcttaatccttcatttggggatacaaagtgggcatcaaatccttgagtgggcatcagtccaaagtgaaagtttgtcaggtagatccttcactctaagcatatatgccaaagcaaggcataaatcatataaaatgtacaccctgcttgtattgacatcatatataaaacccttacattaacatccatatttagagataaaagagtgtgaatgagaaaaaaatggactggttgtaccctaagaggagaggtccacaatggaagcagggatggacaagccaaactgtgtcctcaatctctgccccatcttttcatttaatggccatattttccattgttatgatattactgtggttatctcaatacactggctacaaagctcagatgcagcaaacagcagtgaactttcagctcttcatgtttgtgttgcctgctttgttgatatttttcatggcttcatattcctcctcgagcgggttgttaaactttcagttttggcgtccacggcctgcaacaccagcaagaacatcaccacaagccggaagctcaccgtggggagtagccatcttccttgtgctgcttttggttttgctttcttaccagtcttcgtttcactccaaatggtttagtcctcttcggagttcagattagttacatgacatgtagtgttggttttttggcttgttttctttttctttttcacttgttttggttttggcctttaggttaaggtcactttcattgattaggcatataatttgaatgtggcaaaaccttcctccttactattgctattgtagttgtgggcatgatgagaaatggacccactgagggctgtgggtaggtttgcataatttaataaacaaatataacattgtgacaattctctagtgattgaaatagacctatttaaccattcatgtataacattcacattctaaaaatattcctggaaattctgtttcaacccaaagaagaaaaaaatttcgccatttagattgctgccatctgtttaaatagtagttaggaaaaaagtggttcaagttttgattcttttgaactgagtacatctttctctctctccctctccctct

SEQ ID NO: 29532 - DNA, 1504 bp, Cannabis sativa
caagagcattaacttagggtatcttataattagaaccatcaatgaagtctacaagcctaagcaaagaaaaaccttaccctggtgctctccttagatacttgtttccttttctaggcatcgccaccaaaaatgaaactgaggtcttagattcaaggatgatgacattttaggcacaatcacattttagggtatgtcttacaaggaggaagaataggttcactccaaacaagatctacaagctcatggagaagcccaagtgctttatagtgctagtgaagaagaagaaaaagtgcaacctcaagcacctctaatgccttaagttcctcatttcaacattgaagaggcatttcctcgtcttcacacttcggttggtactcaatttcaaattgacatgcactcacaattcaccaggctccacaatgaaatgaccaccatgaggagtgacatggtgcatgggtttgaaaatgttcaagatgagatggcacaatggagagcatacatggaccccattggactcccactatcttagtcacttgcatcatgttttagcatcatttttcatgtttatgtttttcattttttaatatgcttagtgtgcttgacgttctatgtgttggtgtgttatgttttagttatttgtactttctctttatacttggatgatatggttatttgaacttgaatatctatggtttatggttatatgtttaaatgaatggtgtgttatgatttttttattttcattttatttgccatttattttttgaattcctttgccaccctttttgatgaatcaaaagggagagaaattccatagcgattttttttttttttggcaacaactcaaattcgcaacttttaatgatatctgaatataagtaataaattgagggagagtttacaaaatcatgcaaggtaaaattttattttttttaacccttgcacatattaaagggaagctaatctaatatattgttttaattttatattctttcccttttcaaaataattaaatatttgatatcatcaaaaaggggaagattgttgactcaatctcttaagtctccttgttttggtgattaacaaatatttgattattatttgtcaataataagttgttgattttgtagcgcagttaaagataaaataagatttttttaaagcaaaattaactccaaaggcaaaatggtacttttactaaaaattttgaaagtgacccgaagcaaactcaaaggctcaaagaactcaagataagactccatgaaagtttatttacatttcttagtcttgtacagtgattttcaagttcatgcttaaaaagttttaagtataaattttggtccactaacttgtgcgataaattattttacaaaaatgatatctaaaaattctaaattgatctttaagatcacatatcatttaactaaggaaaaaactagaaagtctgaaatcggataaataagtaaagagtcatgcgcgttttaaagccgaaaaaatgagattt

SEQ ID NO: 29533 - DNA, 3292 bp, Cannabis sativa
  modified_base (3234)..(3258): a, c, t, g, unknown or other
tagtactgtgagtcgacagactcaataagaaaagcatataacatatcacataataacggcttgtatctagacgcccatacacctatttacataattaacagatgagtaagaacgttctatactagggtacaaccactgtaccacataaactacgtacctcactgtacgagtgattgtagggtttgtcccgtatgctgagtaccactgagttatatactacacacaccctgtactttcccgtacatgtactggtaacaccgtaatgcactccttaataatatacactataccaatgcactttgtaccatttctgtacaagtgttggtagtgtaacaatcataacaagcatgcatatacattaacacatatatacatttgcatatccatatcacatattgtacaccgttcttacctcctttctgaattcaagcgagttggccgaccttaatggatgccctaatgacataacataactgtgtaaatcacatgtcaaaaccctaatctgggaaacccaaacttacaactcaaggtatgggcgagaattgagaaaacgagttgttcagggaatctaccaaaaccggttaactgattttacaggacctggaaaacttgttaactggtttgcacgaggtttccccaaacaactctaaaatcgctcaaaacttatccaaatgctgccaaaccttccagagtacctaaacagagcatacacaacattttccaacgaatagaatccagaaaaacatcctaaatcaaaacatgccattgatgactcaagtttgagtttggggaaacctaactgtcccatgaaaatcttcaaaaataggaacaagaacttaaaatcaactcaaataaggcttagaattcaaagcatatacaaatcaaacactaactgcccctatagctcaaaattgcatactcaaccaaaataaaagcttcaaaaacacaagtctatggattctagggttaccttggcttgaatcccctactaaaaacaccaaaaatcagtagcaaaagcccctagttcctgctcgttcgaagagagagaaggggaagagggagagctttcttggtttttggcttttccttatttttctttattttttcctcaaatgaaataaagattaattcaccaatctttgttgaaatgaaatggccaggttttaagtccctaagctgctacctaacacccacatcaaaatgaccaaaatgcccttttacttacaacttaagcaaaaataaagtctaggggtaaaatggtcgaaaaccataaccctgcttaaacttggtattatattttctccaataattatcccactaagaataaggttctagccttacccatgtcattaaaatagtcattcatcgcattttctgttgtcgccgagcaagaattaaaaataatataattcatgtataatacaaataatactcttagagtttaataaaatcttcgaaattgagaaattataactctaatgtccatttttaataagaggacccacaattaaataaattcactaataattataaaaatatcaataattagtgctaattgcctttactaatccatattatgaaatgcggtcagtacaaaaaggatacaatggctactctatttttcatgtttagtgatgcaattattggcttgacatgaagtgttaaacctgggtagttgctctactttattttaattttatttcaacaccatggatgattaggattgattgaattgactattctctctgtgtttggcaaccattgtatctacgacaatggacgaattacgcacttgtgccccaaaaagtttgaagcatgtgcttgcccaggaattaatcaagggattgcaaactgttttcaagtctaggatggctaagtccatccaccatgctcgagttctcatcaggaaaaaggcacgttaggtatctatttcatcatccatttatgttttttcatatattgctttgtttcttttatcctaaatacttgtctaattcagaacaagtgaagttgtattaggttaaagggattattattattcttctattttggtgataattttagaaaaaattgtggccttataaaactttttttgtgtgctttatattttgtagatgacttataattactgtagtcagtggtccatatcactaaggcttccatgtgtaagaaaatcttactttagactagtcactttacctagttccatcccatctatatagactattactttagaatgattgttatattttctcttagaatgaaatggtctattgaatcataaaattgattatgtgtttcagttaattagttgtattttcattcataatacataataataaatcttacacatactggttactttttctcttctgagggttaggaggtaggtagtcaatatcccatcatttatggtgagaattgactctcaaaagctcattgacctctctatcacaagtccctttagaggtggctgccctatccaagtgaagcgaaagaaccagaaggcagccgctaagaaggcttatgataaagatgcagatgaggaagatgaagaatgaagtacttcccattgagttttttagtctagtccattcctatattccacaaattttttttcggttccaactctaattttatttttttggcaactctatatccttctatacacatttcacatctccgtatgaatttttttggtttacaagtatgatacaatcacattgtaattttggtataggtttggttaatttgaatttctctcttttagtcatacattgggcctatgtaattattattatacaaaattattttaaaatttaaaaatacaggtagggaaaagtgcataaaaattcgcaattttatcttacctatatttatgcttcattttataaccgacgcaataggtataaaaaaaattatttcagcaacttatatgtcattttataaccgacgttataagtttttagtgtcggttttaaaatggcataaataattttgcgtcatttccgaaccgacgcagaagataaaaaaaacagtgtatacattgtgatagtttttaaatgaagagaattgttttttgtgtcatttaaaaaatgacgctaataaaaaactatttgctacaatggcatatttgtcagttttctagactgacgtaaattctttaaatattaactagaaactgacaaaaataccgctttttgtagtagtgctactgttggaaattattttacnnnnnnnnnnnnnnnnnnnnnnnnntgtttcattaacatcctaacatgaatttctaaaa

SEQ ID NO: 29534 - DNA, 1613 bp, Cannabis sativa
ctatatgaggatcataaggtcgaagctgaataaaaaatccaatcaaccgtgacatttatccaggaagaactacacaaagccagggaagaagtttgccaagcccgagaagagaaggaaaaagatgatgccaggctgatttcccaagccgagaccctagccattcaaacacaaaaggttggcaccttagaggaagaaggttgtaataaggatctagtcatccaaggtctatgtgacgacttcaatgaggagcagattagcttaattttagtatcctccaacttcttaagagcgtatttgttagctttctccaccttctgctgcaaatccaaatggtgttttatctttttatccagagttgcagtagaaacgatcttgtttttcaaaaggagagtttgcttgtcatattcttaagacaaggaattgtcttttgctctaagtctatgaggtcctacttagcttcctctaagttttgttctatgtcgatgattcgagtcagagattgagtgtaggattccttgtacttgtctccacgctctctctcaaccctagtttccttcttatcatgagcaacaactttgtttagagattccttcaccctttgtttgatgacagattccattttggcattagcttttgtcagagcttgggcagcattttgtcgccttctttcagcattggtgcactctgaccttatcaattcaagctcataagccattttgttgatcaaagcacagttcctctctgccattaaactaacatgcaagaagaattatagacgaatcaaacacctaaaaagggcatacttcttctccaatgcaacgtaagcaaaagttaacttacaacattggcttggatcctcatgcaatattccatgtagatcgagtctccactcgccatcatggaaaatttatcagcacccagcttgcaactggtggtcccactttgatctaccagattagatgggaatggagccagatcagcccgaaccctaggacaaagcttctctgccacttccactcgattgaaaatatcagggaggggctcatcctacatgtcataatctaaaaactctacattgcgcctagtggatatgttggaagccaatttcctcctctcctcatactcaactcttcacctttttaaatagaattgtttgatggcctccatctgcgcttttacttcttcaagcagcgacatagacttgacacagagattaaaacgtggaggaggaagataaggaagatttgtcttttcccacgacagttgaatggaagtacccaaaatgttttaaggtgataaaggtggtggaggcaaatcctaagtttggttgcttgatcgagtactcctcctggaagaccttttgccatctgtgacatcagatcccttccaggaatgaggattagaagcttgtttccttaaggcagccaactattgcaacttctccttaatgtccacttttgccttcttattcatcccaccattcaaagtccgagattgcttcttggaaataaggactggcccatcacagtctgaagaatccttttcaacttgttcaataggcacttgttgcagtggcacgacagtcaaagtaggctccatcaagtcaataatag

SEQ ID NO: 29535 - DNA, 1268 bp, Cannabis sativa
ccccaccccccgccaatgtcaccggcgacgaaccagtctccccactcgacttcccatcagtgttcgaaaccatcaccggcgaagataagctgcaccccctctgttgatgtcccagtcggccacaaaagtagcagaaaattcctatcttatcatatttcacttgaacccatttcttaaccccagcagccatgtcaaagtaaaaacccgaaactaaggggttattaatgtcgatgtcgacctgcaccttcaagaaatcgtcccacactgctggtttttcttcctccaattcaacattaacaacctttccaaccaaacctcccagcaggttaccattagagatagaaaaatattcgtgggggagattatgaagttgaatccccacacgtaaccaatgaaactctaccggcccctcagtagccggagcccaatctcggaggactagagtataccctcggatgcaccagggaccatgatgaagagcccagtttctatcatccgtagaaacaaagccaaacctaaacaagttagaaggtttcgagccctcccccatggccaaaaaagagacttgtttcttccaaactttagccacaaattccaccactgatgattcctccacaaccataggggctatcactttcccatataaacagcaagaagcaagagcacttagagaggaagcactcggagctaggttgacaaatgtttcagagcaagaaaagaacttgccttttaaatgggagttggtagcaataatggacgccattaataaccgacagaaagcagacaaaagaagagaatacaagactcttaactacctcaccaaccccacagaatcaacaagacaaaacagaagccagcactaaaaccaaatcacctacaataccccacaacagaggagaagcaaccaaaagtcaaacaagaaaacaccaagacacaacacgtcaaggaaaagacacacaaaacacacacaaactaactcagcacaccacgaacacaatctcgaaagaaacaaggtatagctgacaaacgaacataccactccaaagcacccacacactccacgatagcaaaggagaaggtaaaagaccgtccctttagaaacacacacaaaaaaccatctcagactcacatactctctaactctctctctctctaactctctctctctctaactctctctctctcatctcctttcataatgcccctttcaagatttaagcataattcctcacttctaactacccatgtgattgttgggttttatgccc

SEQ ID NO: 29536 - DNA, 3636 bp, Cannabis sativa
ttcagtatatattttataaaacactaaaaaactccaactatttataaaaattattattgattccaatagaataaaaaaaatgataaaaaaaatagaatattaaagttttgaaaaaaaataataaataacagtaataaatttttattttttagcttaaaagcattaataaaattgaaaatgggttttgagaattggaatagaagtgactaatgcaaattgttagccccttcaaaagttcattaaaaaatatattggacattaaagaaaaaatatattgggccctttatttttttgggctctgtgcagtaacccaccttgcataccatcatggccggccatgataataagagcattattttattaaaagtatatacaaattttattaaatatataaataaagtataaaaacttattaattacactaatgaatgccaaaaatgtaaataaaaaaatgacatttacaataaatattactttttttttattatgcatgccaaaaactataaaagataacataacattattgatgaaattttatgtcaacgtattttaatttaataaatatattaaaaactcataaccaatcacaaaaggtcatgttgcacaccttactaactatgctgaatttaataggtatttttttaatacacacgcagcctcctctaccaaatccagtcaaacccgactagtacttgtcatccaagtaatattatatttaaatatttgtatatatattatactaatttattatgggcacagattaatattacatacaaaattagtactatataatatagtagtatccttacagagactatagctgcaaaaaatatcaaaatgagccagaaaaaaccaagagtactggctatacctttcccagcccaaggtcatgtaaaaccccttctcttcttttgccacaagctggcccaaaatgggtttagagtaactttcgtttacaatgaatttgaccataagcaaatcttgagtgccatgaaagatgttgaccatgagaggaataaggcagagaataatattgaatttgtgtcagtcccagatgggctgagccctgaggatagagctgatggtgttggcaatgtgtgtcaagcagtgttagacactttaccagcagagcttgaaaagctcatacgaagcagagatcaaaacgacaaaattaggtgtgtcgttgttgatttttatttgggatgtgctatgaaagttgcaacaaagatgggaattccaggagcaatattttgtccttcttcggccgttgttctctcccacacattgaatatgccaaaccttatacgtgatgggatcgttgatcaatatggttaggactactttttcttacttataaaactaataataaataataataataataaaaaatctaatattagctagcctctatttttatatacatatagatcaatgtttaggttgattggatggatttaataatgggggttttacaaaaatatagattttggataaaattttataattttactgttacacgaattattttacaaaaatactgttttttttaaaacaattttaaaacaacaaaacaattaaaacaatagtagaacaattaaaaaacagtgaaaacttaacacattacacagtataaaaagtatacaatatttttgaaaaaaaaacacagaaattttgaaaaaattccacctcacaaaaaaaaaaaaagtaaaaaaattaaaaattttgatatgtggtggaaaaattcctttaataattgaaaattaaactttagtcaaagtacattgtggttgtggattttaaggcttatttttatttatttgaaaatgttatgtaagcttatcacaataattacaatttacaagaaaatgttacaacagtacaaggcatttaacttttgttgctgattaaaatattttacttattctaattttgcaggaagtgcaacaaaaaaacaaataattcaactatctccaaacatgcctagtatggacacatcaaaattgccatggaaggttgacgacttagctcaacaaaaggcagcgtttgaaatttatttagaagcctgtaatggttttgaagctgcacaatggtgtatgtgcaatacaacttatgatattgaacatgttgcactttctttacatccaaagcttcttccaataggtccactattggccgataaagctagtagcccattagatatctctggatcacaattttgggttgaagacacttcttgtttaaattggctcgatcaacacaagtctcgttctgttatatatcttgcatttggtagcttcacttctcttgagcaacaccaatttcttgagttggctcgtgggcttgagctcaccggtagaccatttctttgggttgttcgtcctggatttatatcaaataaggagcttgacccatatgaatttttgggtggtaataatgattttagaaagatagtgacttgggctcctcaacaaaaggttttaaaacatccttctattgcttgttttgtcagtcattgtggttggaattctactatggaaggtttgaacaatggggtaccatttttgtgttggccttattttgctgatcaatttttggacaaagattacatatgtaatttttggaaagttgggatggagtttgtacccaatgaaaatggtattataacaggtgaagaggtgaaaaataaggtagaaaaacttctgaccgacctagatataagaaaaagatctttaaaatttaaagagatgggaatgaatgctataggtgaatatggtgcgtcttcaaagaattttaataatttcatgaaatggcttggaagtgataaagaataacgaattatgttattaattattctgttttcattttttaactgtttcgtgttagttacaggtttgttgtaacaacggtctcttttcttgttttgtttctctgtaaaactttcttctataaataaaaggcctctagctcaaagacaaactaagattttccaaatttttgtagctcattttctttctctgaattgtgcacttgatagtaaggataaaaattgggtggttaataaacggttaatgcgcctcccaacctcgtctccattttatatttatcctctcatccccgtccttgccccgcttaatcctcaataggtttaggataggggaatccacattggatatggagacccattggtatccttaaaataataataataagaaaataataatgtaatgtaatttaaaataaaataaaaaagtaagatattgattttaaaagaaataaatattttacttattaaaaagtctttagtcaatgtttttttattaaagtaaaggtaaaatattttttttattattaatatttaatatgtgtacaattattaagtctccaataattgaccatgaataaattaatattacatattttttttgaaaaatgtttcacatgtccttgggttgggctggacatggtatcaccatcacacgttttctagtacttatcatcattatcattttctttgctagctgaattatgatggaccattaacatttatggtggtagacacaaaatagcaataagtactactcatgaagtttccttatatattattgtatatccaagaaatgttttactattatttag

SEQ ID NO: 29537 - DNA, 6701 bp, Cannabis sativa
  modified_base (27)..(29): a, c, t, g, unknown or other
  modified_base (239)..(244): a, c, t, g, unknown or other
tatttttttcacataactagcaacaannntaaaataaattatagtcattttatgtctccaataacacattaaaataaataaagtaacaaataacaaagtcacagtaagaaaaaaaaattatgtacaaaaatatttaattttattttaaattgtatgttaaaaaatatgtaagaatagaatatacatttgttctattaagttttgctatataattgtattatatgtattagacttttaannnnnnattttctttacattaaaatgttatttgtatatataacttttttaattttcttataaatatgtgtagattggattgaatcggttacttttacatgtcaatcaacattcaatctgcacgagtgcggattttgaattttccaattcaatccgcacaagtgcagatatccgcactttacggattggatcgtgcggtggattggatcgactattttatgagacccctgtgagacaacacaaaaccaacaagaccatacataacaaaataaaataaacatatcaagtattttcaatcttgaattaaatattataaaagtcctaacaatcgtcgattttgtataataatatttttacttcaaaaatctcttcatctccatcgaaatatatgtcttgttcctcatgtttttgagtccaaatagaagctttgccattgtcaataataaacagttcactatgtattcttaccatctattcaatctacatgtaaatgtaaatataagactattcataaaattcttaaaacaaaataacaattacaagactaatagaaatataataataataaataataaaaattcagaaccacgtttgacttaattccaataagaagatacgtaggcaacttagttgctgagactaagtgcagtcaccgataccgcaaaatgatataaaatataaatctcaaaatttcataaaaggtcatacccgtaggaatttttccaaattttcgaatagaaaaggatttgtaaaagtagtcatctaccggaatccttatattcaattcgtaaagtaccatattctaaactacgagtgacttgatccttcacaaagaaggtatataaacagctcagttagcaaaaattactgagttcagccacaattctaaatttattctaaattttcccaaattattttaaatcatttgatatcatcgtaattggaatcaaatggtgtttcctttcaacgaaaggattgtaattaagacattatttttataatcttggatgggtcgaacttaaattaataaactcttatgctataactttggcatatgtgaaattgtgttttgcatttatttttagtactcttgaaatttttgcttaagagcttagtaataaagttttgtttcaaaaaaaaaccttaaataataggtatttatgccgcaaatactaaaaaaaaaatttgtttagccattttcccaattttagtatattgtggggcagtttttgaaattcttgtttttaaaacgacaactacttctcctgtaaaatggttcttgaatagtcttctccttcctccccacacaaaccactccgaagcttctaagcgaggaaaacctctttcgctccgaagcttcttgaaatgtcaaagcttggtctccttcgaaccgcaatgagctcaaaattttcctctattcgtacggtgcggactacctataagcatggcttcgtcgccttccccgcaaggcagttttcgaccgaatcagaaccgcagcagacacaggaccaagccgtcgattcctttcttagaacctcagcccctggtacgattattctgttgattttagttttgcttttactgtaggaattggattttgtgatttttgatttttagggtttatgaactagtaattaagctggtcttcttggtaatattaataataataaataaaaaaaaagtttgtcctggtgaaaatttcacgtggagttcttcggttagattttctcactgtatttttctacatattcaggttcattatatgcaaaattgactggttgtattactagaaatacattgaagacggatattgtaaatttgctagaagggtgcaacttgagtctggaggatgtcaaagttgagtattttagggactacaatccctctgcaatgtatgttcttcttcgtcttcttactttgattttcttacaaaggagctgaactatcttggttttgctatgtagaaaatctctttttaactttttgaatattcatttatatcggtatcaccaggttggtgcattttgattctccccaggcttatgatcaggcatttaagatgattatgagaaagggccgcttttataaaatggagaaggtaattatagcatgctatttttgctgtagtttttgttctgtagtcatgtaagtatgtctaattttgagtattgatttttgaatttaaggttgcgaaatcacaatgggacaccatagcgccttatgatggaaaaactgtaagccaaatatctttaatatgtttcttgttatctagaggaaaacagtttttgggccaaatctcgaatggtatattactcgaatgagctcaagcattagcctgttctgttctgtgggacgtggtgttgcaatgtactagactgtgtggttttgtgatttgcttctatatatgtggtttgcaatgtgcatttagtctgcacggaactgcattaatttataaataatttgtagttaccttgagttactattctcaagaagacatagtaatctgttttttcaatgtttgtttcttcttctagactgaaaaccattgtgtgatgcgtatcttgcaatttaagaaggctagttcttagtatcagagcttgtttagtgtttttaaacgatgattactttcaaacatgttttccctttactaggttctacttcaaggaatcccgctaaatgcagttccagaagatgttgcacgctttctgtctggttgcgagttcgatgcatcctccatccagatttttcagaagttagtataagtttttgaaaaatagttacagcttatgatccgttaaacaattttctgatggtatgttatcttcattaaataacaactttgcagagcaacagtcccggataagatggcaactgtacgcttccctactcaaactaaggcaatgaattgtttcatcaccaagaacaagggattctgtctgaataatcaagtcttggttcgtgtactccagtgatggttcttttttttttttcttttaggagaaacggtattgaattgcagcatgatataaaaaaatgaggagaggagtttgtaagatttaacaagtttctacttagccatagaaattgtggctttatgtaattcggtgttataagagtttttcttttcaattaatgctcatcctttctgaaagcatgtttaaacactaaaataaaaagacaaaagttcctatggttttgagagatgatctcttttgagttttgagcggtgaatttcatgggtaaatggtgtgtccttttcgattattttgtagaaaaatgtgattgaatattgtcaaagcagaatcagaattatgaaatcaatttatttggtgaagattagaacggagacagacttatatttgagcaaatttgaatcgacgattgtttttaccaaaagtatgagttaaaactggtattaagtgaaaatgcagggtattcaaaatggtaaatttactttgtacattttctttgatgaattgaaaactaacaaaactaatttacattcaaagtcccaacgggaaggcaacaccaactagaaaagcctaagaaaaacgacaacaatataagtaaacccaattaagtacagataacaacttgaagcaagttgttttcttctactccagtgtcaagtccacctttgtttcttacatttcataagcaacggcaactccatcaactaatgggctgcataattgagtcacctttaggtaccaacaccaaggccttctttcccttcctagcaacacttttggccagatgggtttgagctctaaccccagttttatcaacagatttcttccctctcctgattgtttttagagctaaagttttcaatggaaccataatatctaagggcttaagcacctcttctaactcattccagtcaagatcttcaaagtcaccatcttcataaacaactctgtaccaccctgcttctgtgtcatattcggtcacaacaccggtatagtagtgctcaccaaacaacttctgcacttcccttccttccaaccattcaccaaaacctttgtgtcccccatcagattcggacacagctagagtagtacaggaaccaacattaacattagttgggcaaacatctggcactccattaatgatgacggcaggttctcccggtatctctaagaccccagttgaagaagaatctatctcctgcttttccatttttccattgccagcaatgtcactcataagtctgccaaaaataaggtgtaataatctgtttgagagtgaaattaagcattgtaaaattgaaccaagatccaaataacaccccaacataaaagttcagcagtgataaagatagaaaggcataaatgccataattaatttggcctaatcataattgtaatggaatcaccattacaattctattgctttatttggttttggaaacattgtaatgccttaacaatgaatcccattacattattttatataaaaataaaattacttatactcttattttataccctttcattaaggaatacaccacccattctcattaccattctaaaaatcaaccaaacattatactatcattcccattactatttgtattacaatccattaccattacattaaactgaaccaaacgctgccaaagttctctcctcttagaattttttatttaattttttgtcattctttttagattttttatttttattttttgtaaggactctcttctcagatttatattgctctcaattgaaaaagcttcaaacagaacaaggaaagcaccaagtttctttgtcctgagataaccctaatatcattcacttaagaaaaataaaagagacaaacattatgtatccccaatttattctacacaaccataataaaaatccccacaaactcaaacgaatttactgtgatcagtaccctaattcttgtttcaaaaattcattactttgaactcttatcaaagagtctctttgttatttctctagcgttaatgcgtttatgcattttactcccgataattctcaaacttccacaaattccaaaaaagaatcaaataagaaaacgaaaagagaacaaataatgaaacgaaataaattcagttaggtagtttcattgattaagccaaagcaagttttatagaaaggaaaatctcgaatttgaagttgaacatttagggtttttacttacctgaggaaaatttgaaatgagaggaggaagacaatgatgatgatccaaatggtcagtcagaacttgattttttcttttgtatctttaagacaagagcaaacgtcacagaaacaacagaaaaaaaatataaaagaaaaaagacaacggcaaacgaagtcattcgactcgttcgttagttcattgatctttacgggtcggggtcaacccgccctggttgcaaaacacttaaaaaacaggaaattatttgataaatataaaaaaaaaaaattataaaaatatgattttacggaattttaaatagttttacaattttttttgattttattaacagaaaatacagtctttttatgttatattcttgttaaattgttgttgattttttattatttgtatgtcattttttgttgttatttagatgttattttcatgttacttttatgatgatttttttgttgttttcgtattatttctataaaaagtataaaaaatgtaaaaaaaaaataatatcttatgtaattattccaaaaaaacaataaaaggttaaagcaaatatatcaaatatttttcttttgaataaatatcaaataaacttttaaatattctattaccaaagcaataaacttctaaactccaagagcactcacattagaccgatttataaattttttcctaaaaaaagaaatagataaaaaggtgttacatcaataattctataatagttagcaaataaagaatgcaataatacatttttaccgatataaaatcaatatttattcaatgaaaacatattttaatatttgttttatattttttttttttgaaaacaaaaaaaaaaacatattttaatattatatattattatattttttcaaaaatactttaacaatatataaatactattttattcatattttaataatatgatagtatatacattaaaagtacatttttaaaagaaaatttgcggtaaaaatttcttaaaagttcacattaatgtagattagtccttaatttttaaaaataatggtaatctgaggtaccaagtggcctcagtgtttaacttgtttgatcgataggttggcctgaaacttcagtagtggtgaagttgttgggatgtataacacctcctaaagaacggtctggtaggatctagccttctaccgtttgtcccacagtttgtggccttggattggacggttgatcactgtgagtttgtgtagtatgcccaactgcatacccttctaatctgcccaagggaattcgggatgcaatagttgttggaaatattttac

SEQ ID NO: 29538 - DNA, 2777 bp, Cannabis sativa
  modified_base (1205)..(1206): a, c, t, g, unknown or other
tatatatatgcatgcttacgtttttggatcattgtactcaaaatattctctttcaaaggtctctgaagatgatgttgaagttgatgttgagtcagtctgcttttgttgaagctttgcttcaggaaacatgccttcccaacatgcctctccacctattgtttcacaggcttctgcagggaacacactgaacaaaacaaaatccattaaaagccgaaatgaaggcacatttggagacagcttgtgctcggggagggtacgctctcctcagttgtttttagtaatgatatgtacattcaaaatatattttagatacgttcaaatgacattttctcataattagagtatacaaaaattattaaacgaatattattttgtgataagttactctaattttattgaagaaaaaataaaattctatcatgaatctctagaataaaaattctaactctgtctctgtaataattattttcgggagttcttttttattttttaaataaagtatttcatatttgaagtaattaaaatacttacgagaatggagagttataattaactgtgttcgtatcattggttgtcacaacatttgctttgacactagaattacgggaagtgaaagaagtacttaatttagaaggcaaaagggtcaattgagaaggttttttggagggtttcaaagggataagagtaggagaaataatactcaaacttgcctgcatttttttcttttttaatttttaaatggtaattttgtgaagatgaagctttttagtttgtgtttggggtttggaattggagtgaatgatcatatcaagtaaagctcaaatttataggataaatttagtgatggaagaagcaagatatttgtgcatttagataaggttacaaatacaatgatagagaagctttggcatgttcctatcatcatggatgagatatttataagcattttatttggactgttttctctcaattattattctaggatggaaaaaagttgataaatactaagttaattatgaattgccacgtaagtattttactttttaatttttatggaatttttattaggtaaatattattttacatcttgtattttgtaaaagttatagattagactctctgtttcgttaaataacaaaatgaatcctgtattttttaaaattgtacaaataggaccctaagctcaattttcgacaatttttttnnatataaccaacttaaagacaatttctaatacgaacaaatacaaaaagtttaaccaattttgtcataatacttttaagttggattatcattataaaatttttagttgtctcctattttaatatattttttttaattacatttagagatatctaattataagataactgtttttaagaccatattttttaggtttaaattttttgactaattatatttaacttaaaaaatattttattttataaatgtgcaatttctcattttgtggatatggtatttgtttctatgttcgtcatggcttgttttgttaccatatatggtaatttgttatgtgcctagtgtggtttgttttggtaccatatatgtatggttgtttgtttaaatgggttcatcctacaaataatgtaaggtagtagtgatactctcagctccaaggatatcataagttatttcttcattaagagattaatgaatgtgtttctacaatgaaattaaaatccttacttttaacttatcattaagcagtatgttaattgaattttacctatttatttttcaggtgtattttacttaactcactcagttatttaaggatcctagaacttcaatggaatatgttactattacaatactttttttaaaattattatatcatgaactttattagaaggattctgaactgatgattattttataatggttgattttgtgttacaggtttattgacaatcttccaggtagaaaggtaggatcgagatgggcccaagatgttggactacctatcacgtgaatcatgtcatattcgttgtccttaatattggttttggagttgtccacagtatgctagattgagatgggatatcctttatgatattgaagtcttattgtttagtttttcgagagtattttttctcttatgtaagtcgcaaaattaatattgtagcatatgaattggctaaacatacttagaatagacaataagctttaatggatggaagaacatctgcacctttgcgtgatattttttattctaacctaaaaatgttactcttatctaaaaaaaaaaaacaaataaaaaggttactcttacaaaaataaaataaaataaataaaatttttgactatataattaaaagtaacttgatccctacctaaaaatataaatagttatttaactcatattattttgtgcaattagagtatgtatttaacattattctttagattatttagaatatttattccaaaatactatcattatcaaattatattttgtgttaatttttttttccaaacagaaatataggacatctgttaattttccagcatgaaatttaaaattttgaaacgaaaatattttttattaataccattaataagaaaataaaattttaaattacactatttcagcattgtagatattttggtaaaaaatttaacaggtgaatttaaagcacaaaccctaaatattaccaaaagaaaatgaaggatttacatgcatatgattatgatattcaattctgttgtatagataataatatagaaaagataaaagatataatatgtacacggta

SEQ ID NO: 29539 - DNA, 4648 bp, Cannabis sativa
tatttgtatgtggactgtataaatatttaatgggccggcccaaagtatttttgtgattttttttccttttttgtatttttatgtttttttcccttatgtttatgtccataattaatattattttttattttttattataattatttattaaaaatattattattttttctcgtcacttctctctctctctaagttcttaaacgttactcatcaaatgacctaaaattataaccaaaattaagggttttgatattaaagaaaaacagagattaagacttaaaagttctctaatagtaaagtcaaagaacaatgcaaaaaaaaaaaaaaatggttaatatgatgttaaaggagagaaatgtaggaaagctttttttgcattattttttgacgttgccattagagtaaagaaacagagcaggaaagaaggattagtggatcctgtgttggattaatgatcaatctgtttacaagtgaattcagctacttatagtggctcaaagttagttacaagactcactaactaactctatgacaactcattactaactaaccaactaaactctaaaataactaaattgatactccctcaagatgggctaaagatgggctatatatatatatatatatatctttcaatctcatcttgtctttgaaatacttgaactgagtaggaaaaagagatttagttagaataccagcaagttgttctttggaagccacatgaactgtctttgtaattccttcttaaaccttttctctcacccagtggcaatctatctctatgtgtttggttctttcatgaaaagttggattggcagcaatgtggtgtgctaatttattgacacaacacaccaatataggtccattgtgatcaactctgagctcttttagaatggacagaagtcaaacaacttcataagttgtgtttgccatcgctctgtattcatcttctgctgaagatctagaaactttatgttgtttcttacttctccatgaaatgattgagttgcctatgaaaatgcaaaagcctgttgtggatctcattgtgtctgaacaagcaacccaatctgagtctgtgtaggccttaagctttacttctgaattagcacgaaaataaactcattggccaggagatcctttcacatatttcaacactctaattgttgcattcgtgtgagtaactcgaggtattgtaagaaatttactcaatttatttactgagtaggaaatatttggccttgtgattgtcaagtattgcaattttctaacaatcctcatgtgagttggatttgcttgtttttctttttcatcttgtccaagatttagattagcttctattggtgtattcattggcttgcatccaaggtatctaaggtcctctagaagctgcaaggcatatggcctttgggacacaaaaattcccttttcagatctagcaacttccagccccaagaagtactttagattccccaagtctttcaatttgaatagagtgttgaacctggtttttaatgcctgcagttcttgtaagttgttactagcaaggattacatcatctacatagaccaataggaaaatgaaagtttcattatgatgtttaatgaataaagaatagtcagttgcagaatgattaaatccctcatcaaagaaagcattagaaaatttgacaaaccattgtcttaaagcttacttcagaccatatagtgacttttttaacttgcaaactggattatgtggaagctctctcttaggtttatagccttgaggaagtgacatgtacaaatcttccttgagatcaccatgtaggaagaaattattcacatccaattgatgcaaatgccatcctttaatcgcagcaagagcaaggacacatttaactgttaccagtttagtaactggtgcaaatgtattagtataattaatcccctcctgttggttataccttttagcaaccaactgatccttaaatctttcaacactcccatcagcattgagcttgattttgtacacccatttagaaccaataacatgttgtccctcaggtaaaggaaaaactatccaggtgtcatttttctcaagagcatcaatttcattgtccatagcattatcctatttaggaaccttgagcttgactgaaaactgaggttcaaaatgacttgaaatggcaagaactgtagctctgaaagtaggtgacaacttgtgataagacacaacctcaaatgaagggtaaggggtaatagaggtaccctgagatgaaaaaatgagagcattaacagccaaataacagtgataatcattcaaataagatggtttggtagtgttcttgcctgtcatagtatgaatctgaggagggacagttacaggctcagaaggaccatggctaagagataaaggtgatgaaagatcagaactattagaagtagggatatgagagaaaaaggtttcataagctacaggaagtcttttagagttaacaaaagggaatatatgctcatggaagtaaacatctctggactaaacatttttatttgtgttaagatctaacaatttatatgctttcatacctgtaggataaccaagaaatatgcaaggagcagctcttggagagaatttaggtctagattgactcaaagtaaaggcatatgcaagataacctaaggctttcaaatgttcataggcaggtggtttggagtatagaataacaaagggtaatttgttcttgagattaggtgtaggtgtcctattaatcaaataggcaacactagctatacattctccccagtagcataatggaatgtaggattgaagaagaatagccctagatacattgaggagatgttggtattttttttcaaccacagaattttgttatggtctttgaacacaagagtggtaatgcacaatcccaagatcattaaataattcagtaaattgcaactcctttgtgttgtctgtcctaaaacctttaacagtcttatcaaattgattttgaacaagctttatgaattgaggaatgataatctaagtatcagatttttgcttgatgagattgatccaggtttacctacaacaatcatcaataatgtaatgaaatatctatatccctcaacatgaataagatcaaaacaattttttataatattgatataaagggcaattttgttttgtttggaataatgacatatagagcaataaaataaggaattaaaatctgaatgaaaattcaaagttttattcaatgggtgagtttttacaaaagaaagatggcctaatttatagtgtcaaatagtatcattagaaatcttataatttgaaatagatgaagaaccataaacataatggacattattagaatgattatagttgagatagtaaaggatgtcatacttctcacccatcccaatcatcttgttcctgacagtgtcctaaatgacgcattttttatgggagaacaaaaaggtacaatcggcagtagttgtcaaagagttaacagataacaaactacacttgaaagtaggaacatagagcacatttttgtttataagatcaggagttaggacaattgtcccaacacatgagattttagtatgcaaaccagttggtaaaagaacagttttgagattagaatcattgtaagtatgttgaaaaagagtaatgtcagggcacacaaggtgtgtggctcttgtatcaatgatccattgagagttatgaacaagagaattctaactagaaaaatgtgacacaattggttaatcatcagggatgtgaggtggtgtgttatcagctactttctgagcaagtaaggtcattagcttctgacattgaatgcttgataaactagacacaagatctttatcccctggtgtgcattctccattttcttcatccactcctatggaatcagtagaggcaaatttcccttgaggtcccttagcatttcgattgggaaattttccatggagtttgtgacgaggagaatagccatttaacttgaagcatctatcaattgtgtgtccattcatgccataatgagtacaattgtacttggatcaaaatggttgaacaatactaataaactatccagtaagattggttgaggatttctctgcttctctagaaccacttgatccattgaatccacttgttaaatttctttgtctttcttcttgaatcactgaatcataagctttatttatattaggaagaggatctctcatcaaaatttgagatccaacattgctaaaagagtcatttaatctagccagaaacttaagaagacgatcttcttcttgataggggtgttcacggattggtttgatttgaattttcatatgttttgagctaaactagtataacatttattttgaatattggataccaaactaaaccaataaatttctcaaatgaaactaaaccaaaatattaagaaatttttggtttggtttgaaaccacggtttaagcagaatttataattattcatatttttttaaaaataattgtactatttttaccaagcttttaattttatttttcacagtatatatttaatatgataagtaagatgtctataacatataaataataatataaaaacattctcaaaagtcaaagcataacataaaaattcaaaaattatgcaataaaatt

SEQ ID NO: 29540 - DNA, 2117 bp, Cannabis sativa
  modified_base (556)..(559): a, c, t, g, unknown or other
tattttttcttcaattatttattatattatttgtaaataaagtagaaaacacctaacataaaaccaagtatacgtgccttgcacgtacctttcttctagtagactaatagaaaggaaaatgttaaaacactgttgtttgaatttaaaatctattggatgcggaagtgtgtgaagaaagagagggaaaaacagagagaaagtgaatgagaaaacagattatttttcattgattattaatgtgtacattgactgagcttatatagctcaagaaatgcaatcaaaaagttggcattccaacacgttatttttaaaaaatggatttaaggggattagaacccttgtcctctaacctatgtgttaaatagcttaaccattacagtaaagttaatattgctatacaacacgttattacatccaaagcatgaactaacttgtaattataatttttaatgtccacaaatcatgttaacagttgtgcctcggtgcactgcacagtgccttggtacataaaatatcaatcaatatatataccttaatgataataataataataatnnnnataataataatataaaaataataactctataataataataaagaatcgattggacgtgatacttaaaataatatttcaattactttttaccaagtctaaattttttattaaaaaatattaattaatttttaacaaaagtctacttcacatagttttttgaaatgataactttaatgtcaagtatcacataattataactaaagagcattgttataggacgccaccttttataaatggcaccctacgattggttagcgatatttcttaaattttatttttttaggttatatgagacctgctacttaattacagaaagtatataaactcgattttcactcgtaaaatgaagttggctgagcatctatttcttaaatcctattgatagcacaataagaactttacaagtaaaggataaatattgataaataagatattagtgtggattttttctttcttccatggtgctccgtatgaagtttttgtatttctctgattcctcttgtataatatagaatgtagagcctagtttaagttgatgatggtcaaggtaatttgattcacaaagcacagtgaaaatgatttgagtattcatcttacagttgccttgaaattaattttagagataaaagtatgctaaattttcataaaccataattgcttgaaattcattttggacaatgagatcgaaactggattgacctagtaaaacctattgtatggaagagaaaacagcagtaattgttctattaaagaagaagaagcagcttaaagaggcttaaaagtactcttttctgagagtttttgttgtttaggcaatgtaaaataatggtaagagctactatgaaaattgaaaaaataattttttatgtaataaatttttataaaatggataaagaagatcatttactcctcccacatgagcatcaataatatagcagcaacatttgaaaacttaaaggtagtaggtactaagtaatgtttaccttcaggtgttgacgaacatcatcacctccttgataagaataaaattgaataatgtgccttgaatatgcaacccctgaaattgaaagatcaggaacagcgtttttttttttaaaaaagaaaaagaattgatattatctgcagtaaaagacaactcatcagcataaagtgttagtggccaaagaaatcagccccttatcatatgcgcaatggagaatttaacaaaagaacaattcaaatacaacaagtatcattagtaaacatcgaaccaccataaatgcaagaaagagagagagagagaaagaaaacaaaaatcactaaagaagaaaagattgagatataattttataagccggaacagtattattagtaaagaaccaccacaaatgcgtcaacaaatctaaaacctatatatactgccttgttggatattgctttttcagacaggctggttgttcttctggtttcacttaacaaaaagaatgaggtagaagagacccacactcctatatatatacacacttaaaagctttgaaagtctttacggtttcaaaagtcctacatcattttcattctt

SEQ ID NO: 29541 - DNA, 1541 bp, Cannabis sativa
aaaaaaaaaagacagttatgatcaaataaacttgaaaataataacctcacattcctggcatggttcatggctgacataccaaatttgtacaccccaaatatgttccaatccttaacaaaactcaatttgtcacactctgagtctgagactttttttttttggaaatgtgccttagtaacttcagttcagttatatatttgctaaataattggtcaatatagaccaagtccttaggaatatgtattagacgtacgtggcatctaattaggatggtattttgtatttgagttaaataaataaataatatagcataaagtgaataaactgtatacccttttggctttttgtgggtaataaaaagttagttttattcttcgtgttattcgaaatcttctgttggtacgagtatttttgttttgccacttgagggacctgtgagctgagtgaatccaaaattatttttcaaaatcagcaaaaaaaaaaattgtgtaattttaaaagagtaaaattttttttttggggtccctgaactaggtgggccctagacacaggcctagcccgcctatacccagggcaagccctgattatatattaccaccaatttttgatgatgataattatcaagtttgggttgtcaagatgacagtctatcttgaagcattagatgtttggaaaagctagagggcgctggctcaaaactcaagatccacaacaaaggaagccaaagctaatgatttcttccaaatatggaaaagtatccaaagtcaatagaaatataataattctgttagtttccgttaattatatccattacttacatattagccgtgttaggtgctaatttagactatcagagctaaaggttttaaccgggagccaagctcatgaactcgataataattatatagatacaaacatacataagtatttaatagtgtgtcgttaattattctaataattttttcttttgttttttaatgaaatttatatttattaaactagagctaattgctcaaaaacatagcataaagttcaaaagggacatgtccctccttaaacattcttaggattagttttagattaagttgttaagccttagattaggttagttaaaggttgttttgtttgttacaaatctttgttacagctgtacatttctattacagctttggttagtttcaactaaccatttcttgattgtatttggctatataaagccctcttttcctttctataaaatctgttcaaacatatcaataataagctctgatttttcttactttttctctccatttctcatatggtatcagacgaactcaggcccttagcttccatggctcggccaacaaccagatctcaagatggcactgctccatcaatggtcgacaacaacactgtcgaagtcaattccgactccatgcctgcccctcctgcttcagctattccccgtcataatcctcctgttcgtgtttagcctcagaatacagatcaagatattcagcgaaattccaccattacagaagataactcgactcagactc

SEQ ID NO: 29542 - DNA, 1803 bp, Cannabis sativa
cacccaaccattctgataattaagctctcagtcatgaaagagagaagccatgatgctaaaagctgatcttgtacctcccattctacaaaggtaggactttgaatggaagcagctcgatcacatcgctcaagaactgaggtggtggagcaatgtcatgaatgaatttttccagtctatttccacgaatagttgcctgaacttgctacttccataggagaaaattgtgatcattgagtttgatcaacaatgtgtggttgaattggatcagtttgttatccagctcacgagatcgatttcttcctagaacttgggagaatcctaatagagttgttggactggtgttttcatgactggtgttgcctatatttgccatctgagaaggataaggctctgataccataatagaactatggttattcctcaccattgttgcagaaacacaaaaaagtagagtaaagagagaaaaagaagaagaaaggaaagaaagagagatagattgaaacaaaaagaaaaatctcttagattaattaggaaacaatacaacaactagaatagaaagcaataacaaactcctaaccaaaaaccaaacaatcaagagctaattggcataatgacagttaggtttctaattgtcttgacaaaaatgaccttactactatatttacatctacattcatgatactaactatattaattagtgcttaatttgatgaattagctatctcattaaatcgattgcaataataggtcattttcttcctatattatttttaatgggaaaaatctcgggggctttgtcatcatatatacatatatatataaatatatataatatgtatatttaagaaaacaaaataaaatataaaaaaaactatcatggggtcgatataacatcacatggattcgtatataccttataaaaaaattgtgcattaaatcaagattccaaaattgctgcgtagattaacgtactgtacttagcaagtagaagctggaactgaaccatatatgtatgtatataaatatagtttggaaataaatatcatcaacttcttatattatattgcttattgctgctcaggtattaagaatataattagatcgatgttggtaatataccaatttgtcatatatatataatatctaagttctatattattatcaaattaataatagagaagcttcgaggcattgccctcgtgacatgcaagtattaatatatatgcaaccgagtttctaattatatatatataaagctgatcatcaaatgtgatgatgtgtccacatattaccctctcctttctactgctcatattgatctatatatagtggctttaaattatattatttatcgtcattatttcgtaattattatcgtacatacaattgttaataattaaatatataattatatgattttttaatgtgttttccgatagttgagcataatttacaagtgggggtgtgggacagccaagatttcatcatttcacgtgcaatccacttcactaggtgtatgcaaaatattgctgcgtttcaccagtttggtatttattaatttctgatatagaaaatgagagtctgttatagcgtgtactatcaacatattatcatatatatatatatatatatgattataatacacacatttgtgcgtgtaattcagatatatacataatatttataaatatttgtttggccatggcaaattgaatctttttttcttttgaaaatcatgtttttatttaattaatttatatataagaggtcccatggctagctatttttattgatatgtcattt

SEQ ID NO: 29543 - DNA, 1759 bp, Cannabis sativa
aataatcagatgaagccattggcatttggcaacccccaaaatggaacacagaaaggatcatatcatctaccgtactgcccgctgtaaacacttaatcagtgacaaaagtgtaagtaaacacgtgaatatcgcaaatcttacttaattggtaaagaccaaaaaaaaaaaaaatatatacctcaattttgcccatcaatcactccacgattgatgaaaaatttagggagctatagtgacgaaggtcaacttatagcctatgggaaattgtaataaaaaggttttcaatcaaattagagtccatcccaccccacacggttattcatttgccattttattttcagtgacgtgcaaccgtgtaaccccccaccaaaaaaggaaagaaaaaataaataaataacgtgaggccaacgaagtgacttctagaaccattaaagtcgagacagaagaattttgaaggaaaaaaaaaagataggacagatgttctccaacaaccttacaataaaaaaacgtatttcataggaatataacttttagtcccattacaattttacactatataacatttaaggggaaaaaaaaggaattaaagggcatattagttgcattaatgcaacaacaatgccctgattttcttcatgtatgtttaaccaggttatacgggtaatattaagaacatatacatttatcacctacaaaatcctgaaaacaacaggcactcactttctacttggttctacttgtttcccatgcagaaacaaacaggaaaggcacagattcaagctccttctccgtaaatctttcgagggcaacaaaccacctagaagatgcatgcatggtggcattctacaatttcgatccgtgttgacacagcggatgatgctatttgtcctccaattttaacgaattaagccgtctcaatctttggtcgagctctgccatcacagctggttcttgtatttttctctgcttagaaatagtattggttgtcattgaacctatcttatcaaaggccacctacaagatagaaatgtttcattttaacacctcaataatgaaaagaaacttttgatggattgtgaagctttcagtcatcattcaaaattggggtagactagacataccaaataagaacaaatcatttaagcagaggtgatgacatatacttcatctgaacaatagtaactaattttggttctgttgatagcaattttcattgtgcttcagaaaatcttcactaatcagtaatgttatccatcacaaatagatgtctacttttgatgcaatgaaagccaaccagaaaatatttcatattcatatacatgtaatgccccatcaatcaaatttgtttcgatatgctaagcgagagaacactgacattgtgatataaaataataactgaaaagaatgttaatattaccgtcaacagttcatcggggtcaaagaggtgatgagtagttttctgtaaaatgttaattacatcccctacatgatgagttaaaagcaactcatcttccttcatctgtaaatagagaccacaatgtcaattacgtgatgacttattatttttctagatcaacagttgggggatattatcactagttcttttaataaaatgaaccaaagatccaaaggttcagcttttgctaccttaaatatagccaaggcaacatgaaatagcacctttgccccctcatagaaaaggacatcccaaactcgcagagttgtctgcaataatcacaaagcaagcaccattaaagaa

SEQ ID NO: 29544 - DNA, 2342 bp, Cannabis sativa
taagttcttagacttaggcactgtcatcttagctctaatgaaaaaagccacatggggatcatagtcattaggtaatcttctacctctcttcatcctatccatctcaagctaaacaactcaagctacttataactcaagaaaaagtgaaaattgggttggaaaaagccaaagtaacatggggtaaattttcaaggcacaaggagaatgttttggatttttggaggttttggaaaatttatttcaatggattttggaagtttaagatcccttaaaataagaccagcaaaggaggagaagaagagaaaaaaaaaaaaaaaaaaatatgcatcaatgaagaaaaaaaaaaagagaaaagaaatgtgattttctaccttgaggagaggaaggcttgaaggcttgatgaagatgaaatccaaaaggtgctctcacattgttttgggcatgtgcaataataagaaagtcttaaaaaatttgttctcaactcacctatttatagttgagtccaatatcctaatcctaaagctaatgggagtcttttaaatttaaggctttataaggaataggtaaatgataagtaaaagatataattatatcttttcccttctcctttttctaagataattttaaaattcctatacaactagtaataggaatacaaatttaaaaggtaacaacaattctcaatgctattgggactaaggaaaaattagagaaattaaaagaaaaagataaatgataagaaaaaggctgaaagcgttttctcttctttctttctcactctaattttgaatggcaccaccaaatatgattaggattctaatttaatcctatttccataataaaaaagacaataagaaaatttgaaatttttaaagaaaaagataaaagataagtgaaaaaaaaatagatttttcctctttttctttgttaattaatttttgaaattcccaaggactattcaaaagtattcaaagtcctaattcaattaagaatgcttgaagaactgatacaagtgtctaagaacgtcaaaattgatgcccatctgatagtttcaagcaaaacaaacttgattcacgtcatcaagtcaactccacacaagtgtaaagttgacttgcggggaaaatgttaacccaaaaccttttcttggtgacttgcacattaatgtttgacaaggagcatgaaggatgatgacacacagttgagtaaacctgagtcatagcagtcaacctgggaaggaaccctagccctgcgccgaagttgactctgggttctccaagatggaagttaggactttaagagcttgaatcaaacccactatcttttagtattatgtaccattaacacatgaagcaacctaatccaagcaacaagagttgaaattacatgaatctgtaacctggaagccaacctgggcacgtagggtttcacttggcgccaagttgatatcctcaactagggtttcagtttctgagaccgtcttaatgaaacatggtcaaaaatttcatggggacatcaattagacataccacagacatatttgaggcatcaaaattagaatcagagcaagtagatttttgagcacccagggccttggggttcgagcacctagtgcctaggttgacaatttgtctatctgggtgccttccaagtgtccgataaaaggtccaaatttttcatcgtattcatcttcatgaataaaatggggcaataggttcttccagagaaaaaacaacaattcttaggcgcaaataatagggaccagtgcccaggttcacatctggggctagccctgtgcccaggttttaaatggagttttttaggaattctttcaagcatcttctccatcttcaaaaaatattgagactcaactatttttggggactaaacagaatttttcaaagggcaaaaatagggacctagcacctaggttgacacctggagctaggccctgcaaccaagttgacacattgtcaacttgggctgtttctaatcaagtttagcaaaaagtgttttgggcattttatccatcatcagatataacaaagattcatgtaaacttggagagaaaatcacaagtctgagtccctacaaatagggccaaccaccaaagttgacctagggctgggcccagcgcccaggatgacaataaacttaggacagtaccttcagttgctcaaatgcaaaatctaatggaactattgaattcaaaactgtcaaagatggggtaggacacctcatccttaaatttagaagccatataagtatcaaaaatgaaatctcagaagcttgaaagaaacggcccatcgcccaaggtgaccaatggcctagtgcgctgggttcta

SEQ ID NO: 29545 - DNA, 2214 bp, Cannabis sativa
ctaactgtacttgcatgaaatgatttgttgctgtaggggtttgactagctagccctgcttagagggattgtagattttgatgtgatagggtttggctgaccatattctgagaaagtgtatggtggaggtcggctagatctgtgttgtattgtagactttggtcagccactcctaggtaggggtattggctctagtcgaccaagcctacattaggcagctgtctatggccggccaaacctgcatcaggtagtgtctggccacctacaactccccgattggctaatgttgtcggtgtattgataggaggtagatcacaccagttgttggagtttggtggatctaagtacctgaagtgattaatttcacttcttaattgtcgctttgggtgttccatccattctcgatccatgtcgagcaaaaattgacctttgagcggctcactcccctcagggagggagtgctcccctctagccgaccaaggggacttctacaggtggcatgccatccaagggtcctacatgtggctggctggccaagggcttgatgacgggggttgttgctgagcctgagatccttggctgactccccatgctactggttgccaagatctggctattctcgccgttagacctttgtggcaaggtctgtcctccctttggcaagggaagatctgacctactccctgaagaattgggtaggtcatcttatcgatagaccctccctgatctatcaaccagtctaccttagaggatctctaatgagatcctagcctattctattggttttctggttgaaccgccaatcaagtcgctggcctctctgttgcggaaatctagctccgcttgttgagatcaaaggatgtactcttggtcatccatccaccttaagaattcacgtctctactgagcgaatacattgcactcagcagtgtgtggttcttccattaggccggcttggccgacggcttctctaagtctggcaaacttgagattttctccctagtccacatagggctcgccaattgaaggctcaccaactcttgaacatgtctctccagcatagtaccggatacaagatccagttgttagatcttgggggttgtcgcccaatagtccttcctttagtgggaggcaccagtagtggagggtcctccctttgaggaaagagcctgctatttagatccaccgggatgttcatgtcactttggccagctgtagtggccagacttgtggtgcctattgtggtgacaggattgaccacatcagcattgttcataggaattctagttgtggttggaacacgaacattaggatctgcagtttgtgagtcttgagggagacccaaagatgcagatggtgcaaccagagttcttctcatcttaaccatgtaatatccactctctcttaatggaagcaccaaactattgaccttgaaaagtggccaactgacagcagggtcgtatgaatctgatgtttgcccgtgttacacaattagaattcaaaagtaaagaacacaaaaaaatttatagaggttcgacccccttagttagcgggtcatgacctattctccttttagttgtattgataccaatggataatactattaagatcactataggtgggatctgatatagctcccttaaggatacaaagtaggaatcaaagatggcaaatctcaaatgttgagaatactatatgggcatgtagatgagagagagtgaaggagagagttatcagacttagagacttaggcttagaatgaggcttagcacttaatgactttgaggctagaattagacttaggttttctaggttacagttaaggccctttatataggagagcttaaatcctaatttacaactgaaatcctaagatatttgtgtattatattgattaattactaaagactaaaatgcccttaaacatagatattttccagctactttattgggtagttaggacccaattcgcagtccaactcgcaatccacatgtaaaattgtgcagaggatcctgccaggtccattcctagccagccaggcacctgcaggaagtaagctgaccaaccgtgtgttgtccagaggctggccgaccatagaggcggccaggggtgaccagccagctcttttaaggcagttggtctgtcacttgttgtcctaattgagagttggggtccccgttggtcgagttgctgacttgaccttcttgttggtga

SEQ ID NO: 29546 - DNA, 2094 bp, Cannabis sativa
gaaacgaatgaagcgggatgcaatttatttgggactaccactattccgttccctaaagaagacaactgatctccaattcttagtcgaccgggtgctccaaagggtcaaaagctagaaaacaagactactttctaaggccggacgtgcctgccttgtgcaatcagtggggtcatccattgctacttatgttgctgcttctgaggttatacccctaaccattgcacggaaagtggacaaatgtcttcgggatttctggtggggggatacagaggagaagaagacaatgcacaccatagcatggaattccttgtgtcagtctaagcttagaggaggcctcggattcagatgtgtggaaacagttaataaagccttcattctgaaatgggcttggaaggctctcacggatgactcaagcatatggagtaaagtgatcaaagccaaatatttgaaagataggaacttcttggatgttgagcaaaactgtggggactcgggtatgtggaaagcaattcttaaaagccgaactcttctcaataatagtatttgcaggaaaataaggaacggggcggatacttctatatggtttgatccatgggttccgtctagcaacagccgccccacacctttaaaagatgcaactttgggggtggcatgggtaaaacaattcataaacgaaaacaaccaatggaatgtccacatgttgcgggagtggtttcaccagaatgatgtcaaggctatacttaacatcgacctccctcagggcgatgcgagagacagttgattatggttgggggaaccaaatggaaatttttccatcaaatcggcatgtcgactaattaaaggtcatacagagactactacatctaccccaacatggaaaacaatatggaattccaaggtgcaccatcgcttgaagttcctatggtggcaacttgttcgagattcttttccaacaaggggtaagctgtcaacattcatgaatcttccttctaacttatgccctttatgtgaccaacaaatagagactactatgcacttattctggaagtgtaatttagccaaagccatctggtttaatactcgatggggaattcggactgagtgtgttttggtggataattggaacgattgggaacgctggttcctcatggatgggaaccgaccacatgacgtatcctttgatgaattcatgacaacaactctttgtattctggaaacaatttggaaggaaaggaataagaagattcatggcactgctacaacaccattaattcaactcaatgagcagattcgcagaaaagtggtggatcatgagatggtaatcacgaatggtttgagagagctgactgcctggaagccgcccccagttggatgggtctgcagcaactcggatgtagcgatctctaaagacaattctttcttggcagcagtgatccgaaatgataagggggaagtgtgtgccattaaaactggcagaagtgtggttacagacccggagattggtgaagccttggcactttgcatggcggccgagcttgtgaaatctctgggatatgatcaggtatgttttcaatgtgataatgtgactgttactaatgtgatgcaacctcggacagcagcagcatcccacttcaaactggagacagcaaaggatcgattcactaattattgcagtaactttaggagctgggacctcatccacactccaagagcctgcaatttcattgcccacaacgttgcaaaatgggctcgactcacaaacactgttgggagcattaatcctatgaccttggagacaaatattctggatgattatgtggagtggagccatgaaaatggatgatgttaggagggttctcagagtgttcttttcttattgccgctttgttttagtttagttcttgtattgctttcgtttgtttttgtctgtgttttttctggattccttgctggttggttattttagactctttttgtatgtgttggttgtttaatgaattgggtgccgaggcaccctaccatttatcaaaaaaaaaaaaaaaaaaacccaccttttttttttttttttttttaaataaaaataaaaataaaaaa

SEQ ID NO: 29547 - DNA, 1897 bp, Cannabis sativa
aaaattatcaatatataattgagatgtatattatagaaccaattttctcatggataatatatataaataaataattaaggaatggattttgtttcgttatggaatggtccagtggttccccatggacactattaccgtttgagtcaatcttaagaatttgaagcctaaagtatatcaaatggtgtatatatagagagtacattttcatattaatggatccacaaaattttgttagcatgggcattgcattttggtaaaaataaatacttaaatttcacttaaaatattattaagcctcaaattagtactctttttgtgtaactacctttaatcgtaggaaatatctctaggtacgtatgtgggaggtcgaaggttcgactcatccgaacccttgctctattgaagagtgacacattaactaaccactacacgacacactaattaagatatacaattatacatcatatattatacaattatacatcatatatattaatttatatattcatatatattaatttatatatataatttatatatatatatatagaaaaaaaaaaaaaaaaaagtcatgatgaggggtcaactgaccctccttgctcgaaccagctccaacgtagatctgccagtacgtatacacacaaatagaatataaggctataatatgatgtatattcaatttgtgtatgtatatatatatgctagtaaataacattaatttataaagttttcaaataatttaggggtgtgaaggctctaggtagcttcgttcatgcatattgtctaaactataattttttattaattaatgatatgaaaataccaattatctgttgtgattattaattaattactaattaatacaaaagggtattaatagtttatttaaactatatacaccatttacaaccatacatcagtgcaggtttcccccaaatatcaagaacaattttaagttatttcaaacttcatagtctaaataatactgtaattttggatactcataaaaaaaaatatctttatgtcacctaattttaattaatgtggtaatttcgtatattagtaatgaaatttaaatcattgggagaattcgaaatttaaataataagctcaagactataatgttatattaccataaaaatagttttgagataattatgtattattttatttaacattttattacaattttttgaccacatcaatctaaaatagtaaactacaaaagggtgtatgttataacatttttggttaataatacaaatgcaataaaatatacagaataataatgaaatggacaaaaaggaaaaggacaaaacacataaaataaaataaacaagatatgacaattgagtcataatttggcccaaaaagaaagcaaaaataccatttaaattttaaagatttacacattgcattacatggaaatcaacatctacttcattaaaagaaaaataataacaaagtaattaacagatgtaaactatgggaaaatgacatagatatgcatcaacttacacatatttttgcatttttaataattttccccagccgacataaaatgacacactataataaaagtgtccatcttctctaatatattttcagtagttagttgttgaacaatatttttaatatattttttgttttgttttttttttttttttaattttaaacactaatggtaaagcaaggattatttgtaatgggttgagcaagaagcttcatttccttaatagctggatcttgtaacaaaagcactttgtccttgtctctaacaccaaccatgtgtaagtaatctttatcatctctctcttttcctttgaacaatagcctttgctctcttggttccataccactcaccaatgacaaaatcatcttcaattcccctaaaaaa

SEQ ID NO: 29548 - DNA, 2524 bp, Cannabis sativa
atgtctctttactgcatttcttcatagtgtctttaattgttagtttgattttataacaagaacatagtctacggcaacaaagcccttgttgtatgaagtggacattcattgatgtttaggaatatattattgtgatacccatggttcttttttagcctaatgagtaatccataaaagctatggaggtatcaaaaaaacatgtaggaggaacaatatgatctgtgttgccagaacattcttttgatgagattcattggttgcttgttgtagtttggacgataccgttcgtatacttgacggagctaactttgaggaggcctcatggattccacacaataatcaaacaggaagatggatttctcaattcaagtactaactacctttctattcatccttatctttgtctttgtctccttaatatcattatataaatttcttcactactttcagttaaactgccatattattcgaaatcattgaataaatgttctatttttgtctgagttattagtcacatactctctgtaccgagaaactttggaagttatgattgctaattcactcccatgtttctggttgaatagggctatatggggctgggacgattcatatatttttattggtaacatgaagagaggagtggatgtcatctcaccttctaaaggaacaactattgtgacattacagagtgaacacataacagcaattccatgtagatttgatgcacacccttacaaaattgggatgctagcaggagccacaggtggaggccaggtttatgtgtggactagacaatgagttgtataaaattataacttgtatgacatatactaggcaatcagatgcttttaaggacatagttgttcattatccaacttaagctaggtcgtgtggtaattatttatctatgttgaacgtccttatagttatattgccaatccttttcagtccctaaattcattttttttgtagggttttatttcattttatacttagtttcacatatttgaaaattaaccttttattaaaaaggaaacattcacaacgaaacaattaatttacccttaaacaatggatataaaagggtaaatcgatcctgatggttacatatagtgttgtaaatttgtgtgtggtgttgtgttggtttggtttatattttttttttttgtttttttcaaaatattggtatgctataaaaagaaatgtaagctgtgttttgccgtattaacattttggtaattccgacacggtttgtaaatttgatatttttgtgtcgtgtttgaatttatgttgtgttttgtttttcttaaaagttagctaacttttatatttaggttcaaattggtgatttatttttctatatatttttttttttttacaatttatgaattaattacttttttagtttcaattatattaatataatttttcaataatatttataagatcataatttttatttttagaaaatatgaggtcataataaaattattaaaatttaaatatttaatgagttaattattttttttataaataattattcctttttttttttatatatataagtttataatacatatatattagttaaaaagcattgtcaaaataatgatttaataggctaataaagatttttcttttcaaattttgacatgtaccaaatcgtacatttcaaactttttagattattaaaattttttcttaaactattgacttgttacatttaaggaagtccactcaattctatttaattgtactaaaggatgcctaatgtggcgattatctatttactaaattatgccctattaaaaataaagaattctctgttagggttttgtggcgatcgtccctttccctccgtttgggggttatgctctcatcaccagcaaagagcctttttttcatattacttttgaagtatggcaaatatggaaagtctattgcctattggtgagcattatgaatcttaatgtgcttgacgatgaaggatgggaggtgaatgattcaagtgttgggttggttggcaagctatacctaagaagctgtctctgtactcggcatgaattctgcaagtgcttcaaaacagtattgtgccgcatttggaaattgacagagagagattgggatttcaaattcaaaggcaagtctcattcctctttgttccttattctgtctttcaagaacccatctcacttagatcatattgtgtccaagacaccttgggtaatccaatacggtttcttgattcttgaaagaatggactgtattcctctaaattgggaaattgaactgctatggttcctgatggaaggtcgtgtgttgaacttgacaatcccttcgatgacttccaacaatatacagcgattggcttcaatggcgggaaaggttgttttagtccaggggcttgatgttccgaaaatggcagacaatgggtttttcctcttaaagttctaagctccattcaatctaaaatttgccctgggttcttgtttcctacttcgaatggtaagatttggtttccttt

SEQ ID NO: 29549 - DNA, 1776 bp, Cannabis sativa
  modified_base (588)..(588): a, c, t, g, unknown or other
cagtatatcttcgccagcccctgaaccggccggtgagcttccacccagtcaattagccccaagaaatgctcctccgtcactgccgtttcaagaaactcacgcacttctccggcaacccagcttagcggcctttcaacaagatcttccactatcttccctccgaatggaatcgaaagaacgtttccaaagtaagattccatctcgtcggcaccggctttcttccgacacagacgccggcgtccgtccaccactaaacccatcttgcaaatctttcctgggtggtcggaggctgcgcatttggcgaccattttccaaaggtaagcgctgaacgattcgagctttgttgggcgcttgacgaggtttccagtatcagcttgggcttggagccactccagctgctcggccttgacatagtagatcctgctgatgaggtggtcggcggcggaagcggtggatggggatggcggagggagagctgttacaggaacgtacatgtcgtcaatggaggagtagttgtggggggtaatttggtggcggcgggggttgaggagagatcggcggaaagagggtcgaagagataatcgtttngattgagccatttgagcccatgaaatgaagaacatgttagccgaatatgcatcagctatgcggtggtcaaatgtgcatgctaccactatcccaccacacttcaattcagttacctgtaataatttttactcttatttaaaatttagacacataatatatatatatatatatatatactatttataaaacttgttaaaatggttttttaacactagtcgagaattacgaccattttctaccttcaaaatacacaggttatatattctcaaaaaaaaaaaaatatattttgggagtttgttttcatagtttttctctggatgtttcatacgggccgacagaaaagttggatggtgtgtacagagttatttttgtaaaacactaataaaagtagaaaaaaaagtaaacaaagataatttatgtttttttttgccggccctcagcccctttacatatcaatttcttagatatgagtattatattaatttatatatatatatattacctggacagccagaacgccacgcttcttgccgggaaccaatttgccctcaaaggagtcatctgggttgtacaaatcgaggtcagagagctccacgtcagcggaggctacagaaaagtcgacgccgccgttgttgcagagcaactcgggctctccttcggcgttcttgaccagctcaccagagaaggcgtagaaggtgaccaaggcttgtgcgagggccttcttcagtgcccaaaccttggccccaaaacactcattggttgtcgatgtgggactaccacttgtaatgtttgtgtagcaaaacaaaactcccacgtcgaccgccggcaagatcaggtcgaggttggacaaaggaagccagtggtcttgcatcggtagagctgctgacaccacctctgtctccttcacttgtacttcgaaacaatgatcaaccttggtaccatggtattcttctcctcccgaaaccaccattgtagagagtagttaaagtacttctttaattattattattattttattttattgtgattttgtgtgactagaaatgtgatccagactcctgtatttataggcaaaatattgatccgtaccaatcatacatgtgtttatgccaatgacaatttttgcaatttctttttttttttaaaaaagccatatttaaataattaaaggtagttggttgaaacatg

SEQ ID NO: 29550 - DNA, 2978 bp, Cannabis sativa
tatggagaattgaggtaattgctagggatcaatcaggtacgcatacctaattattatatattattattgtgttttatgttatatacaaattgatcttgggtttaatttatctaacacattttagatcacagtttttgtgtaataaaaagtaatgatgtggggactgtgatgttcaagccgtttagattctgtaaccattggctctactaccatggtttcaaggaagcagtttggaggagttggactaattccccaaaccaagctggtctcgttggcataatgcagaagcttgttcaagttaaacagactttgagaaggtttagcagagaaacagtgggagatgttattactgactttaaacaggctaaggaaatttacatcaaagctcaagagatgcttgccatgaacccaactaacaaattactgcagcaacaagagaaacaatcacgtgaactatctaactttgttgccatgctatactagctttcttaaacagcaaagtaaaatcacttgggtgaaatgcaatgatgagaactctagttactttcatgctagtatgaggaaaagaaaagttgaaaataggataacaacttttactattagagacaaagtagaagatgattatcaaaaagtgcttgaccatttccttgctcactttaatagatttatgcggagtaagagcactgctaaaatagattttgatactagctgtattgattaaggggaaactctaaatgtggaacaacaaattaaactaattaggccttttcagaagaaagatgtgagagaggctttgtttagcatccactcttctaagagtcctgggcttgatggatttggatcaggattcttcaaagtattatgggatcaggtgggtgatgacatatcactcgttgtgcttgaattcttccaaaagggctatctcctaagcttaatgaataaaactatcttctcgttgattccaaaaattgagaatcttaaggcgactagtgactacaaaccgatagcatgttgcaacactttgtacaaatgtatctcgaagatgctttgctccagattagccgaagttctcccttcattagtccacaacaactagggagcctttattaaaaacaggttacttgctgacaacattatgatatttcaagatcttttaaaaggctataataggaagcatatttcagctagatgtatcatgaagattgaccttagtaaagcttctgatactgttaattggttatttgtggaaaatctactcaaaagcctttgcttcccgactagattcatccattggatcatggtctgtcagataggtacaaactataatcttttgatgaatggtcgtatccaaggatcttttaaaggggaaaagggtcttcgacagggagaccctatatcacctttgctatttttgttgtcatggaatacctcaccagacttagctcagagttccaacaacaaggggttcagatttcacccgatgtgtaagaatctcagactgatgaacttatattttacagatgacctcctcatcttttgcaagggcaatatgacatcggtgaattgtatgtttaatggtttccaaatattttgtgatactatgagattgtctgcaaacatctcaaagtcccatatttactttggaggagtcaaggaagattgcaaagctaatattctcgagaaagtcaatatggctgaaggtaaattccctcttaaataccttggggtccttttgagaccaacaagatggaaatcttggactatggtgtgattcttgataaaatcaatagtaagcttaattgttgggcaagtagaaatttgtcttttgctggtagagcccaattgattcattcggtcctcttaggcatcataaacttttggatgagcctgcttatcgtacctcacaaagtgactgcaactattgataagagttgtcgtgacgttttatggggaaaagtaggcaataaaagcaaacttcacctcccttcttgggagaaagtttgtcttccaaaaaagcttggggggttggattttgcgaagggaggaaatgaaatatgactttaatggcttaatatctttgggcaatctctagcaaacaagatagtttatgggtgagatgggtcaattccatttacctcaaggatcgatgtctgtgggatataccaatcaagcaagatatgagctggtatttcaagaagctcttaaagctaaggaagcaaactgatgaatttggcattgctcaagctgttaggggaggtaaattttgatccaaacatttttactcttccttaattgatgcctcagaggttgattatgttaaagcagtatggcataaactagttgtccccaagcacaaatttaccttttggcaggtttgtaataacaatctacttactagggaccatttggttagatttttgccctcaatttcagagctttgtgctatttgtgagctggacggagaaacacacagacacttattcatggattgtctgttcacaaagctgcttgttgctaaaatcaacagctgattttggagatttctgctggccgaagtccatccaggaattgctggtgcataaactgatgcattcctttgatcttaaacagcaggtgctcaatgttttaatggctgccaccttgtatttcatttggaaaaataggaacaattgtgtgtttaatgcttgttgtttgactactggtcatatcggtagagaaattaagagagtggttaagtaaagagttcttggttcaacaattaatagcctaaaaaaaggtgaccggtatgttgtaaacattgtagagagctggtgaggttggttgcggctgttgttggcaccttctttgtgtttgtactgtttttgaataaatttattcttttgttaaaaaaaaaagtaaaaattaaaataaataaaataaagtgggtataaaatatagggcatttttcataaatgtacaacaaaaataaaataattaca

SEQ ID NO: 29551 - DNA, 4350 bp, Cannabis sativa
tatatatatatccaagatcctacactgcattagaactaattggtagagtactaaattgacttagatcatgatgataatcagaagtaacacaagcagaactactttgttcctctaagtatattaattaatgtatgtgcagttataaatattattattcatcatgattcataattacttgaaggggttgttggagtagtctcggttaggctccgggaaagggttccactcccacagccggtcagagaaggtagttggaaggaaattaggcagtgcattaagggcagccgaaggcagttgtggctgcgcctgcggtggcagctgcaatggatggccaaattggttggtggaaggctgctgctgctgctgctcttgttgatgatagtattgctgttgttgctgctgctggtaatttactaatctgtgaaggtcgtcgatggaattcgctgcccccacggccgaggaagaagagcccggaaagattggggagcaactaattggacaagtactcatgatttgcttaggctgcagtagatgagatgacagcatcgcagcctgtgcctcgttgatattgttggaagctgcggctgcggccactgtttgttcgagggaggcgtgaatgagtggagtagccattaatgaagtcctgtaattggctttgcgtttagagactccaagaatatttcctgctgcaacatcggaactgctgcttccgtctgtttcgttcatattttcttgctcaaattgttgaggcagtgccgttggctgtcccatgaaagcttggccgattttttccatggcgttgacgggctgctgctttctgtctactaagtgagctgctcttgatgaagacgacgctctagatgggagagagcgtggaagagaaggatgatcttccacacctggtctcttgtacacacggcaaagggatatctctgcctgcagttaatttcatgatgatgatgattaatgaaccacgttgttgctatgtgtatttacttagaaactaataatttagaaagaatatgtacatatatataggtgaaattattacatccttccttaatattaactaagagaattcgttaaggagagtagttagttttgaatgtatatatatgtattaatttaccatgttaaaaatggttaactttgataaaaacaagtgcacagtgtgtacgttggttcttccttcatagtattcaattccttttatctattttacgtataatctcattgacgatgcaattcgttcaagtctctcttggttttctactttgctatagtatatatagctgatatatttattgtgtgtataaaaatctaaattgatataaatttttatatatatcttatagaatgtttaagaaatcttgagagacttttaactactttgccaactaaccgtggagaaaagttgaaattaacatacaactttctagctagatcccccgccggcccatattagaaatttgttaatttagggttagtgaaattagtaagctatagatcaactaatttaaaagaatctagtaataaaaagtaaaacttttattattattattatttattatttatttttattttacaaaaggaaaactaaatgatatatttttagaagctttcaatcatttagtagtgaatttttaaatacattgataccggccgttaagttaccttctgatatctttcagtttcatgttgaggcaagcgatactcattcataatccaactggttcggatgcctttgggagctttcccagaataaaaaactagggttttcttcaacccaatcgaccgagagctctcggttcggatcattcggtcagctcccgttgccttccaatatccggaggttgtcacccggttaggccggtcgccgtttctatattttctgtctcttggcacatagaagaaccattccttctctccaattgcagccaaagctgaaagaaatttcgatgaaaatatatcttatatatatatatatgtatgtgcatattaattattattattattattattacagttagattatcatataagttggttaatattgtttcttatatttatagatcgaatttcggatatgaagggtagctatgaattagttgagataacctagctttttggattatatactatacctggaagctcccaagggtcatagcgataaagatctaagaaagtaatgagctcaacattgaatcttttgccctcaaccttacggcgaaggtaaaactcaacaagttcttcttcggtagggtggaagcgaaagcctggcataacgacgtcgtgttcatggtcatcgtcatcatcgttggccttgcttacaacgttgttgttggaagactcgttctcttggctcatattattactagctgtagtagtactacttgaggtgcctgcaattgccataaaccggtcgatgaaaccaaaaataccaagttacacaataagaagaagatggttaatatatatatatataaatatattctgtgagtgtactgatggtcaatggatagagagtttggcgtataaccctcttaatttataccacttggacagaaaacaaaaataaaataaaagaaaaaaaattgtatgagtaacataagtggaattgtacggatttgatgaagatgtggagagaaacaagtgggtaggcaagataaaagagattgcccggttaataaaattaatgtactttgttctatagtaagaaaaaaaaataccaaaaaaataaaaataaaataattaaaagaaaagaaatttgtttatatatattaaaagaaaacaattttgaggagagagaaaaagaaaaatggaggtggggtggggtgggggatagttaatggaaagatctacatagctttcaggccctacatgggaagaggtatgcgctaaggtgtttttaagatgagaaaatgacgtttcaagaagaggacagggtggccacagtcccttagcggtgctcttggacctttcttttaagtctttttctctctatttctattttggaattattatttttttctttctcaacaaaatataaaatgatacatatttgtccactatatgcattgcatatacataatcttgacattattttaattttaatttgggaagaacatctgcttcacttgatgatatacaactagtcaactagaagcgagagaggcggtttttaagcactctttacaaacatttaaattagacaaaataaaataaataattaaagagttaatagaataaagagtcttcaatcttaaaaataaaagtattaagaagcatatggatatgtaaccaacgagacgtgctataaaagaggagtgcaaataataacaccttattacatttttttttctttctaatttcttgtaataacaataaaaatatatatatattatttatttataagtaaattgacaattattatcaaagaatctacctttgaaaaataaaaaggtgaaattttaataaagtgttttaatatatatattataagagttttttaaagtcaactttaatagaagtgcttgtattagtagttgttagtaaatgaggcaaatatgatcataaaataatatgttatagagattgttaggcatgttaaaaagattcatttagttggagcgggtcggagttccgatccgatagatcacctctgatctaaatcatttggatacttatatctcagaacatatctgctccgccccatctatttttttatttttttttttttttcagatcggatttgatctagtttcgtttcaatatattatattaataaaaaaaaacttaattcaagacttagactccgaacccggacccagactccttgggacccaggacccagaccggaccagctaggactcggactcgggaccggacggggacccaaacccgagaccaggacccatgcccgtgttgggatttattttactaggatttagatttactaaaatgtatgttgattaacatcctaaatatgaatatctctaatacgataaaattaaacacataagagtttagaaaaccttatcttggttgcagtagaataatatgactccttccgctcagatctctaaccctggttcctttctatcgtagagtattatcaagatctgagcccgagtctctttctctccttcgggttggttactaccgtcttccgcactatgattgagtacttgacttgctatgtgtggccatggcactctatcactaagggtcgattatcaagaacaatgaagaaggctcgaaatcactatagaatgtgtctctcatttactagttgtctgacagagttagaaactatatttggcatgttgaaagtgttggatgagaatgaca

SEQ ID NO: 29552 - DNA, 1983 bp, Cannabis sativa
tataaccgccaatgggattttaatgttataacaccagagaagacttgaccgaagggataaggcctcagccattaaagggttgacattgccaggaactggggtagagaggcctgctacaattctatttttccaatccctgataactgctccaaagcctagcttacccgattgcacatcctttgctgcatcagtattgagtcgatataagccttgggaaagtctgctactgctatattgttgtgaagaagagggctgcagatctaatgcagactgcttctttaattgagcatcctgaaaatctgtgataaaagcactagcccaagaaacaacatcattaggaagcataaaaaaaccagcaaataattttctgttcctattgtgccaaatagcccagaggagtcccaagaaatgcataaggtcctttttgggtagatcagtgagagcagtaaccaaaaaccatttgatatcttggtgacgattggaaagaaaaaaggatctaaatggtgatagcttccaagttttagcagcactggaacaatctagcagggcatgacttacagtttcagtaggacagttgcagctagagcaactcggattaggaagagttttcttcaaaaaaaggttaagggagacagggagtatatggtggtataccctccagataaaatttttaactttaggcgggatgttcaaagaccaaagagtagtccaccatttctttgagagggaggagtttgaagatgaaggagggagggagcctgcattggcaatgtgatatgcagatttgacagagagaatacccgagggatggttattccagatcaaaaagtcctccttatcacagccacctatgggaacatgcaagattgcagaaacagtaggagggtcaaaatatgtgttgagggcttcgcgatcccaataaccctcagggtgaaggaaaaaacttactttatcagatggaggggagcaaccagctttatactgaattttcctcatctcaggcacccaatagtcctcaacaacacgaatagtttccccattacccactttccagagtaaacccttcctaaggagatcccttccccagagaacactacgccaggtaaaggagggggtgtgaccaagatcagcatcaaggaaggtgctatgattgaaatacttagctttcagcacagcaaacagtaaggagttaggattagaataaatgtgccaggcttgcttagcaagcatggcttgattgtgatgaacaagagatctaaaacccaacccaccaaagaacttggaaacacaaagatggttccatgacttccaatgaattttagaacccttccccatagagccccaccaaaattgggccattagcttttcaactttatggcaaatggagacagggagtctgaaacatgacatagcataagagggtatggcttggatgactgcttttaagaggacctccttgcctgcttttgaaaagagtttgctgttccaaacattaaggtgactacttacacgatgaagaatgaagtcaaaactatcttttttcgatctgccaaagcactgagggacacctaagtatttactaatgaacggcttaggggtcatgcctagatgttggaagaagtagtctgaaatggaagtaggggtgtttggggaaaaaagcatggaagacttactaaaattaacagtttggcccgaggcaagatgatacacagtaagagcttccttaatagcatgacaagaggaaaccgtagcagtagtaaatagaagagtgtcatcagcaaataacaggtgagagattggaggggcatgcctagagatagaaatgcctctgagaagaccaactctttcttgatatttaagagcagcagagaggccttcagagcaaagcaaaaacaaatacggagaaaggggatccccttgcctaatgcctctagaagggtagatagcattggtgatagaaccattgaccttgaaacgaataga

SEQ ID NO: 29553 - DNA, 3996 bp, Cannabis sativa
ctagaaaggacataacacttatccaaggtgtaagtaaactttattggttactatcacgttagtgtaaatccagtgcactgataaatcatgggacataaacttttgaaacatataatcacaattactttctactgtattgacatcactgcaatagtgagttacaatatgtgctagatttaatagaacttgtatatcaaaccttaagcatgaaaaatacatgtaaatataaatgacttctaatcttttattgataataaacaagattgagttttatttagggtccaaaaaaaaaaaaaaatcccacttgcactaacataaaactagaagtgtatttcaatcaatctattttcttgatgtccatatcaagtgtagcataactgcttatacccaaataaaaagaactatacgattgtggtaagcaactgctatctccgccattactttctttgttttcataaaatattatgcaacattatttttctatatgcattacgcataacgggatattgaattctttaatctatgataagtgcatctggatatacagaagacccatctctaattctatccaaaaatgaatagagatgtaataattaagaactttctccagcttgaataactttctagtgccttgtaaaacaactaagttctttagcttcactagtggagcttaaattattatagacgggtttttacatccttctagaataattcctccacccccagagtaacaaccatctctgatattaagttctgagatggtgtagatatagagactctaatatacacccctatcatctaacatataggtcacttttagagattctttcttgattatttccctaatattccttgtttgattacatctttgatggctcttactcaacagtaggagtctggtttaatgcatacacaagtgtgcatttaatctcttaccattggtgcttagggacctcttgttgtgacattttatcttagtctagaacattaagttccttctagtctaagtcatcaacagagcattctagtattaacattaatgtaaaatacttgcttaagataaagtaattactatagataccataaaacatttcataagaaccagaaattgtgcttgagtctttcgaatagacattgcaaaatttcctatcttatcctcataatattgacaagttattactatccatatgaatggttagattaactttttttagttgtattttaaagttccttctagaacatatcatagtaggctatcactagtgtcatctaaatgataatggattagacttttaaaatcctcccactaagataagctactgtgattctatgtcgaaggacttcactggtatttatttactattactatagtaacatatatattggaacatttacaggatcaagaataagttctattaggttgctagtttgtatattatattatgtccatgtctaactaaaatatgtgtgtcatagagattatgtggtgtattgagtatagtctagagttcaaagagtttgaactacatatatcaataacttcttccacccctaagtgttatagagattttgtagagtttcgaataaagtctaaagttcaatagatataaaagatctttgaactgcatataataataacttcttccaccctatcagatcaaaaaatctttttattaaattaaatcttattaattgcttaagaattgattcataaacattgaatttaaattctaaatgtttatgtggtgttatctcttttcaaagattaatatgccatagattttgtatcactaataaaatacaaaacacataaaacatcataaacatataaatataatttggtactggcatacaagttaaataatttgaagctcaatttcatataagcaatttataatgaaatccttttaaagagaaaactattatattaatactctaaaaaatgtgacaatgaattgtctgcaataatatgaaatagggaataaaatttccatactaataatttgaaactaaatttttcgataactaaaacaattaattcaaaaattaaagaaaaaaaaacgagcttcatcttcaacttggacatctccacccttctgtccaaccatctgtctaaactcgggaggataacaaggtagtagaaaccacatgcaccttgcttccttgcagagcaggctttgacggaataaaaaataaagaatctcaagtggagtcggccactcccacttcaaaatatgatataaagactttaaacaggctggtatcctgtatgagttgggtgccaattggaatggagcaatgcaaaaatagttgcagaagtccttgaaatagtccctaagaggaagaactgacccagctctagaatgctctaggctccaagcacctatcctataaggttcgctggtgctgcaatcctcatctccggctatacgttcaagagggtaacagttgaactccccctcggcaacagacctaatgcgacatccttattcattcttgatgtcgcacgaccttaagacttccccgacctaagatcccatggatctgattttggactcaattaactcagtctcaaaagtgacagtaggatcttgtggagctttgatttgtgagttttgagccattatttcaaaatttaagtcacctagtgaaaaagtaatcatgactaagggtaaaaacattggactcgctaagagaatatcaattaagttagaaggtttaggccaagaagcttctcgcaaatagggatgcctaccctcaataatctcttgcaagaattgcctatagcgactaaaagtttcatcttgactaaatttaacgaggtgatccctaattttctcatcatttacttcaagaatggtttgagatctttgatttttgggcttaaattttatggcagaaagttgaggacaaacaaattttaagaattttgggattgtgatttctgagataaattgggacatggttatatataataatgtcttaatttttggaaaacagggtacaaataaaaccaaaaattttttgaattgtataaccttaaacttgtataaccctagatttatgcaaacattcaaaatcaaaatacccaagcaacaaagcaatgcagacaaggaaaacacataccaagaaataaaaattgtaagaacaaaaggaaaaatcaataaaaaagagtgtgtcacttactgtcttgatgagaaattctgggtagggaagaactttgcgcttgaaataccaaaggtcaaaaagctgggtcttgatgatttctaagtagagagatacaatcagacaaaatacacaaaaagaatgtgagagataatgagggcatgcaaattcagaagaaaaggtggttgagattttgtcgaaagcttgaaggtttgaaagctgaaaaatggtaaaaataatgtacaatttcaaatttatacctgagaggtggtcaccgttcgatcaagggaaacctaatctaacgaatggaaactttacaagaaaggaacaatcagagcattaaatgagaaatgatgtaccttgaagttttgaatcgccaaattctaagcatgtaatttttaaacaaaataaatacggttatacccttgaagacatttgaaagttctttttaattaaaaaacactttttaggggtcaattgttacacctgaaatttggctatcaatcagaagttaacacatgtacttcagaaagaatatgaatcagctcaatgattataatattaaattgtattattaaatgcaacttaaacaactcgttttaattaattacaattgatagaaatattcaaactcactgccacataagcatatgctagatgagaataataaattattaacagatataatggacgagacaatatgttcatctcgggataaacagtctataatagaagcgtacaagatgagacatcatggagcttgcaactcattgacccacatacttgggagtaaaagcttgcaactcattgacctacatatttgtgcctaga

SEQ ID NO: 29554 - DNA, 2078 bp, Cannabis sativa
gttgctaggattgaaatggggcgggcttttcttttcttattaatttaggcccaagagctgctaggtagttgcagggggaaagggagagtgcgaaagagagttcggcctctgttagaccagtcgccggtaggaaggaaaggaaatttgagcttctcagatctggaaaggaaaaagaagactcagggagagtaagtgagaaagagagatcaaagagagagagaaagtcaggagaaaataaagaattaaaaaaatattatttatttattaataattttataaatttaaattattctttttaattttaaaataaatttagaaaatatttttttttataatttttaaataattatattaggttggccaatataaatgtaccacgtgtatataatggtacacaccttaaatttactatcagtttaaccgtttggaaaaatttaaccataaattacttataaaataacaaaataagatcagaaatccaattgcatgaagtcctaaatgtaataaatttaaagtttaaataaaattattaaaaaagtaaatgtatcttgtgtgagtgacactctaccgtatatattgtgtaccatattcttttaaccaataaaaataaggcacgtagaatatatacaattcacttgaatattagaagtacgccataataatattaataataataatattttaatattaaattcattactatacaattcagattcgctcaaatagctttaaatccaataacacctaaaaaccaacaatcaatcctctcccaaagccaccagaatcggaaccacatttagccgcagaagacgccggcggtagcgtcggagtagaaggcgacgccggcaatctcgaagagaaatccttaagacgaaactcatcatcgtcgaaccggctattatcatcctcgaaattcagcgaataactcgacagatcataactgaaatcggaggactggaacggttggttgttatgccgcctgatcttccaacgttggatcagattacggcaacgctcccgaatctccggcagatcgttggccgtcgatttgagccaggtgcgcgttcgaaacgacgatgctctataatcgttattgttccccaaaacttcgtggtgatggtggacaccgcggctagagaagcatctggagagtcggccgcacttgaaagatttgccttgctcttcgcccatcattgtgtagaaatctcgatcaaaaaaaaaattacagtgtttgatctagagagagaaagatgggtgagttgaggagtgagagagaatgagaatataagagaagaacaacacaagaaatgtgagtgggaatataaatggttgggttggttgggtgggttatatatatggttttgggttttattgttggataagagttaagaaagcgggttttggagcgtaaacgttatagcgccgaaaccgtgggaagtacgtggtattatcacaaacactgacaccacatggtcaagatttgatttgatctaatctaatctaacttaatattaactataattttcatttatttgttttttctaatgcagtttcgaatgaatgaaactaactaaatcaaattaataggttgaagttgaactaaatctgactagctcttgttagaaaaaaaaaacctggcttattttttaaaatgataataagggtaaatacaatttttgaccatgtcttttgcaaaagttatagattgaactctctgttttattaaatgacaaaataaactctgtattttttaaaatgataaaaataggaccatgaattgtttttttgtcaaaataaaatttaataataatctaatctaaaggtgttataataaaattgtttacatttttttgatttttttcgtattttcaaggtagttaaattaaaaaaaaaaaattgttaaaaattaagttcaatgtcctatttgtaccattttggaaaatacaggttacattttatcatttaacaaaacaaaaggttcaatttggtaaggtctaaaatagtatttaccttgataataataataataataataataaaagattctaactgttataaatattaataattatgtggat

SEQ ID NO: 29555 - DNA, 2174 bp, Cannabis sativa
aatacatttttattttttaaaaacaaaaatttaaaataaaaattttacttttatttttgttattaaaaaattaaaagataaaaatattatcaaatttaacttaaattagtaaaaaatcacatttgtaaaaaatgaagttgaaaaaagtaataataaataaatgagaagatagttgagcaaacaagtttcaaggacaattataagacacaaaatccttaacttactggtgaagagactagttatttaacatatttatatgccaaatttttgtatgtatacaaaatttatatataatgttggggtatcgattcaagtctcatatcaaaagaataaacaagagttgttttaaatataaacattctatctactctattagtacgaaacttaatcttaaaagttgacaatactaatggatgagttaaggtgagtttttttgctatgaaatcaaatgtaaataattgttatatgttttgctatgaaaaaatgcagatcatagttaatagaatacaaaaagtagtagttgtggggttcatgaatttagtcttaaaagattttttttttaaaaaaaaaaagtttaattaggaaaaaaatgaagttcaaaaaagcaatgatgcatataaatttcaaggacattaagaacaagaattattccatattcatgcttcactatcaaactataataaaatcattaaattagttcaaaaaaccaaacctgaagaacaagaaacttagtagtttgctccaatggaagatgaagctccatttgccaaatattctcaaaagaaagctccaatttatactcaacacaaccataactgaaaaagaagtacaattttcggagaccggttccgaatttgacacaaacattcttccttttccaaagagaagaaaacttattttcagaaatctgagatccaaaatgaagtgttatgtcactaatcacaccatatgggaataataataattcttttggacttgaaattattatgtcattgtttaactcccttgcttttagatatgaatcttggtaccataactgttgatcctcagccatggatagtatggtttcaacacttttagagtctgtgaattgaaccttagcatgtcctcttgatttgatcttgtattcaccaacttcaacagtatatacagttccttctcctgtgtattgctcaagaaatgtcttcacttcttcaccattttcaattgaagaaaatccatacagctgaattgtctttcccattctctaaaaaaaaggtcaaattacaataattagttacttgggaatcaagaaatatcaactctgtttttatcattgaacggaaatacttaaatttaacaatctcaataattcactgcataaataaataagacaaagaaagaaacagaaacccattgtttcaaaatatgaaatttaatgagaatttacagtaattgagataattaagcatgtttaattaaatttagagtaactatattgattgatcagaatttttccatatagtttaataaaatacactaatatttactccatttgattgtgcacaaaatgaaaacatgtttaaatttgaacaattcatcaatacataaaaagtaaataacattggagtgtctaaaccaaaactgaattaagattaagaggaatgaaatgtaataatttgaaagaagaagaatctaacctgaaacaaaaagtgattgttgattatgtatttgtgttatggttatgaagttatgagtgtgtgaagaaagaagataaaatggtgagtatttatagtgatgagtgagtgagtagaaacagagtaaagcatatatagtttcttttctgtgggtcaatttcaggtcttcctattggtggaccccaattcatggaattttatttgcttacgtggcatcatatgattggatgtgtcatgtggctttgtcttgcatccccttgtgtagcaagggaaggggatgttttctccactttctcaagtttccaatagtgaatataaaaaaataattattttctttgttcaatttaatatccaaatttatatgaaatatataataaagattgtagaaaagagatgatatgtgcacaccataaatgacataccttatgtgataaatttctttaatatatgggattcttcttaaatataaataattacttgaatttacttattatataa

SEQ ID NO: 29556 - DNA, 2120 bp, Cannabis sativa
aaaaaagacgttgattatgggaacattaagtgtgatagtgagaacgatgctaaaaataaggaggagaacacgtctcttcttaccaattaatttaaatccatttaagaactattataattaattaaataaaaataacactttaataaataaattttctcaaaatataaagtgacacctcaccacatctgctcggcatagtcggtcagatggtgatggtgcgtgtgcgtgtggtggcccagtgtgtgagtcctcacccttgcgcacaaaacggggtaccccttggggccccaactcatgtgccaaagttgcacattatatacactattaatgaagtattcttatcccatgtgggacttaatgcactcacatacttcacttctcatacaataatttaagaaaattacaactaaagttccaataatattaattattattattatttttcttgcattgtcttttttttttccactaaaattcaacttccacgcatagggttaggaaaaaagaaaacaaaatttttttgaggtcatccacgagattacagttgctgtaggcctgtagtgcttgcatacaatttttttttttttgttgataaattataggcatgcctttttgtatgctcttactctataacatttttttaatgctctcactcttttattttttttttcttttgaattatatataggcttcagatagtgctctatccatatactttagatgaactattccgccgtgggttccatgagttttatgactctttaatatgttgcaactggtaatagcaaatatttgtaattggttaagtttttaattattttttataatagataaaaagtacatgatgtgatagcatgtgttacaaatatatagtaaaatagcaatgatgtaacaacttgtagtataaatatataataaaataatatatcaataatatatcatgtgacaactcgtgatacgaatgtggcaaaataagtctacttaataagacaatatagggtatagtaataaagtatgtagggttattattgtcaaaattattaggcaagaaaatattgtagatgttgtacatcaaactaaatattttgtatgtttgttcactaaagttgtatatgtattaagtgttggatgttattttacaaggatctaaatttaccaacatgtatgtttgattatgttatctgtatttttgcaaagatgacacatggattttaatcaaggaaggctgatgtgttgccagctgcctaacttcctcaaattgatgttacgggaagataaggacctcaacctcgctggaagaggttccgtgataaggagttccttgattactagcaacgcagaaggtatccgcgaaccacggtctccattcgttccaagaacaaaagacatctactactgcaacaccctactagtttaggagtgttaacgtgattttaatttaattgtccagctcgttgctaatcaacgagtttattgaaaaaagtgattaattacaactttatttaattacttataaatattaaattaatatacatatataaatttgagatcccttttacaaaatatttataaaagttttatagcgcatagtacaaaagttgtcgcctagcgactagacaatatacaacaaggtatctcaaagaccatacgctctaagcctaaccgccccggcatgtacaatcttcatctgctcgctctcacagctgctcaaccttagccttgcccttacctgcacatgaaaataatatctttgaatcaacagaatcagtaagaaaagcataatcaataacataactataacccggattataatcaggtgcccatacacccaaccataaccctatcctcgtattccacacggtactgagtccagaatgttcgtacaacagtactattgaccataatattagcctatactcagtactctagtcataccgatgtgatagtatcaatcactacttagccaaacatacactatcgatattcagtgcatctctatgtacactaatatcgctataaaaatatgttacctatcaagcattcataaacatgcacgctaaacatgtaatcacatatgcataacattatactaatcttatctcgtttctgaattcaggtgt

SEQ ID NO: 29557 - DNA, 3742 bp, Cannabis sativa
atatatatatatatgcagtgttagttaatattgttaaaaatggtggcactttcttcttcttcttctttaactctaactctgttgtttgtagttctgttatgttgttcatccacatatgcagtttctaacaatcttacttcttcatcacaaccactctcccccaaacaaactctggtctcaaccaaccaagttttcgaattgggtttcttcaacccaacaaattcttcaaatctttatctgggtatttggtacaaggaagattcttctcctcattcagttgtatgggttgccaacagagaaaccccactctcctctctcacttctccatttcttcaaattagcttcatcaatggaaacctcgagcttttatcaagtcaaaactcgtctgtaatctggtcaactgaattagacatttcatcaaacaccacacaagctatactgttaaacaatggaaacttagtcctcacagactccatttcaggatcagtattatggcagagcttccataacatcggagacacgttcttaccaagctcagtcctcggtttcaacctcaaaaccggagagaactacaaactcatctcctggaaatccgaaactgatccgtctccgggaaacttcagcttcggcatagcgaagaagacacccccggaggcagtaatttggatcggatccgagatttactctaggagcggtccttgggataagctcaaagtcacaggcgtacctgaaatgggttcttcgtataaaagtccgtacaatcttgttgaagatgttgaagaaggaacgacttacctttacttcaacaatgggtataacgattccgttgcttccaaggttttgctttcgccggagggaatggtgataatcatgttcaaagacagagtcggaggttactggtacgctagctatcagggtcagaacaattgcgatcgttacggaatttgtggaccatttggggtttgtaagatcactgagtctccaatctgtaggtgtttggaagggtttaagccaaaatcaatggaggaatggagtcaagggaattggagtgggggttgtgttagagaatctgagttgaatctttgccataataacaatggtgatcagaatgatgatgcgtttggtgtgattggagaggtttgtgttcctgatttttatgagtacatggaaaatggtggaaacagcattgattcatgtcataaattgtgtttgaataactgttcatgcatagcttattcattcatcaatggaattgggtgtttggtttggtcagattcaaacactcttcttgatattacacagtttgaatccaatactactggagatgatctcttttttcgcctttcgggtttcgaatcacaactgctactgcaacaaccaggtaagaacaatgtgacattgttgatcaagattattattgatgttgttgttaaatgttttgtgttttttgattttaattaggacataatgataacaagattaagatcatggttggagttgctgtagcgatttctggtgtggtattgttggttgttgtagtcttctgtttgcagaggagaaaaaatggtaataagagaaaaggtaagaatatgatattcaatttgcatcttcatcttcatgattatgtttatgttgttttacttgatatgtatgtttgttatttgaaatcagcatcaattgcaatgaataatgatttgatttggacaagtggtaagttgaagagaggaggaggtgatgatcatgatcaacctgagcttcatttttttgatttggatagtatagtaatggctacaaacaggtttagtattgcaaacaaacttggtcaaggaggatttggtcctgtctataaggtcaattattggtttattgagatttgatttggttttgcacgagtgagggagtgagtgaagtaatgagttttgcttgcattaatttcagggagaattacatgggaaggaagttgctgtgaaaagactatctagtagctcatcacaaggggatgaagaatttaggaatgagatgatattgatctccaaacttcaacatagaaatcttgttaagctcattggttgttgcattgagaatgaggagaagttgttaatatatgagttcatgctcaacaagagcttagatactttcattttcggttagttagttggttttgtcttcatgtttaacaatgtaagttttagttttaactatttaggttaatttgttgttttgtgttcagatgatagaagaagaagaagcgcagatctcgattggagcacgcggttcaagattattgaggggatcgcgagaggtcttgtgtatttgcatcgcgattccagtttaagggtaatacaccgagatttgaaagctagtaatattctattggatgaaaagatgaatccaaagatttctgattttggattagcaaggatttttgagggcaccttagatttagcaaatactcatagggtggtaggaaccatgtaagtaagcatcatcaattcatcatcatatcatatctctttcttattattattcctttcctttttttaaaattattttgaactccgtattttgtaaaagttaccaattggatcctctattttgttaaatgacaaaataaaccctgcatttttcaaattgtacaaatagaacactgaactcaatttttattaacatgaataaatgaattgcagcggctatatgtctccagagtacgcactgagaggaatcttttcggagaaatctgatgtttttagctatggtgtgttgatactagagataataagcgggaaaaagaacacaagcttcaagggtgaggaggagcaataccaaggccttattgcatatgtgagtgaatgaattttgaaattgtttctagattgtaattgtacattgatgtaatgtaatgatggatgaatgaatgtgcaggcatggcaactatggagtgaaagtagaggaattgagttggtagatgaatcattgggtgagtcatgtattaatgaatcatcagaaacaatgatgagatgcatacatattgggcttctttgtgttcaagactttgcttctgatagaccttctatggcacaagtggcttccatgttaaccaaccatatatttgatcaacctcaacccaaacaacctattttcactttccaaccttctactgctactattactactcataattcagaaactgctacttcttcttctaataatactagatgctctgctactatgacaatggttgaacctcgataaaagaataatctaaattattccactccataattccatttcaatttattttcaatgagaatctctattgttataactaagccacatttgtccaacaatttcatcacttacattcttcatatgagccatgtactatgtaggcttaactgaaattaacctctcatgtctcctaaatttatatttatttcatcttctacttattagttttttttgacctagaaataaaaaattgtattgatccaataaaacatactaactaaaacaatagtaaatatctatttaaaaaaacagtagtatatataataaatatgtacatcgtcactatggttacttcggtaaagtcctctcaataacatcgaagcctcttcaaatttgcataaaatgcccctaattcaaaaattaaaaatgttcttctgttcataataaattataacaagttttttccttacacatatagtacttgttagttttttccttacagttatagtaccaa

SEQ ID NO: 29558 - DNA, 2797 bp, Cannabis sativa
  modified_base (62)..(65): a, c, t, g, unknown or other
  modified_base (2763)..(2770): a, c, t, g, unknown or other
tcatgaaataaattatgtgaaccaggcaacataaaatgcaattctgatctttattaattagnnnntctgattatattgaaatggattttctttagggcacaaaacccaacaacatgtcatatagatagattgatgccacatggagtatatagcttgttaataagaagaccaagtaaccatgcacaacgtaccagttcacgaagagtctaaatacttaagcaggacaaagagacaagaaaatggccaacgagaggggttcacgcggaccacccctggtcggccctagtgccagcataggtcagctagcctccaacaaagtgtatgtcggctagcttctcctttggcaggcactttttgtgcctctgtatattttaacttcgacaacattttcagctgtgaatcggcctcaaacgacccatataaaaagaggggtttaactttaattattcacatattctttagggctaatttatgagttattttcttatttatttaatgtgtaacaaattggtgatatctcctcattttaagggatatcgtcctagtatcttatgtacaatctctcctatatacagggcactaggctaaaccctaaacctcttaagttctcattcctaagctcttgagttcaagcactcaaaaccctagttcaccctctcttctacacgccattagtggtgtagtagagactaagtctccctcatctcatccacttgagaactgcctcacattcttgctattgtaatacatggagagccactctataactcacatcacttgtgatcaaagtggtattatctcatatatcaatacaactaagagaggagtagatcattacctgctaactaagggggtcaaactctataaaagtactatgtccattttatttacttgttctaattgtgtacatgtggtgatctcgatcataaatacgactccgctgtcggttggccaaatttgaggtcaaccatggatattccattccaagaagaaaaaaaacaatggtgacaattgatctcccaaatgcaaatcatttttcgctttaaaaaatccatgcataaagtcattgaacattaataaatactaaggtgtcttaatagaaataattacaagtctaatcagagcttcaaaaatgttaagagccctcaacatcgatctcttcaataaaatctcattcaactatattataagcttttctcaaatctagcatgatagtacaatgtggcattttattcttcctaccatattgttttactatgttttgacaaatcataatattataagttacatacctgcaaaacttttatacgcttagagtgtacggtgtagtgtacaaatgtcatgttagttagagagctgttatttctgttcgagttagttagagtgtcctaaccgactctgttctattatttgttttgtttagagtctgtatatatatatcctctcttttaattctttcccagttcaatgaaatacaattctttcttcttcatcttcttattgctaaaatggtattagagccactcgactgagtgtgctcttcgtctcttctgctttgtactcgttcttcgatcatggccagaggaggtggaactcagacccgcagtaccaccaacaatggtgattcgaattgtgtttctgttctttatcagagtattcgcagctctgccgctgatcctcacagtctgtatttcttgaatcatggtgataatccttttgttaatcttgtccctaaagttcttactggagcagagaattatagttcttgtcgtcgttcgatgatggttgctttacttgccaggaacaagatgaagtttatcaatgggaaacttcctacaccagatgaagaagatgaagattatgaggcttggacaagatgtaacagcatggtaattttgtggatcttacaatccgtctcaaactccattgccgaaagcataatgtacatggataatgcctcttgcatctggtctgagctacaggaaaggtttcaacaaagaaatgccccaagaatctatgaggttaaaagattgctgcagctgctgactcaaggttccaatgatgttacctcatactaaactcgcctcaaaagtctctgggatcttttgcaggaatatagaccacaactggtctgctcttgtggtgttatgaacaccatccaggcttatcacgatgaagacaaggtccttgagttcctaattggtctaaatgagtcatactccaatacaagatcccaaatcctcttcccaatgtcaacaaggcttttacctctgtcattaaaaaagaaaggcaaagaggtatcactaatcatcaacctgaaattcctaaatcgtctaatgaaagtgtaggtcaatttgctgggaatatgtagggaaaccgagggggcaacaatcagaccaatgggaaacctacatgctcacactgtggtattgttgggcatactgctgcaaaatgctatagattacatggatatcccccgtggcatcgtttacatggtaaagtgcctaaagatctccctaataaaccaagcaattaacaaaaccagcagcgtgatcgatcttctcaacaacatgatcgacccactgccattttttctgggctcattgacagtcaagaaggagatcctggagaacatgatttctcttctcaatgccagaagctcattgccatgttgacacataaagtgcaagagaccagctgtaacaccctaactaacataggcgtattacgtgcttttcaaacatgctgtgcagctcgttgctnnnnnnnnaggtttatggaaaacgtgattaattaa

SEQ ID NO: 29559 - DNA, 1215 bp, Cannabis sativa
ctttataagtcattaatgtgctgctattgcagcttgtaacccatgtgggagtactgagactaaccatttaacagctatatcatttttgcattataatcttaactacatcttaatcttgcaagtaaataacatccttaattctcaactcatatgtcaagtaaacgtgacaattttaattttataccccatacaatcttgaagcatcttgagattgagagttatagaggtccaatattctcaaactgggttagacaaatgcattctctcaaatatagacagagaagcatcacacttttcctctgtttggttgtttagaaaggttaaaaattgaaaatatgttgctgtggaaacaatggtcatttgttattcctcaagaatgtctaaaccttaatgttgggaaaccttgtttgttatctacctaccatacttacagcatctcactttctgtgattgtgaagaaatgaaggttttgcaactgtcctcatgtagtgttggagtcacctctatagatatgggaaacaatcaaaagagccttagtatatgggatctgcatagactctcagctaacatatctatagaagtgactaacattttctaaaacaaatatgcctacaaggatgactagattggcctaagattcaactcatgtcagaagtgagattggattatattcacccacattttcttgttttgacattttacctggcaatgtatgattcagttttaaaccttgccattcatattgaaactttgctgaagcctttcacttccagaagtgcacttaagaaaggctcatagtcatacataacaaaatgtatcacttacataaccatgaggatttaaccaaatgacaagcattagttaattgtgtaatgtaatgacctattaattatgattagggaaaggtgataaatgggaagtaaatctcaagtggatgtgccagagactcagttataaaaagcaaacttgatgatatatttaaaaccattttcagcagtaaaaatatcttaaagcttgatgattactgaaagttgaaagaaagaaagaaagatagaaataataataagaaaatatagctcaaaccagaagaattttatagctgttttgttagctgtaaatcataattgtttgattagaatgtggaattagtgggtattgaatgcaaaaaaaaaataaaaaattaaaaaattaaaactaaagttggaggggtgcgcc

SEQ ID NO: 29560 - DNA, 4838 bp, Cannabis sativa
tgttaaatctattagacattgttgagaaaccatgaacacgaagagcaaaggttaaagaaagaacagagaaaggtatagaagaaaagagaagaaagattgaatcagaaagaatgaattcattaaagtgagagtactgtaagcagtacttatttatacagctcttgagacaaattaacaacaactaacagattacaacagcttgtaacaaactaacaaactaactgcttttaaccaacactattagttgtcttaacaccgtccctcaaactcataattgtagcatcctcaattttgagtttggttcgaaaatcagcaaagcgagtgcttgaaatagctttggtcaaaccatctgctagctgatcgattgctgctacatgattcacttcaatgaagccctgctgcactttctctctaacaaaatacaaatccaattcaatgtgtttggttctagcgtgtagcacaggattcaaagtgagaagaaccgtgctaaggttgtcacaccatacaaccggaggtcttgccatctgaattttaagttctgaaaacagagaatgcatccatgatatttcagcagtaatattggccaaactcctatattctgcctcagtacttgacctcgaaacagtatgttgctttttacaagaccaagccactagattttcaccaaagaacacagcatatcccgacgtagaccttctatcatctggatccgaagcccaatcagcgtcacaaaatcccacaagatcaagagaggaaggtttctgcagatgtaacccgaagttctgagtaccctttatatatctgagaatcctttttacagcattccaatgggtgtttaagggattttgcatgtattggcatactttgttcacgctataggacagctcaggtcttgttatggtgagatattgtaatgctcccacaatagacctatagtgctgaacattgtcaactggttctcccccataagccgacaacttcaagccactagtcattggagttgaggctgatttggcaccatccatagctgctcgagcaagaagatccctggcatacttggcttgtgacagatgcatacccgtggaggagtgagtaacttctatacccaagaagtaagagagagggccaagatctttgagagaaaattgagtgtgcaagcaactgatgaggtgagacacagcagctggatctaccagtaacaataatatcatccacatagactaaaacaagcaatgttgatgatggagtatgttgaatgaaaagagagtgatcagccttgctagatagaaaaccaagggtttgaagactgtgttgcaacttatcaaaccaagccctaggagcttgtttcaagccatagagagccttatgtagcttgcaaacaagatgagcagaccctggaacctcaaaaccaggaggctgcatcatgtaaacctcttcttgcaactccccatttaaaaaagcattgttaacatcaagttgtctaattgtccatccatgagagagagcaagagtgagaacaattcgtatagtgacaggcttgacaacaggactgaaagtttcagtgaagtcgaaccctggttgttggtgaaaacccttagccactaacctggcctttaacttgttgacactcccatcagcattctctttaattttgtagacccacttgcagcctattgctgtccttccaggagggagaagcacaagggtgtatgtcttgtttcttatgagggctaggatctcatctgtcatggcactgttccattgagggttgagcaaagcttcttgaaccgtggcagggagtcttgataagtagaatgctttgggtttatggatccctgcctttgacctagttctcattggatgcgtgttggagttgctggttacaacagagggaatttccagagttacaccagcaatagcaggtgctgtaacatcagcaacagctggttctgtagcagtttctgtggctggaacagataaagaagggcctgctgaggttataggagctgcagcaggttggatagaaggttcagcagctggagtagagtccattgtgcttgtttgagttacaccagtagcctctcgagttacccgatcctgaatagtacctgtatcaaacaaggaacaaacttggccagagttgttagtagcctctgtgttggtgtgcaaatgtggtaaagaaagatctattgcatcatgttgatcaatctcaggtgtgagtgcaagatgatgagaactagtaggaatagtggcagtgggtaattcagttgattgagaaggaatagtaggagtgacagccactttggaataaggaaaggagttttcatcaaaaattacatcacgggatatgtacactctaccagttgagtcaagacatttgtaacccttatggtttaaactatacccaagaaaggtacacggtgaggacctgaattggagtttgtgcttgttgtatggtctaatgttagggaaacaagtacatccaaaggttcttagattggtgtaatcgggtttgatgttgaacaggacttctatgggtgatctatcatgaaggacaggagatggaagtctattgtaaagatatactgttgtcctaaaggcttcatcccaaaatttcaagggcattgaagcttgagcaagtaaggcaaggccatgttcaacaatatgcctatgttttctttcaataagaccattttgttcatgagttgttgggcaaggatgcctatggataactcctatttgttgtaaatgacttgtaaaagatctaaattccccaccccaatcggtttgaaggaccttgagctttttggacagttgcaattcggcttcagccttgaattgcaggaacatttttaaagcatcagatttagccttgagcatgtatatccaagtgaaacgagaatatgcatccacaaagctaatatagtagctgtagccactatgagataaggtgtgagaggccccccaaagatcagctacaacaagctgaagaggttcagtatacactgtttgagaaaattttggaaaggggaatttatgtatttttccaagacaacaagctgaacaaaaggattgagttttattaattggggaaatattacatgaggacaagacttttacaacagttctttcagatggatggcctagcctattatgccaaagatcaaaatcagtaaattgagctttattacattgactacacacagtattacactggacagactgtttggaaggttctgtagggtgtttctggtgtgtgttggcagcagcttgagatgcttcgggtatgagagaaaactgagattgatcaaaagtatataggccattcttgtgcctccccgtcaaaagtgtacgatgactcaactcgtccttaacatagcacatgtcatgatgaaattgaaaataaacattattgtcaagagcaaacttagatacacttaacaaattttttgtaatttcagggacatgcaataggttgtttagaacaagaggtttattagagtgctttgttaagaaatgagattgaccaatatgagtaatagacaaacctgaaccgtcaccaacatagagtctttcaagcccatcatagcttgtacagttcgagagattgttcacatcaggtgtgcaatggttggttgctccagaatcggggtaccaactctcatctgtaccttgagcagcagctgccagatttgcttgagcaactgaatttgaagctgtggcaacatctgtagtgggtgttgtaccaatcaaccctgtaaaggacttatcaaacctgtagaaacaggtatgcacagtatgtcctaatttcaagcaaagctggcactgttgcctgatgttagaagatgcagaaggtaatctaccaggtctattttgatgtatatttcctcgaccaaaaaactgattattaaaggaattatgattagagaaacctggagggggtcctaatgaagaaccttgaatgtaatttggtcgaaaggcattcttgttcccagaattagtgttgtatcgagattgttgctgctgtctgaaatttctgtaagccacgtttgcctccattagagcattgagatcagaatcttggacagctatatgagcactcaagtcaatttcagagtccttcttctcgattctcgactcagatgagaggagtaatgcttcaatctcagcaaccgagtaaccttcaattcttgtattggaggagatgacaaaggtgtcatattcactgggtaaacctttgaatatggcagctatgtgatctcgtgcactgagtttttccccaaccgaagcaagaaggtccaccatttgctttaccttaagaaggtactcgttcaacgacatccttcctttcttgatttgctgcaacttggttctaaattcaagaatcttggaagaaacttgaagagcaaagtgtttctccagagtatcccaaatctgtttggctgtattacatccaaccattctggttaggagactttcagtcatcgaagagaggagccaagagactagaagttgatcttgaacttcccagtcactataaacagaacttgtattttctagggcacgatcttcatcattgagatactgagctggaggttgatcgaagatgaatctttgcagcctgttacctttgattgcagctagaacttgttgtttccatagcagaaaattgtgatcgttgaggcgtattgaaaggctgtggttgaacgagacaggcgtgagagtgttaccatcggttgtagctctgtttcctggtagatttccagatctgttgttttgagtagtaggagctgaaatcgttgccatatttgccatcaatggaggaaagtcccgctctg

SEQ ID NO: 29561 - DNA, 1869 bp, Cannabis sativa
gggggggggggggcaaccaacgacctagatcagtagcaggcgtagtcttttctgtgcataggagatctctgttgctggtgttggttgggtagctattcaacacccaatctatttgtcgagccccttccattacgggaagattgttccatcttttatttctgttctcccaaatggcccaaagaattttaatcccctcctcaaactcctctttggatagcttatgtcgaatctccatgagaagatcaaacatagagtggctgtgactgtctcaaattagcttatagtaaggcagacatttccaaactactttagccttggaacaacaccataaagcatgagggagagattcaacatacctaccacactgattgcaaaggggatcaattgtcatgcccctatgaatcaagtttagtttagccgggagccaattatggcaaagcttccaaccaaataacttgattcggggggagttgaagttgccaccacatcttccaccaagcgttgattggatccatattcgaacagcgagtagggtgaagattccttttccgagccactctatatccattctttactaagtaatgcccattcggagagtaaagccatattaaggtgtcttccaattgcatatctacgagtgtacccaaaatccatgggatgtcttctgtgtggaaataatgatggatcttctctttattccactcttcttcgtcattcaaaagcgtgtgaacggtggtgtttggagctattcctgaatgtcgataaagtatagttccatttgcacgggggatccatttgtcttcccaaattcgaatcgttcttccattcccaactctccaacgagctccttctccaattatttgtcgaccccacataattccttgccaaatgcatgaagctcctggagggcaattggcttgaaggaaagaggaattaggataatagttatatttcaaaactctagccagaagagagtggggtttatgaatcaaccgccacccttgtttggctaaaagagcttgattaaattccgttaaactttaaaagcctaaatctccttcttcctttggcttacacaatttggcccaagtaccccaatggatcttcttattttcttttgtatccccccaccaaaaattggcagccaaggagtgaaggttatggatgagcttttttgggaggcggaaacaactcatggaatagctcaggatggcttggatcactgcctttatcagaatttctttcccagcttgggagaacatcgaagctttccagctttttagcttattccaaaccttatcttttattacctcaaacacctctttttttcttctaccaatgaaactaggcagccccaagtatttcgtgtgttgagcaacaagttttacccccaatcttcaagcaagagtttgacccgattggtgagagatgcggctgcccatacttacttctgatttttctagattgacttgttgccccgagagccgagagtattgatgcagaatttgcgacatagtatcacattcttcgatatttccatcaaggaacacgaagctatcgtccccaaagaagagatgtgacactttaaccccttctcttccaaaccgaaccccatttagtttaccagccctctcagccgcttggattaggcaagataatccttccgaacatataaggaaaaggtagggagatagtgaatcgccttgacgaagaccccgtgtaggcttgaattttcctatcttttccccattaattagcaccgagaaagatacactagtcacacatcgcattattttttctatccactcctcatcatacccaagcccttccatcatggtaacaagaaaattccactcaacccggtcgtaa

SEQ ID NO: 29562 - DNA, 1265 bp, Cannabis sativa
  modified_base (60)..(66): a, c, t, g, unknown or other
acattctctgtaataaatacactcataaatactaaaaactcgtggactaaggctcattannnnnnnaaccacgtaaaaatctcgtgcattaatctttctgcagctttcttatatatttttaaattggttgccgaaaacctcggtcaacacacctaaaagtaaactttctacttttacatttttacgtgaattattttttatatatatttttacggttttttttttttacagattttcacttgttttttttcaaagaaaaatgttgcttttacgttgttttgtcgtaacagtaatatcaaaacaattttttttcgaaaataatgtaaaacaacatttcgtattttttgtataaaaacacttcaacaaatttttttagtaccggcggaataggccatccaccagcaatagttatttaatttaaatttttaaatatttgtcaaataaaaaaatattattaacagcagaaatcccacctctaataacaagagcgggaatttgattgcctaaaatttcaaaatattaataccggcggattattagaagtaggatccactggtattaatgatgaattctgaccgttgcagcattaccgacggagacctaataaatatcggtgggtctcgccggtaatgttttcctataaattcccatctcctaactcagaaaacaatttttgttgttttcatttttgctctgcccctttctctttttatcctcctcctccgctcatttttcatccaaaaaaaccaccattctaccattgttaaccgtcattgcaccaccatcaactgccattccaccgctattttttttgacatgtaacttttttcactattttttttttatcatttgtctctttttttctgtttttctttttttttttttgtaattatctactttttatccatgctttaagtattgggtgcgatacgccggccgaaacactaacgggaattggaaacgccgaaagaataacaaaaattcgcccagaaaataacaggtttattttttttttatttttattagttttattttttcctttttaaatgtttagtaactggtatattgatttatatatatgtgtatggttgatagtgtaaattataaatacatgattttgtttatatatatttatatgtatatatatatattatatacttatatataatacatacataatatatatacatataatatattgcttaaaaatttaagatttgtatatgtataagtttagattataattcattatttgcaataatata

SEQ ID NO: 29563 - DNA, 953 bp, Cannabis sativa
  modified_base (778)..(780): a, c, t, g, unknown or other
tatgttcagacctttattttatttattttctagtaggctttgcctctttcagttattgaaactttttattattttattagagaaaaaattatattatattgaaagggaaataattcatacatattgtgctgaatgaccataagtaaatggcacgtacataatatgtacacaaattctagttttggtcttaactctcatattaagaagggagagtcactaaaatattatatatgtatatttatgttatattattaattctacatctaaagataataaatcataataagtagttggaaaaggtgatctctaatccttgtgataatgacacgaattggtcacctaatttgacaattaaatggtacatgctcaccttttgaaattatatgaagaatattggaattgactttttgacttttttagccatgcctcctttccatttgtttaattttattttctaatgtcacatttaatttgtgattaaattgttcttacctcatcatatgagtttaaaccttcttatacacaatgatttaaatgcaaatatatatatatcttatatatatcatttaaaatatattattgatactattagatgtccataaaatacttaatccaatttaattaaatttaattcacaaagggcggatatttgtacttgtacggattagattggattagaaaatttaaaattcgcagttatgctgattgaatattaattaacatgaaaataaccgatctatccacatatatttatatatattttaaaaaaattatatannnaattaatattttaatataaaaatataatacatattatacaaatatctttcaaaaatatagtatatcaaatgtatatttcattcttatttataaaaaaaatataatctaaaacaatattataaatttatacatataattcttttggtcttactttaaatttgtaattttttttt

SEQ ID NO: 29564 - DNA, 1778 bp, Cannabis sativa
  modified_base (839)..(847): a, c, t, g, unknown or other
  modified_base (915)..(915): a, c, t, g, unknown or other
gagaatgatttggtacatgtcataatttaaggggcaaaattttctaattagtctttttttaaaggtctttagcttctgatacaaatttacagtgattgtaaacatatcagtctttaagaaatgttaattgtaaacgtctaagttgatatgaaggcaacaaaaaatattaaaattttaaggcatgctattatcaaccaacaaaatactttaaaagtatgtttagtatcttgaaaatcaatatcaagtaacaatataacatgtagcaagattaagattagcatgcaattgtaatatacttatgaattgattacggtaataatggtttacagtaatgttaagtgtgattatattatcaatattagttttttttgatatattttatagtttattgtctgtgaaaataacatgaaaattataatattaataacaacaataaatatgtagcaaaattatgattatcatgcaaattgtactatactaatgaattgattactgtaatggtggtttatagtgtatgttaagtgtgcttatattatcaaagttaatttactgatgttatttatagtttattaaatctgaagataatataaaagttgaatgccacttttatatatacattttagtatatgaaattatagatataaaaatagggatatgattttgttccgttattgtacttttacggattgtaatccgtgatgtacggcagccgtcagatgagagagttatttgatctgacggttgagattgatctaggtgtaattagggttaaaaaatagaaacgtaccctgacactcatttaatataccttgaaacccatttaatgtaccacggaatannnnnnnnnaaagtacatcacgggacaaaatcatatcacacaatcaatatacaaatttatttaaaaatatatatatntattttttttttataaaaaggtaactagttagtatattattaatattattgttaataaaagttttcagggaaatatttaaaaaaaacaaaaaaaaaaatttgaaatttagactttttttttttttttaattttttatatttctatacaattaagttgaaattaggttatataaactgatgtggcacaatatttttaatatttaatttttttgtaatatttttataattattttaaatttgatgtatatttatgtaaaatttcctaaaattaaaagcaccacattcctcaaatgtgcatatataaacattttttttttgttcaagatatgatagatagaaagatggaattcattgaatctatatgtaaaacttagttctatacttcgtcacatacatcagattctcacaaaatgaccctcctaattttctataataatttacttcgtaaatatatatatatattatataaaattatcaggaaaaataagaagaagaagaagaagatgatgatttttattcatgtggtggagatgagatgcatggtcgtggctaagtttaactcctccctttgatccttttgaaagcgacggagacacaaaaagctacagcattgactgtgagacaatgacttacttacccccgtcagtttccgcaggcccattccacagtcaagatttacgccccctcgtgtaattgtgggccaccctcttaggcccactttaagaccccaaaccacaacaacactccatacttacctgcttccatcgccatccacacccccaccccacacgtgtgtcattaatcccccattctcatccaccctttttctttttttctttttattttttcacttacttgtttct

SEQ ID NO: 29565 - DNA, 1856 bp, Cannabis sativa
atctccaaaaatcgtgcaatttcacggggacaaagccatcaccgttgtgcattacttttctatgggacacgttgagagaaaaagtagtttacatgcactaacaaccattttaatcgaaatagtgaaaatttcacttttctgatagcagtacttttttttgaagcaaacttacaattgattggagggggagtatttgaagaaatgagaattagttttctgttaggattagttagttgattaaagttgttattagcttgttatacttaactaactttgtttgtaactaattctttcagtacattccttgataaactaccgactgtgtagttcattcaataagattgatctttgatcttctaattctttctctttgttttttcctctcttttttcttctttttgatgttctttaaacatgtccaaaagatctaatagtaatattgtgttgctagcattacaatttacgtgcacaataatattgaatgcattattaacacaatattgtagcatgctagctagaaggaactggtccaaattaggtgtaaacttggataaaatgagtaataatatgtgacacaaacttaaaatatattttgcctaagaaatcatcacttttgacaagtttagattcattttaaataaataaaattgcaattatatttattaagcattattatcatttattttaaagtgttttttttaatttaaaaaattaacttttattaaatcaaatcaactaccaaagtagattccaaattagctgggatataaccctcgagaaatacagctagaagtagaactagaagaacgagctaaacattataccgatatgacatattataaataataattttttttttatattatttattaaatctaaattatataactcaatattaaattacaatatttctcttatttatataaaatatacgaaaagaagtgactttataaccactcttcgcctcgttcttagattcaactcctaaacccacttctatctaggcaggccagcacatccatattccttccaaggcaataattttcttcattacccaattttatacaccaaatcattaaccccaactaccttatcatcacatctttctaacactgctagctgcatatacatgaaaatgatcaatgttaataataataataataatcaaaccacatgataattaatattgtttaatcaattacagacacaatttcttggtctaacaacctttgtttttatttgtaccaaacgttgcggtagttgcttcatcgttatttgtatatacacgattcaccaaaacctaccccactccccactttacttcatttttaatataatagtacaaaagctctaaaatatttagtgtaattctgccataaatcagtccctttcattttggtagtttacgtaagatagcatttttgttcaatttattttttatgattatatgtttcttacaattatttataatcacttataaatctttaaaaagttttaaataatttataatactaaaaataaatttaaaatattttattacatgtataattattttttttatatatagtaaataattatttaaacttttttatttttagtatggtaaattatttataattttttaaaaatttataaggattttatataagtataacgtatatgattataaaaaaaaattgaaaatctctcctaaataaatagtgtactaaaacaatattttaaggctgcaatatagatttttctaatattgtaaaaaacttaataaagaaaaatgttagggggcacagtaaaattcaaacaccacaagaggaagcatattattgtaggtacatttttaatattggtaactatatata

SEQ ID NO: 29566 - DNA, 2947 bp, Cannabis sativa
aagctcttgtcaaatctgtaaaaacagtcaatgacaacatgaccaagtctatgacagagttgacactgaattctgtttggtgcagccataggcggacctaggggtgttgagggagggctaaagcccactttgagatttgaaaatatattaatatacaatttttgttttcatatatacatagtagttaaatagaataattggttaaagatgctttaattttacatgggagaccatgttttgaatcccattgcccttttttctatgtgtatctactttttatttattagaaaaaacaaatgaagtataaggttcaaattaagttcaaacttatgaccactgcaataggaggatgttgctaaactatcattcaacttaaatttacctatttatttattattttggattatattaaatgtataactaagccaaccctaaaattcaatcctgggtccaccactgggtgcagcagggaatcgacctcctcgacctcttgccatagttgtggcatgtgtatttgtgtggcttccacgagaggagcttcctcaaaaatttcctcttatgttagaaaaatttggagaattgaagttgttaggccaatactgagctctggaataggcatgggatctgtagtttcgattagtttgagcaaagaatgcttccatagttggatcttgatctgcagtagccatattcacactaggttcaacttcttgatcctccttcttgatttaagattcagatgcaagaaataaggcttcaatttccccaactgcatagccttcaatccgaatatttgtggaaatgataaaagtatcatattcacttggtaagcccttgaaaatagcagcaatgtggtctcgatcagataaaacttctccaactgaggctaaaagatcgacatgttgcttgactttaagaagacagtcattgaggttcaatgtccctttcttcagcttctgaagtttggttttgaactcgaggatcttagatgaaacttttagagtatagtgttgttcaagagcattctagatttgtctcgctgaattacatcccaccattcgagttaataagctttcaaacattaaagataggagccaagacacgagaagttgatcttgaacttcccagttcagaaactcgagattgaaatttagtttagctttgtctgcatcactgagaaattgaggaggaggaggaagatcttgaatgaatctctgtaatctgtttccatgaatggcagcaaggatctgctgtttccacaggagttaattgtgatcattgagcttagtcaatatcgtgtgattgaagtagataattgcatcttcttgatctctggttcgatttcttagagctggaatcagaactccttattgagcaacttgagagcttaagtttccaggaccaatggttgccatgttcgccattaatggcggccatggctctgatagcacgtgagaggtgcttgacctcttagccattgaaattgagcgcaaaaaagagagaaagagaagaaaagagaaagaaagaaagaggagagaaagaagcctcttctttattattgattaagcattagtagttacaggtttgatatatatacataacaatcaagagtaacaaacacctaaccgacttaaccaactagagacagttggcagctaaccaaacctaacaacaaactgaattaatagactcctaacaacctgtcctaatacttcgtagttgcaagaacaatttatgtacgaaagatggcacctaaaagaagaagaaaataaagtggagaaaacagtttaagaagaaagctagctacaatcgttgcaagccgaatcgacagagattttcctgcatccacaatcgttgggttaaatgatgattgcaaaatgaaaattgaacttaattgttagcggaggaagaggaagaataattacagaatcaatggcgtcatttaaccctaacgtaagccaccacattgacccaatcttggatcgttatcctctcctctttccctgtcgtaccgtatctcaacacccagatatggtttgccgatctcttcaccgaagaattgtagagaagaaagaagaattacaagaaatggggatcacgaatggaaagaatgatctttgatttcattcaaggattgaaaatcgttaagagaagaaaaaagaatcttttccttttagggttgaattgccatatattatttctatcccaatattagttttgtatgataataataataagttaacagcgttagtgataatgttaacaaaaataaaaagtaccgttaaattaagaattacagttaaataaccactttaaatatattgaagtttgatattaaaaattattcaatttattacggcacatgacacacatcatattatttgaattaagacaacgcatttttcttttgttttgctaaattttaaaataattacctaaaaattttcaaacccaaacaaagaaaatacttcgaattcaatgataatttttaccgccttatatttttattcttcttggcttaaagttgctttcaccactcattcacatctctaatatttgaagtttaagcattgagttgattaggattataattaacaaatatgcattagcaactcaatttgaaatatcacgatgtagaagggtcattttcataaattttataacttagaggcccagtttgcaaataaaagcttcccaaattctttcctttttttaaattttttccaaattctcagtgagctattaggactttctttttcgaaattcaagaagtggactaaaagaaaaggttcactttctcattcgcaaatcgatgattgtaaacaacaaacccgatcgaaaccgttggtgtataaaaaacagtagcgagtattaccacgcgcatagtggagcgcgtatgtttaatggtcttgacttgagcttctcggttagaaataaaagtattcaa

SEQ ID NO: 29567 - DNA, 3850 bp, Cannabis sativa
  modified_base (3791)..(3791): a, c, t, g, unknown or other
ctccatagacaagtaaagactaaaataacaagaagaatgcataatacaagctcaccatgccaacgagaaaaggcgagaaacaacttacaaggcatggactacagcattaaatctaattccaagatggagaaaggaaggtttcaacattaaacataactaggtatgaagaagggaagtaggtggttcgaagaagagattgtttatacgctacttaatggccaaaggatgacatatcccaccacagtgaaattgtgaaatctcatattgtcaacagaacgatatacaaaatctagcccgtgtcatcaaatacatgcataagaattatcttatcttaaaaggttgtctggaaagcctctcactgtcaattttcaaaagcctcaccaaagggagaaacaagcaaaccttccaagtgataatttataggaaaaagattaacattttattccaatgtacaaagttagtgaaacattgaaacctcacctcatctcatttttgaccacgggagtaacattactgaagcttctattccggggaggtttctcctcatcatcttcatcaggatcagaatcatatttttcaccattccaaattcggtgttttggtctatgatcaatatcttcttccacctacaccaacaaatctcaaatttaaggtcactataaacatattgaagaggtaccatcttagggaatgatggactgatattactaaatactcacttcctctggaacttctgtggtaggtggtgttgtctgaaaaggtacactaggggcatgtggtaatctagaaagctgttccagcaaagtattcctgaaaagaaaattatattataatagcagtaactaacaggaaaaagatattgaactggtttctacctaaatatgtgtaaacattattggaaaggagacaaactggtgagtctactccaacaccaaaaaggaatcatcaatgtaaaagtaatggtattggaaaatctaatctttgaacattataaaagagggaaataaaacttattggtgatgttgggaatataggaagtatgctacacaatcaatgagatggaaaccatctgacaacaactaagttcaaagtactataataaaaaaaatgaagagaattcacagctttaatccaagatcacaagatcaaaataccctctttgcttaaagacattgtttggctctattaaagtatacactttatatccagagaaattgttaagtcaccgcacaaacaaaaaaaaatgatatggcattaggaaacctgcaaaacttaacgctcttgcttcacagtcacaatgatgcacccttagacatttgttattccacacttttgtttacccctaaagctcttctataaaataatattaagttactaaacaagtgaaggtaataacttttattaccttatcttctccatatctttgagagtgtttagattctccatgttgcaaggttcaacatgaagcgtgtagtctgggccaaagtactcatagtactcgttataaggcaacttattatctggttccactccgactgcaactgctgtctgcaagaaataagaatcaacttcgtcaggaattgaacaaaagtaacagatggtagcgaaaagatagagataagaggtaaacctcatagcaccagcaacgagcaacattccgtattgtgtatcctccaccacccaagaccatcagagggacattaaaagacctcagaaatctgaggcaatcagcatggcctttgacagacaagttgaagcaccccaatcgatcaccagataaagaatctgctccgcattgcagaaccacggcatggggctggtaaacctccatgactttttgaatgataggccgaaaaagaccacgaaaattctcatcatccattccatcattaagaggaacattcagtgcatagttctttccaatgcccactccagtgtctctaatgtgaccagtcccagggaagaaatccccaaacttatgaaaagacacagtcatcactctgtcagtggtgtaaaatgcttcctcaacaccatctccatggtgcacatcaatgtccacataaagtacacgctgtttgaagacaacaatggtgttacataaattattgttcatgaacaaatattaaaagaaaatgagttgaaacgaaatggctttaatcccataaaaactaaagctaaaatgtaaagtaaaatatgatccttaacttgcagcaaaacaatcctaattcaataagaaaacaaagacagcaaagcaatcataatttatctttaacaatataccctattcaattctaaaccaataataatcaaaacaaccaataacatcagtcaaagaagcatcaaacttaatcctagaaacaaaacccagagaatgtagagacatagttcaaacaatgctactaaatagaaaaatcagtctactctacgatcgtaattgctccaaaaaaaaaatctaaaggttacttttatacaaatgaaagcaggggaacaatactaaacataacattaaaattagattaaaaagaaaaagcattaccctgtgaaccttgagcaactcaagaataccgagcacaatatcattgacgtaacagaaaccagaagcctcagacttcttagcgtggtgcaaaccaccagcccagttgagagcaatatcagcatcgccacggttgagcttgacagcagctccaatggaaccaccagcggaagcttgacagaacccaaaaagtccgtcaaagacagggcagtcctctccgacattaaagcgcttcagatggcgagagaaggtgtgctcgcccagtgtctccggagagacggaagcaagaaaatcgacgtagtcgtcggagtggaaaagacgaatgtcagcggggtccgccgggaaagggcggttgatctccatgcgtcgatggaggccgtagtgaacgatgaggttgtgagccatacggattctgtgaggcttcatcggatgtccttgaccgtagtagtagtctccgatagttggctcgtagaagtaactgacgcgcctcttcttcgcgtcccgacccgacggcagtgacgcgcctccatgaatatccgccatagctctcgatcgaacccaggtctctctctctctctctctctctcaactgaaaaagcaagaagtctgtaattctttaaaaaaaatcaagaaatgtgtttaaaacgaagaatactggcccaaaactgctttaggcccatatcctaatacacattttttataaaataattacaaacataccaatttatattattttcttaaaaaccaagtgttgattgatgtaagttaagaagatcgtaaaaaataagagtactgcgatgaattaatttagctaaataaaatcgcgataaataaaaaagatatgagggatttatagtagttcactaccatgtcgcgatagtaatagagctacgtctactttgtttttattaattgaatctgatacactaaagttatattctcaagagtgtgtggaaaatagtacaaaaaagatttctaagtgaaatctgtatcgagacttatgaacacaaggctcatgggagacccaatattcacaaatctgataaagatagtggttgtaaggtccttaagagcaacaaacctataagacactaccacaaaaatagatgtacattcaaaggtggatatgagttatcgttaaattcttaaaacaatcactctagatattaaccttatgcaaaaaaaaaatgaaatgtttgagaaatttcatgaatttctggcaaatagtaacaataattaaggtaagtggttaaagatnttgcgaactgatggggtggagaaatatttggttatgcagttcaaagatcattaggttga

SEQ ID NO: 29568 - DNA, 1343 bp, Cannabis sativa
tgtcctcggtttggtcggtttcttagattatttgctcaccactactccgcgctcgactatgttgtctgaagagatttgccatcgcacatgaggtcgcattctgatgtatgtgttttgctttgtgtggcaggtgtcttgcttgcttcggtgtagtttactacttcacagtgacctttccaacttcatgaggtattgtgtttactccttttctctttgttttcattgttcacgcaccatgcttttagatttcttgtggctatgctcagttggttatcttcattatagtcgtaatttactagttgtctcacatgcgctctacttagggcatatacctccatgtgttatatttagtgaacttagtacctctatttctcttaggtaagggcgttaaggtgttgcgtctcattgaaccagttcatccctgtccttatttagaggagacctcaggaaaggatgtctttggtggccgatgttattgatatatcgtcttctgactttgagggtacttgagaaaacctatatgagaagtatgttacagagggcatctagggcacattattaactataaggaacgtgaagagagggttagagatgaaatttattaggttttgagtggagagcaagattgtatggttactgactccagagtgtacctttgtaggcttagggcatcacttgtcgaaatttagagtcacttgaggtaccttaagagcacctttccccaagagcctggtaccccgtcctccttcgaggttttcgtatccactttggatgaggagcttgaaatcacacccatttaaagctttgacgcacaagaattccagggaaattgaaaatgcaaggctcgcgcataccatcatttttgtgtatttgcaggtatggctcctcccaaacaatttgctcctcctgttactccatgcaaacgttctgcctcttcttcatccaagctaaatatttgtactttgcctaatgatgtatccttcgtctatgcgagtattaggagcactatctcaattgactcaagccctagccgaataagtacgtcgtccagccccgtaaagggaaagtggcctttagcgcacacatcatgctagtcgacacagttctacctctccacccattctttatcgacatattagcctacttcggaattgccccacttcagcttcccccaattgcttgtgtccttttgatgagctttgccatcgccttcaagggggtgaatggccgtttcccttcggccacaaaagttcattttgtttataacatccaacattccactaagtttcctggaacatatcattttgccaggatccactctaccaagatccaaggtgttgcca

SEQ ID NO: 29569 - DNA, 4810 bp, Cannabis sativa
  modified_base (3899)..(3899): a, c, t, g, unknown or other
  modified_base (3947)..(3966): a, c, t, g, unknown or other
gtcttgggtcctgggtcctgggtccaaatccagatcttggaccaattctagctcatgtcgtgggtcctagtacgggtcttaggtctaggtttaggtctacgtttgggtcttggtctgggtctgggtctgagtttgggtttgggtctggttttgggtccaagtttcagtctatgaatgggttcaggtcttcgtctgggtctgggtttgggtctcgctccgagttctgttacgggtctaggttatagtcaaagtcccaggtcaccggtcctgggtttcgagtttttgggtcgcaggtcctggcagaagtctgggtttgggttggggtctgggtatagatcccggtctaggttcgggtccgtgttcggttactcgtctagatcaagttttgggtccaggtccaattcctggtccagggtcccgattccagtacttattccgattttgggtctcgagtccgattcagggtttgggtcctggtatggaaatggttcaaggttcgggtgttggtatgattccaagatgtggacaccgactacgggttgggtccaagccccgagtcgtgggtcaagatctgaatcccaatcttgggtcccagtctcattccgattcagatcctgggtgtcggtccgtgtccttgttttggtcaagttttgggacagagaccggggtaaggtcttgggtcccaatccctatcctgggtcccgattctggttctaattttgagtttgggtccccaatctaggtctgggtcctgggcccaggtctgagtctccaatcccggtctgggtcctagctcggggtatgggtccaagtttgtgtctgggttcgggttcgggttcgtgtcagtcccgatctgagttttgatttgtgtctgcatcctggtccgggtctatgtttgggtcctagtcagattccagttcctggactcaaacacagtctcggactcggacctaagtctgggttgcgggtttgggtttgggtcagggcccgagtcttggtttttgtttgagttcgggtatgggtcccagatccaaacacttactactgttcagttccaagccctgggtccaaatctggattacagtctcaggtcccagtctagttccacttcaagccccaggtccttgtccaggtcctaggttaggatcctagtccagctttggggcttaggtctcagtcctagttctaatgcccgtgtcctcggtcgaggtaccccatccatgttcgagtcctagatcccggttcgagtccacgatccaatcggggttcaagtcccggtctgagtcttggtttgggttccgatctaggtttgtgtctagatctgggtttgagtctaggtccaggttcaggtccgagtcccaagtttcgatctaggtttgtgttccgaggcccaagtctaggtcctccatccaggtccaggtcctaggtcctgatcgggatccatgttcgggtttgggtcctagtcccagtatcgacttcgattcaatgtttgggttggggtttgggtcgaggtatgagtcctggtctaagtctatgtccgagtctgggtctaggtcaaaatcccagtctgggtctaagttcgggtcaggtccgagttcgggtcctaggtgcgagtcaaggtctgggtcagggttagggtcttagtctgaatttaggtccagagttttgatcccggtttgggtccaggtttgggttcgagccaggtttgtatcgagatccctatctacgtccgagtctgggtctgggattgggtcccaagtctgggtccttgtctaggtttgagtttgggtacacgatagtgactgggcccgagtttcggtcttaatttgggtctggggctaggtctgagttcagttctaggtcagggtccgagtcctagtcatggtcctagtcttgttcgagggtcctagtttggaagttgttgtacaatttctaatttcgggtctcgggtctgggttttggtcctggtctgggtttgagtccttgcctgagtcctaaatctggatacctgtcacttgtcctgatttggttctagttctggtcctgggtcccaagtctgagtactggttcgggactgagactgtggtgcgattctactccccgaccccagttctgtgtcccgagtcttgttccatgtttgggtctgagttcgggtccaagtttgggtcccaagtctaggtctgggttgggatccgagtttgggtcccggttcgcgtgtaggtttgggctggagtctaggtcctactctggttacggttccgagtctaggtccacgtccggttacggttccaagtctaggtacaagtccttgtttcggtcccgttctcgggtctcggtctacttctagttttggttcaaatttcagatcacatggtatggattcaggtccaagtttgggtctgggactgggtttgggtttgggtttgggttcgggtccgaggctgggtcccagatctaaacacccactatgggttcggtccaagccgtgggtcttgatctggatctcgatctcgggtcctggtctgcttccattttgggtgtcggtcacgagctgggtcctaggttcatgtcctggtctgcggtccggtcttgggtcctagtcctagttctgttgcccaggtcagtgtcctgattttgggaataggtcccactttttttctaggtttgggtcccgatctaggttcgggtttcagtttgggtctccgtttgggtttttattttggtttgggttcgagtctgggtcctggtcctggtcctagtcatagtcctagtcaagttccagttccaattgcaatttcgagttcgagttgggtttgagttcgggttggggttcgagttcaagtctgagtttgggtttgggtccagatctcggtctatgttcggatcacgctttgggtgtgggttagggtcttgggtctgagtctaggttcagatccgagtcctaggtttcgatctcaatctaagtcccagtttagttttgagtctaagtccagggtttctatcccggtctgggttcgagtttggatccgggcgtaggcctaggtcttggtgtgattctggggatgggtttgagttcgggtctaattttaggttcgaggctgggttcaagtttggtcctggtaattgttcgtgtccaggtgcctaccttgtttgggtgcggggtaggtttcgagccctggtctaggtctgactttggattcccaggtctaggacaagtcctggtttgggttcgagtcccgaattttgatctgggtttgggttccagggcctaggtccctggtctaggtcgcccatccaagtctaattactaggtccttgtctaggtcgaggttcgggttcaggtcctaagtcttggtattagtccaggtctcgctctaggtttgggtccaggtctcagtccaagtcttggttcgagttcaggtgtgggtccttgtcagggtttggatcttggtctggctcccgagtcttaggtcccagcgagggtttaggatcaggtcccagttcggctctcggtctagatttaggtcctaggtctcaggtcctagtcgtagtcaaggctcggtacaggttttggtccgagttttggttatggtttggattcgattctggtctcaagtccaggtcctagtcacagttccagttctgattctaggtccacattttgttccgggtccgtgtatgggtccaggttggggtcggagtccgagtcttagtccgagtccgggtatgggttttttggatcccggtctgggtctaagtttgagtttgagtccaggtttgggtcctgggtttgggtctgggtctctgtctgggtctaggtccaggtcccatgtttcgaccctggtctaggtctgggtcggtattcaggtccaggttgaaataaatcatgtgaaccatgnaacattaaatgttatttctgatccttactaataagtaaatctgattannnnnnnnnnnnnnnnnnnnagggcataaaacccaacaccaggtcccaatccaggttcagggctcgatcctactccgggtctgagtcctagtcctgttctcggtccaggttcaagtcctgggttcgagtttagttctagtacgagtttgactctaggtctgggtctaggtctaggtctgggtttttgttcgggtatgggtttgggtcttcgtctgggtctatgtttgggtcggggttcttgtacgtgtctgggttcttatccaggtcctaggtcacggctgttgggttccatgttctaggtcgcaggtcctggcacaagtccaggttagggtttaggtttcggttcgggtattgatcccaatctaggtccgggtgcgtgttcggttccgcatctagatcgaggtctcggtccaagtctaattcctgttccaaggtcctaattctggttcttgttaccatttcgggtcctgggtctgagtcttggtttaggtcgtagtctggaaatggttccaggtttgggtcttggtacgattctaagatccagacactgactatgggttgggtccaagcaccgggtcatgggtcaagatctggatcccaatcttgggtcctggtctcgttccgattcggatcctgggtctcagtctgtgtccatgttcgagtccgggtttgggacagagaccggggtcgggtcttgggtcccattccaagtcctgggtcgtgattctggtactaattttgggtttgggtccctaatcgaggtctgggacctgggtccaggtctgagtctccaatctcaatccaggtcctgcgtccgagtctagatccaagtccatgtctaggttcgggtttgtgtcccgagtc

SEQ ID NO: 29570 - DNA, 1842 bp, Cannabis sativa
attcaaaaagcttacatcttttaaatacttggcgtaattgctcagaagaagagaattccccggattggcttcgatcattttttgataatacacatcagtcccataatccgaatcccaagacccagaattcccatcatctccaccgttggatccaccattactaccacccccaccacagattttcccaccgccaccaccaattccacctcctaccaaaacgctcaccaacccattacctctggatccaatataagactcttagttttgcgagctcgaaaataagcccaccccattatccaatggcgccgtcgtagcacacttaagcccataacacctgtcatcctcctcttcctctgaaaaaccatcaaggattttgtcgtaagacttcttctttggcaccgagaggtcccggagatcggtctcggagaaagcccgcgtcatcttcgccgtagatgaatccctggccggcgatgttgaatacgaagattgagaagaaggtgaggagtaggatgaagatgaaagggagagtgatatggaacggtttctgggtacatggctagctatctcagcctctgaacacgaatcctttgactgagacgaaaaccattgattcaaaatcggagttgacgagcttcgtagaagcattttgtttacaaagaaatttgattaaaaatgaaaacccagaatcgatctggttttagagggtaaaatctcagtctcaaatgtcagagtaggttgagaaggaggagacttggtgatggtgcttttatactcgagaataaggaagaagaagggattcaatctcagccgtcgatatttcgggttatgttgaagacaatcaacgacgcattgtgaagcacgtgctgtatttgatggttcactgccctatgccttgtttgtttggcttcacaaaagagcattgcaattatgcggcaccgcgctctttagtaatatttattagagtaattaacggcgaaatctatttatgttttaatttttatacacttaattcttttattttttttttgtcgcaaaatccccttatgttttagttttaatacacttaaccctttatctttttttttgtggcaaaaccctcttatgttttagttttaatacacttaacccccttatcttttattttggtggcaaaacccccttaaatttacttttctttgcaaatttaaagttttagctagatattaccgttaaatactaattggattaaactgtatcgacttcgaggttttaccgttacatatacacaggtgtatacaatggttactgacgtgtcaaatttgcaaagaaaaagaaacataagggagttttgtcacacaaaaaaaaaagataagggggttaagtgtataaaagttaaaacataagggggttttgccaccaaaaaaaataagtgagttaagtgtataaaaattaaaacataagggggttttgccgcaatttgctctatttactaaaagttatttttttaaagtatatgagatctgatattcaattatactgataatagtatgtgaatatctccaataataatattttgaagaatacttaacaaggtaaaagtttaggtgacaaaatataaagatgaagaatgcttgatgaggtagaaaatttaagtgacaaaatataaagatgttataccattgaagattaaagaatgctattcttgaaatttatatggcattgatgctatatttttttaaaacaaaaaattaaagagaataaataccgttttggaccttgtattttgtcaaagttactaattggaccttttttttgttaaatgacaaaatagatcatgtattttctaaaatggtacaaatatga

SEQ ID NO: 29571 - DNA, 1200 bp, Cannabis sativa
aagttcttttcaatgaaaagtgctttttaaatgattaccgagggtatatttatcataatccaatttgaaaaaattcatgctttataatttggcggttaatttttttgaagcacatcattagcattaatgagccatcatttccacttctccctcatttctatctgttggatctctgtattttaatcttacggtaagtaagccgaagaaccattttcccaccattttttccttttcaaataacttcaagcttttatgcgaaaaacccattctgattttttgaaaccttgcatgccctcattgtcgttgacatatttcgtgcaaatttcctcagattcaatcttcaatctcagacgtccccatagttcgttcagtcgtttttctcaaacccaaatatgaaattttcccctgctaaggcttacctctttaaccaataagttttcattctcttccttctttgtgtattttttagtcataactaattgcatcatcattcttttttctttgggttcgataatttgttatttaattttctgggtaactttttgggtttagatgaggtaaaaacttaggtttaccatatttatatgtttctcgttttaataaatttattctaggaatagggatttctcttttcatagaaatgtcccaattttgttctcaaacttattctctagaattcttagaaacagaatgtcccatgaaattagccctcccatttaaactaacaactaaaagcctctagccttactggaaggaaattatgcaaagattagggaccatttaataaaaataaaccaagacgaagtttctagtcgttataggtgattactgcatgagatatccgagggtaaacacaattttttacgagacgcggcctcgcctaaacctccctttttatcttttattatgcttgcaagaccaatatttttacccaaactcactgttgctttatccctaggtgaccttgaatgtgacattatgtcagttaggcctcgtaagtcaaagacccctcaggatgccagagtcaccttcgtggctgaacttattgaatccaaggttaggtcaattagagcatatgttaggggcatactaaaatccagtggtatttaacaaagccatgaatgttgcattaggtctgttgctcctggggaattcaattgctttccaccagaaagagtaattcgtgcggaatgtaggggg

SEQ ID NO: 29572 - DNA, 1979 bp, Cannabis sativa
tcattcaggaagtctttgaacactcaattcatcaggtccataaatgtcgctagggcatttgctaatccaaagaacatcactaggaattcataatgcccataccgagtacaaaaagcaatcttgggaatatcctcttcttgaatcctcagcaggtgatcaccaaatcaaagatcgatcgtagagaatacagtcgttccatgaagtatatcaaataagtcgtctacccttggcaaaggatacttattcttcactattaatttattcaactcttggtagtcaatgcacatccttagtgtcccatcgttctttgttacaaacaaaattggtgcacctcaagataagatactcaccctagtaaactacaaatccaacatatcttgcagttgaaccttcaattcgtttaattatgtcggtgccatccaatatgaggccttggaaacaggctcttccttggtatcaattcaatctcaaaatcaatttctcgctttggtggtaatccaggtaactattctacaaatacatcccaatattctcgtaccactagaatatgttcaagtcctactactacctctctcatggtatccaccacgctagctaaatagccgatatatccatcccataaaaaatctcttaccttaagtgtcgacataattagaatttgagatcctttaacctttcccacaaacataaatgggttctcaccctcaggtttcaatgtcaccatctttctcttacagtcgatggttgcattatactttgctagccaatctagtcccagtattacatcaaaatcttctaagtagaacttgattaaatccactggcatttctctaccctccacgtgcaatggaagagacctaacccacctgttggagataaccaactccctactaggcaacaaagtaccaaaattgtttggtaatacatcactgggcttattcgaactattgattcctctactcgatacataagaatgtgtagcaccaggatcatttaaagtagacaacataataacatcaatataaatctgacctatcatggtagaaggacaagtatcagcctctgcttgactcaaagcaaacacccaagcaggaactagaacatcttttttctttgttctagtctctgtaactacgaacaatttctcttcaagtggcctactactcaacattggaagcaagctcgatcttgaaatttgccttgatgtcatcttttgcatctaagacactgaagataggttctctagttttagctcccacctcagtggaaacattgattaccttgaaaatttttattgggacccgtaactttccttgtaatcatcaaggtcaacacccctaccgggaccaacattgggggatgacctccaaggatctcttcttatgttacttttctttcgaatcttatcttcaacaccctcagaagtaagggctaactcaaccacttgagcataagttcgaacaaaccctagttgtttagtagctaaaactacatcccgagtaaaatgttcttccaacccctatgtcctttctatcagcctcagtggccacttcatcgtatgcaaacatagccaaccgatcaagttttgtggcatactcaaccatcatcatattgccctgagtcagccatatgaactattctaacttagcagcacagatagaatcattgtagtacttttcatagaataaggtccaaaatgtatcccatgtcatgttctttagatcatgagcttgggacacgatttccaaccaaatatgggcatcctcccgtaacatgaatatggcacaacaaactcgatcattacccttgactcacataaagtcaaagatagatgttttcatgctcatccactattctgccataagtgggtcagtaccacccttgaacactggtagattacgctttataaattgttcatacaacaactccaaaagatttcccacatcctgcagcacaaccagaggtgccaaaggaatagg

SEQ ID NO: 29573 - DNA, 1315 bp, Cannabis sativa
taaatacattaatccacaatttacctttataaaataaattatttaaaaaatcataccactttacttatagataactaaaaaaaaccaacaccttaaataaaactaacaatatatggctcgacacgtaacattcatctagtattaacaaaaatatattgaaattatgcaatagcttattggacatagaatacaatagactagtttaataaataagaacagtatataagttactagaattatcactgacattttcaaatgaaagtagcaactctcaaatattctctcctagtagatattgttgaatattatgcacaataaaccgaacttgcacattttttatacgacattgagtggtgggctaaatatcagacggatttgtcagttttgtaaattttgaaggaagatgatgtttcatttcctgatgatagtgataggatgagtttagttttatatgatgaatcatatttatctacagatattcaaaagagacagctaaaatcaagctccattctctttcatttggtggaggatgtacagttcttttatatgttgccttcattattgcagttttgtagtagtcggcaacatagtcataaggtcttaattccctttttgcaaatacacctattgcatgtgcacatagtatctcatcttgttggaaccttctgcagctgcatgttttgtcaagtaggttgattgtaaaattgcctttttcttggacctttacttagcataggattgttgtgattgctatgacttgttgatttattgaaaaataaataatgtgttagaaactgattttagaacattttcaagaaataagtttttttaattactgatcttttttatgttttagttttattacctggtatttcattgccttaaccaaattttctctaagtagtgcttcaacttctgatgatacttctataaatatttcatgtgtctcactatcatttttccacactcatttttgcacaaggcttctaaaccagtcaatcattgttgtaataggtaatgatcttgtagctaggatccctgaatttattaattatgctaagtcatcataatgtaccttcttgctgggcagtgactcctggtccaaacttcatgtccaattttctcgaggtatggtcttattcttttgtcaattttgtctatttctgtcatgtagtgctcaaatgaggtcaacttgtatgtctttactgcttttacgaagtttgttgtcagatcatctccatgcactccaaagtttgctttgatgttgtttaacaagtggaagatgcatgctccgtggaagtggtttgggtagaca

SEQ ID NO: 29574 - DNA, 1972 bp, Cannabis sativa
gattatataagatatattattttaatttattttataattgaattatttttattagtcatttttattttttttgttaggaattattcatttttatttatttattattatatgtatttatttaatttaagtttttttttagagaaaataaataataaagtagtctagtctattcttaaatcaaatacatgattactttcagcataatccagtcgtgtccagtccaattcaatttaatccaatcatttccagtccaatcttgagttccaaacagccccccttaaatgatgaaaagaagaaaaatttgtggtcaaatctccctatgtttcatcaattgttatacacttaatcttttattatttttttgtggcaatacccctctaactttatttctctttgcaaatccaatacttctatcaaatttggccaataaatgccaacatgaattttgttaaataattatttacggttatttcgctcttttattttattttagtcttttatgttacttgcctatataagactttcttattagttgtatttttttacttttgactttgtaattaaatgaaatcctaatttctctgcatctcttttattttttattggttatttttctcttctcaaataattatcatagtatcagagttagatttatgagagtgaattacttaagcgtaatcatagatttcgtgtaatcataggtttcgcagatccaactttcccaagcgtcaatacaatcattgtccgtacagcatcaacacagttcaacattccaattttcagtattgatttcttcaagttttttcttgatttgcatagtaattttgggtattgattttcgcaatacaattttaaattttcatcaattttgtatttggaaattgctctatttctgaattggctaccaataaagatgattcccttcaagcgataaatgtgatcggatggaaagaattattcatattggaattatgttatgaaaaaaatttgaaagtaaaaaagatgtggagttgtatctggaacaaaaaggaaaccaccgaatggttatgcatgcaaatctgttagacaatcaaggagtagacaattcaaaaattctcacttggacaaataactcagttgaataatttattggtacccaattagcaaagtacggtacaacaaaagaaatttaggactatctttcgagattgtatacacaatcttattttgcaaagcagtttcagttgggaattgatattagagctattgaacagaaaaatataaacattcaagagttctattttgtaattggcactcaccgaatcagtagagctacgtgcttttgcactgtatattgctcgtagaaaggaacaatggttggttgaatttttaatggctctttatagtgattttgagggactccgttgttttatattgcatcgttctctgctttcttcggttgaaacaatagtttttgaattgttaacagatgaaattcatctcaagtctcagttagggaaaggtattctctcaacccattttttttttttattttgacagtgcctcctactacactgttttttccacatgagaacaaacctcgcacaaaagaaccatttatattttattaggtgacaggagagagaagagagaagagagagtatgaatgaaaagattctaaatagggcactggtgccctttatattttaaattgaaaaaacaaaagaaaaattataattagctgaaaaaataatagtattaagtgggactaataaaacaactatttttttgacaccattagagatgacaaaagatcagaatgtgatcgaagcatacacaaaatcatggacatagccacctctaagagaaaaagaggttagagaatcactgtaacaccattttagaaagcaatatatttatgttcaccatttcctttgttttaattttctctaagaccaagtttagctagtttttaattatgtaccttagttct

SEQ ID NO: 29575 - DNA, 2823 bp, Cannabis sativa
  modified_base (80)..(96): a, c, t, g, unknown or other
  modified_base (254)..(257): a, c, t, g, unknown or other
  modified_base (373)..(380): a, c, t, g, unknown or other
  modified_base (462)..(467): a, c, t, g, unknown or other
tcactggtagagttagagattctagatcgatttttacccttctccaaaatcactgctccaccccaagagtaatcaccatnnnnnnnnnnnnnnnnntagcactaaggcaagtctagaaacctgatttgacgtagtctaagagtatttaataccacccttatcgactaacatatagttcatcttcttgatcttaagaattacttgattgtcttccaatgttcctttcctaaattaatttgatacctactcattannnncactcaacagcaggtgtctgatctagtgcatactaaaagcatatctaagaccactcactgttgattctaaggaattctttctttggccttgttcttttctggaatagttgaaactnnnnnnnngataaataaaatctatatctagaagtcgagaagcttatatagatatagccattagataaatgctccagcatcttactaaagnnnnnngcttgcactagagtaagtaaatcatcaggcataccacaagccacaggtttagataaactcaaacctttaacactaggagcaggaagttttgttaagttcattgaatagacttattttcaaaatttccttccttgtccttgtaatagaacacttttggttactccatatgaatggtttttaaccatagttctcttggctttgcttcttagttccttattctgacaacccattacatgtttaaactaacaatagattttcatcacaagtgtcttccaagtcataacagggtgagttcttagaaaccctcccactacgacaaggtaccatgactttctgtctaagaacataagtggtattaacctcttcggttgtatcaagacaatagagttagtgggaccatcttataagaataagatgatagaacaatttggaatcaagaaaaaaacatctcctctactttgctactttgtttttagacttagtcattttcttagaaaagtaaagtttttttaaacccttatgtgtttattttcattattttagagaattcatatttagaatgttaatcaacatacttgttaggaaatctagatcctgctagtaaaatattcccaacagttatcatatctgacatttttttttaaataaaaaaaaaatatagagtgataaataagactcaataaaaactgatttgaaaaggagttgtcatatctcacaatttttctttaataacaatcaaaaaaaaaaattaaaaaaaagcgataaataagaccactttaatgtcattcttcttcttcttcttcttcttcttcttcttctttgtatcttctatttttgtttcagttttttcttcttattttttaattttttttctcttatttttgttagtaaattaataatggttgggaaatatttcaaaaataatatccatagtcttacatcttctatagcttcgaacccaaaagaaactcaaatgctcattctctggaaaaagagaaaattaaaacgtttgaaaccgatcaatgaaggtccaaactttaattttgaacttgatgattaaaattttgagatacccaaaatactgaaggtatttatgttgtttttcagttgttttagtatttttttttctttttttattgtagatgttttgggtttttttttttcttatttatgccttctgctcactttaatttatttgttgttgttatgtatttcttatttttatttcttgttgtatgcatattttttagtattttttaacaattgtttagttatatggcttgttcttttgatgtaacttttttttaataataaaatagttgaaaacatgctatcccaaacctattacttactgatcttcttatctccatcatcttcaaaatttttttcttcttaagctttttttaagttttttttcttcatgtatttaaaagattgatccacgtttttcaattgtggtttccattagttctagctcttctcatctccatcatctaaaaaaaaaaaaaaaagcttcttaagcttcttctttcagttttttttttttttttttttgtgtatgttcagttttagatatcaattttagattttgttcatcactccctgattttatgaaatatatattttattgttatgtatgtgttattcggtgtttagtagtatatacttaatttttatattttttaacggttgtttttggttgttctgaattattttttctatgtatttagggtaagagaaaattttccaaggtaaaggttccttctcgtgatgttatggtagtctctactagcaaaagagttattgaagtataatttttttttttttttgtgattttatttagttatttttgtagttttactattgttttacagttattttagtaatttttatgttagggaaatttgattttttatgcttacatttggtaaaaaaaaatttcctaagaaaataataactaatatttgtaggatatgaagattaaaaaatattgtaagtaatctaacgtcttgccatctggcatggttgaaagtttctctctaattttttgaaggttttttgcgtgtgcgactggtttgcgactgggttgttttctgttctggttggtgcggtttcatcggtggagcacgacgtcgagtgttaggttccttcatcgactctcataggtttccaggaggttcacgattgagtttgggattgctttctctcgggttctatcgttcattgtctggttttgatggcttcgatgagtacagctatggatgacatggagttccagtatgggcatatagagttggatgatgaagaagaatgtggtttcgagattgaggatgacgttgaggaggcaattctggtg

SEQ ID NO: 29576 - DNA, 1921 bp, Cannabis sativa
  modified_base (311)..(314): a, c, t, g, unknown or other
  modified_base (638)..(653): a, c, t, g, unknown or other
agccaagctcgaaggaaattattgttttcttctaaattcttatagaagctatagattctatacctatgatcagcgttcccactctattgaactaccatgttcccaatatgtaaatattcgccagaaccatttgttagcttccacgaacaacttgaacagcataaataatacaactatgttgaacctactcatatcaggattaagatccatagacctaagattaaccattgatattgagttagaaagatataatggtaagtttaagatatcttatctaagatcaatgtcggtcccttctaatgtatactccnnnnatccgatactggtaaactttgtcgatgccctgaaaagtacataacacctatctaaggtgtaaatacaccttatcacccattatcatgtcagtctaaatctagtaaactgaaaaatcatgggaattaaacttttgaacgtataatcatgattatattccactctgctgacgacactataatcatgaataaatatgtaaatatttatatatgttttggacttaatacaatttatacattaagtataatcatgaaataaatcaagtgaaccatacaacataaaagaatgatttctaatcttatattaattagtaaatttgattatannnnnnnnnnnnnnnnttagggcacaaaaccaaacagatattgcattgcttttggaaacttctccatttattgtcattggaagttgtatttttcccatgggaatcaacatgtctccattgaagccttgcaattgaattggacaaggcaacatgtttgcttccacaagactgattgttttgaaggaacctttgaagatgatattgatagagctgctattatgtacaagaattcttgaaacccttttatttgctatctgtatgcctgtatcaccaatgggtccttgtgagaaaaatatacatgcctggcatcgttttctatgaaagtcattggcaaattcactatcctatgacgctatgcaggcgattgtaccaggttgcaagctttgttttagttcaattcattcaagtacattttttgtgcatttcaggtgctttcggcaatgtgtggtccaccagaaatggttgctacatgaccatccaaagttggcacaacagctcctaggatttcttggaccaggggctatagctaatgctcctgctggagcattttgttccccctgaagggcttgtgcatttggagcttagattttaggagcttgtggatggcctactccacaaggaggatatatggctctttgctatcccagaatgaaaagttatccatttgcaacccttgtcctggataaattactagaatcttcacccaattagaaagatgtccatttcgttccagtcctttgatttcatccttcagatagtcatattcagttgtggtgtgtttaatatcaccgtgatattcacatatcttgtttggatctttttttttttttttgtatttcgcccttgtccaaatgtagaggcttcttgtaatgaaccatgttataagttttcttatacacgctctcccaaatatctgcaagacttatgtactcagtgtatcttgactcttgggtctttcccttctttgttgaataactccaattgggacctattgatttctttttactctatgtctgggttatgttggactgtgcaacttccactttttggtttgtttttcttggagctgtactatatctggtttttacagctttgaactcgaaagaactagcctgtgcagctggctgtacggaagtacgtgatccacacactgtaggagttgtaaaggtcgttggtggaggataaatagatggagttgtcatctgtgaagtttgggcattttgtatatcggtggaaggttctagtagtactccatatgcttgcgtataagcttcttctaaattt

SEQ ID NO: 29577 - DNA, 1000 bp, Cannabis sativa
tcaaatcaatttaaatttattaatttatattgtatgttttaatttattggattcttattttactgtaatatttttataagttcttccaatcatttaaatagcttcttgttatttagtctacatttgtactttaagattgattgtaatttgacattaagacttcgctttctctgtatttacaccgatgtatgattattatatgatttcacaagtttacttaataattttcctaattaaagtatccatatttcatgacatcttagaagttaattgtatatacgttcaaagtagatatgaaacttgatttgatgaattttttcccatcatttttacggatcggtttggtctgaatttttaattctttcaaaccaaatcagtattacggttttttaaaaattcaaaattaaatcaaaccaattaaatgatcaaatcaaaccaaactaattcactaaaaaaacagattggtttggttcgaaaccataatttatattttcgtagttgttctattttttttttacagtaattattcattttttcggtaattttatttacttttaataaatttataatacataaataacaataaaaattattatcataacaatataaagtcaatatcaatgttatatctaaatttattcccaaatatcactattttgccaatagatatatattaaatatataaaataattatatgaatttgtttagtttgaatcgctactaaaattttaaaactgtgaccaaactagaggatttaaaatggtttagattgatcaaatcattcccaccgaatttatttagtctagtctcaaataatttaatctaataaattaattgagttttaaaaaccacggtgaattatataaacacccctactttcaaattattatttgaatgattagttgcccttttcattttcattttaatttgtgaatttaaattgaagataataaattaataatgtacaatatatatttaaaattaattacttgctccaatt

SEQ ID NO: 29578 - DNA, 2508 bp, Cannabis sativa
actgattccagcaatgcaagcctccccgattccgagacaatgagaccaaggaacacaggtaccactgaaggcacctccttcacaatgaagtccttcacaacagtctttgaactcaatggcagcacaatattcaccaggtgtgtaacacctatttggacttggattcataaaaatggctacatccattattcgaccaaggcacccaacaaccatagtggtcattatcatcactacaattattgacttcattatattatatatggaagatatagagaaaagaaagagattattagaactatatgtgtttgtgtaagagagaaagaaagtatgtagtagtgtggaggagaagaggagccacaagtcttacttttataccaccaaaattgattattaaatggctaaatcgtacactatgttgaattttgtgtgttttgtaaaagttactgattgaaccttctgttttattaaatgataaaatagaccctgtattttttaaaatagtaaaaatagaactttgactttaattttcgataattttttattttaatataattaacttgaagacaattcctaacacgaacagttacagaaaatataaacagttttgtcataaacacctttagatcggattattattaaattattcatatatattaatcacgtttcaatattctatgaaaaatcatacatatatatcttaatttatagggagttttttttttctttgggaggaatcacttctcttctagttgtattttttttggacttctcaaaaaattatatagttaatttataggtactatgataaaattagttatatttttatatttattcctgttataaattattttcaaactaattattttgtactgttttaaaaaataaaatctaattttacaaaacgtgtaggccaaaaaaaatgaaaatggattatatatgcttacttaatggatggactttttcttatcactttttcaagactatcttagttattttgttaagtatttataattgttgattattaatgtttaggttttatttactctaattaatggtgttccttataaagttagatttgtttgttgcacatagtgcacatatctatatataatattttatttatttgtgttatactgtaatataaatatgtgaggaaaagcatatatctattatatataaaatgtagttatctgacgaaatttttggtttaacgataatttttgagtttctgcgttaattttaacagaatatcttattacagatatgaatattttttattaattttataatattattatacatatttaaaaataaatttatatagatattttatataaaaaaattttaatttaaaatatttaaaatattattgatatttttaattatatttttaaatttattagcttaactttaaattaaaattaaaaaaaaagatgtagatattttatatgaagaaattcaaattatattataaatatttttaactttattattatttattttatattttaaattgaaatgattgtaataagaaattaattgtttctattttagttatatagttaaccgattcgtacaccatatttttgtaaagtttgcgaataaaaaaaccttatatcaaatttacgaatccaacctatacatagacacactcaaatttggttatgtgagttttgattaagaatatagtaaattataatatatgcattatcagatacgttgcctaattaaaaaaatttaaaaatttaaaaaatacgtatatatataatcacattcaaataacataccaatgtagcaatagctaaaaaaaaattcttaaagatataaatctcaaactctatttcaaaaattaaaaaaatacattacctaataaaaaaaattaaacatacatatattgcacttaaaattacctaattaaatttaattaaaaaaaaattaattatacgtgcattgcacgtaacatcaacttggtatatatataaatatatagggttttggtagaatggagtggtaactgtaattatatagaatgttgttcaataccatgaatattaatttggctttggaccaaattataattattcattcaaaatggacgacttgccctgtccatatatatctttccatttaatttgatgagagaccacatgaagctattagttattattttgaatgcgatatttcaccaaaaaaaattgaacaaacaaattttgaagcgggccggccagaggattagggttggacgtcgcctggcagagaggatgggcctgcacgacatccactccatagtctccaacgacctttatattttagatcaagcacgattggcgggcactctcctcctccagctgctggtgggcttgtagtaaaccccaaatttgaaatttggcatccaaaagctcagcttgtagggtctcattgggagcatccaggtcgcggtttgtcgcccggacctgctacaactccgtcacgagtgcgccgacctctgcagtagtccttttcgctagc

SEQ ID NO: 29579 - DNA, 3136 bp, Cannabis sativa
ataattttcctatttaataaaataaagtatttgatgcacctcattccaccactgtttcccctgctgaaccatccatgaaccctactgagtcattcccatccaagccttatagccctaggtccttgaccaaaaggaaattagtttaatctggttctctttgcatctctatccctaagaaagccaaaagttctcaaccaggttcatcctcaaaccctagtgtgtctgagccaaacaaattaactgcacctttctatttgaatgataagctgcttaggttttaggattctattttcatcctttgtggcttgaatatcgagttaaactgaagtatttttccaaaattcatgagttgattgaacaaagagggtggttgttgtctgtcactcatttgcaacaacaaaatgaggatctggtcagggagttctatggtaatcttgatgatagaattttgaataacaaaagaaaatttctatatcttgcttatattcggggaaattgattttgttttaccccttccactattagttgtgtcttgaaaatcaaaaccattcccaatcctattttcaatgaggattataaaccttcttttaaagaaataaggtctgagatcactggaacctctgagtttatctggaatggaaaagagttacctatcacaatgctcactgagttttatagagttcttcacaaaattgtattgtcgaaatggtgggaaaattcacacatctctactatcaactatggcatagccaagtttttatttgcattgggcactagtgtcaatattgatcttccctcactcttgtatgatccgatagtgaactctactactgaacacattgccttatccaagtttgattaatcgtatggtaaaaagagggtttcctagtgtatttgagcatgacaagattttgcatgttcctgctattggcaaaagtttctcacctgtgtgtggaaagcctttgtcatcgttagttatggatgttcctgctactggtgaggctcttgcctctgatgctccttcttcctcgactgttccttcaactcttgtggaagggttcagttctgcaacttggcaaagtcagttgttctctcgggtgaatgatttcgttgacacttatgcacatgatcagctcaggcaacgtcaatttaaaaaggctatcattgatgtgctgtatgctatgactgatgttttaaaatcttctgaggcttgtcctgattttttggctgatggtgatttttccaattcttcaaatggtgatggtgctttctctgtgcattccccagtcatctctccatcaattatggatgcaaatccatcttttcttattttccatggtccttctatccctgagtccaatgttcagccttcatctataagtattgatcaaggtccttcacgttgtgctactgtccagagggagccagtttctacagatgtctagggggagaacaaggtttctgatgtctatgggaagcagggtcttgcaaatgtttagaaggattcaacaaatactggtgtctagggggagcattccactgatgttctttcttttgttcctaatgctgatgttgctttagtacatattccctctgcatctcttgttgccttttccagcggcgagtaattatgatcatcgagggggagatttaatgtttcatcttttgtacaaatactctaaacattgttcatattttgagtttagtatttgtctgtttgtcttttttatttattgaacttaaccttgtcaatcgacaaactgacttgttgttcttttggtttaattggcatttgtttttgtgttttgttattttgtgtctctcttcttgaatattgtgtttggtcattgataataatttgctaagggagagattgtaagtgccatgttttctgtattgcaaattatgtggctttttactgtttttagtgtattgtgttcttagtgttgtctggactattgagttgttcatctaagttggttttagttgcatatgcttagtctgattttatttgttgtttgccaaatcagctttttagtttttttttttttttgtcttttattcagttcagttggcgctagctggcttgatttgttgagttagttagctgagtcggatttttcaaagtatggtatatactaagccaatattaatttttctaactaactctcatttttgatagaatcttctagtgattcttgctctggtagggcaaaatacttttttgtgtttctttgattatgacttgtagatagtaattcattggatcttcagaggttgaagaaagagtgtgaatctgcaatgtctgaagagagttcagactaatctgctagagggattttagcttggtggaattaagtgcaacttgtcttcttggatctaagtgtgcttagatctgtgttcttaattgtattcaagagttaggtaaatcttatgtaaagtcatttcagataatgttgtttgatttgaaaaagtgaatgtaattgaaatgtttttatagtgaatgttaccttactcgactcttgggaacccaaacactactttaatttttttttttgaataaaagttgaaattttatttaaaacaattcttgtacaattacatcactaatgttattcggaatagtgtcaaccgaataactacgctcagcatataaccatgagactcgggcaattccatgagccacacggttagcagaacgtttaacaaagcgtaaacaaacatgatttaactcagaaataaatctcttgcagtctgcaatgcaacaaccgaaaggagagttcgtgttcaccgatctacagacagcttgaacagttaagaggctatctgattctacagtgacatgagaaagcttggactcttttatccaacttaacacctcttttacacaaaaagcctcagccaaggccggattgacacacccgttccaagaccccgttctcgcctgcaagacttgacccctagaatcccgagaacccagccataaccaaacttgtttctatccgcaaatggtgttgcatccacattaatcttgagtttatttacttctggagcacatcattgctcatccccttctccactatgcatcaaaaaggaagagggggtgaaagttttttcttgagcaaaagtccattgt

SEQ ID NO: 29580 - DNA, 1618 bp, Cannabis sativa
ttgtacgtccccaaattatgatgatgttttcttttacttctattttgttttatgctcaaacgtgaattatgctatgaaaattacttgtgagggaaaactcaaatgaatagttagtcatgtggtattgtggtttgctcccacaaagttttgagttcaagtccttttgtgcagctatatggccactactgctatagttttttttttttttaattttttttggaacaaaccactgctatagtttattaattcccaaatattgtaaacttagtaggggaccccaatttaaagatatatttaaatgttggtaattttttttatctgagttaaatgatgtcacttgcgtatacactatgtgaggcatttgttgtatgtaaatttaaatcgttctgtgtaatcttgctataatctttttgttaccattcttcagactataataactcaaatcaaccatgccattggagcttctggtattgtaagccagcaatgcaagtcagtggtgacacaatatggaaaaaccatactagatttgctgattgctaaggtacataatgttgctttttatattttcgtttcatacaacccattttaagtctcctatagtaaatcatccgatgttttcctcttcttcttcctggcttgatctacagacacaacctaaaaaaatatgctctcaaattggtctctgtgcttttgacggaactcgaggtgttaggtgagatgaaagtacatctggctgttctaggaaaagttcatttaactttatttcaaatgattgctgtatctatcttctaatttaattgtttccatatatatttacagctttggaattgaaagtgtgattgatgagaaattgggaaggaaacacgatagcagtcttcatggtgcaccatgtactgcttgtgagatggcagtagtatggattcaaaatcagctaaaccgtaatatgactgaagagcagatattgaactacgttaatgaggtaaatatttgttgtctcttactcatcaatacatgcatgataataatgaattgatgcaagctaatcatgccctcaaatgtttaaaatcacagctctgtgaacggctgcccagtccaaatggcgagtcagctgttgattgcagcagcttatcatccatgccaagtgtttcattcaccatcggtggtaaattatttgaccttgctccagagcaggtatagcagacttcttcagtttggtcattttaaactttaaaagtcccaattagcaagcttgattatgaaaaaagatttcagttcactctctttagtgagttccgagctgctattagctgcttataaattttggtgtttgttgccatcagtacattctcaaagtgggagagggttccgcagctcaatgccttagcggattcattgcgttggatgtggctcctcctcgtggacctctctggtaattaaaatattacctctttctattaccatattcttatctttgtgtcatgtttttaccataaaatataattagaataacaccattaaggagcttcatttaagtaactaaaaggatcaaatcatcagagccatgaattctattcatttcttagtaaattactgatactggtgcttctgcatataatat

SEQ ID NO: 29581 - DNA, 1439 bp, Cannabis sativa
ccaagatatatgcagtatccagtagtcgacctcctatcatcaaggtcacatgcccagtcagcatcacagaaaacatctaaggagaagtcagacactggtttgagcatgagaccatagtctagagtacctgcaacatatcttagaattctctttattgcagtccaatgagagagcagtggccggtgcatgaactgacataccttgttcacacagaaagcaagatcaggtcgagtaactgttgcatattgcagggctccaactatggacctgtataaagtaatatcttggacaggtttactcccatagttggatagcttcaatccactgttcattggtgtattttgagtattgacattttgtatacctgctttgcatagaatctttttaatgtactgtagaataccttcagaggttcttgttacttgaatgcctaggaagtagtcaacctcacctaaatccttcaaggcaaaagtgctgctgagttctgcaatcagctggtttactagatgatcatcactgcccataaccaagatgtcatcgacatacaccagaatgtagatgcagcttgtgggagaaattttgagaaacagtgactggtctgctttagaaaaatgaaaaccatgctgaagtaggacatttgacagcttttcaaatcaagcctgaggggcttgctttaagccatacaaggctttggtgagtttgcaaacataatcaaggtgttctggatctacaaaaccaggtggctggtccatatatatctcctcatgcaaatcaccatttgaaaaggcattatttacatcgagttgccttatagtccagccctttgtaacagccacagttagcaacactcttattgtgacagccttcacaacaggactaaatgtctcttcatagtcaaaactagctttttgactgaatcctttggccacaagtcgggccttgtacctacttaatgagccatctttgttcagtttaactctgaacaaccatttgcaaccgataggaaccctgtcggcaggtctaggaacaacaacccaagttttattccttttaagggcaacatactcagagttcatggcattattccagtgaggttcaagcagagcagctttgacagttttgggttcacaaacagcgaacaaggctttaggttttctgataccagactttagccgagtttgcattggatgagtggaaataattggggcatttggagggttggttgtaatagtaggtacagatgtagaggttggagtgattggatttgggtcatttggcatgctactgggatcacattgtgctggtatggtagcaatagggtgagatggttgagacaccgaactgttggtggtggaagtgtcagaaaacagtgactgagaactagattcagaagcatctgagtttgtgagtgaaggattgtgagatgctggaaagattat

SEQ ID NO: 29582 - DNA, 5940 bp, Cannabis sativa
  modified_base (27)..(28): a, c, t, g, unknown or other
  modified_base (2263)..(2285): a, c, t, g, unknown or other
actaatcagattgtaaagagttttatnnagggcataaaacccaacagtgagctcgagctaacaaagaatgtacatattagggcagttagacttggagtgttcgatctttaggacaacatactttattttgatagttgctggttaacaacttttgctatatatatatagcagaattcttaacctttttatggtaggaaataaagtccaaatcgtggtcgtggacttatatggaaagttttctttttcgacccaatctgccactgtagattccaatcatgttgctacaaatcaaaaaattattttagaaaacttttgtatagctatgaaaacatgtttgtggctgtctctagggtttctatgatctataaataggacctagagagcagccaaatgttctcacctccttgagcttcatttttcatattttcatctttctaaggaaagagttagagtgttcaattgggttttagtctttgtttagtgttcttatactatgcttagaataggttgaagaacttcattgaacaagagaatggtctttgggggaagacttgtcaaagccttacttcggaaggaagtaagcactcacacatcaaaagaaaaagggatttcactgtttggtggtgttcagaaattagattgacaaagtagattacaaaggattgcaacaaagctttatagggagtctaaacttgtttaagtcaattgtattttgtaattatttgagactttacaaattgatttcattatttgggcgtggtcccatggactatgagtgtttgaaagaacactgataccccatataattcttttgtgtcaagttatattctgcaatgttaattctattatgttactataaatatgtgttctgcagcaacaagttttcattctattattgcagatcataacagttgtgattttaattaccggaattcaattaatatattggtatttgtaaaaatatagtttttcaattagtatcagagcgggacactaaactcttagtgtggtcctttaacattttcttgtatttttgtgcaatatgtccttttttgcagaagaaagttttatttcttgtccaccacttcccaatgactctaaggacccttactcgaatgtgagaatgtgagcattcataaaatcccaagataagaaggcttggtgatccattttatcaggttggtctcaccctattgtgaaagattccgaaggtaatgaaaaactaaaaattgaacttgaatggtctaatgaagatgataaattgtatgcttacaatattaaggccttgcatgctatgtttaatgagtaggtgagagttttcttaaactcatatcttcttgtgaatctgctaaagatgcttggcaaatctttcaaactcaatgtaataccctaaggtatttaataactggaatagtaaccctaactaggttaattaagtattaatgagaaattatattattatatgatttaatatgtgaaactattatgatttattgcattttaagaccctatagtgtgtttggggcatttttgtaatttttacccgagatgggtttaatcgtaattttatggtatactgtgctaaagaaaattaaagacttagcaaagttaactttctgacccgaagctaattcaaatttttgaagaatttcttacatccggagtaagtggctttacagtataagtaactggcatccgcaaagagcatatgggatatatggggagccccattagccactttacatccatgcagccacccgcgatactcatatttacgaaggagagccaagaaaccatctgcacacaaaataaacaggtgtagtgacaacagatcacccaggcgaatacgtgtagatagtataataaactttacaactccttgacattgaaaagcaattgatagacattttcactaagaaaattgtatcaatttgctttatttggtaggtgttaatgtgtgggaaattttgttttgattctttctcttttaaaataatatcttttttatgtgatttgaaaatgttgtgctcttgattgatattcagctccaatttcataaaaatattatttattccaaaaaaaaaatattgaaataaaaacagagtaaaacattattattatttaacctttttgataagtttgtaatctttttaaaaaaatgaaaaaaagaaagaaagaaaagttgtactgatttgtttagttagacttagattattagatcctcgtgcttcttctcagctgaaactctctctctctctctctnnnnnnnnnnnnnnnnnnnnnnntatgtatatatatgtatatatacaataaaggcaacaggaagaaataaaaggtgcttcacttttacgtctatttagtattttctcgcaaagccaacttcattgtctttgtctttgtctttgtattatcagctcctctgtaaaacggaccccctcacctcagctctctcactcttcatcttcaatctcaaactgcccccacaaacctctacctaacattcaattcaattcctttcactcataaatctcttctccaatcacccattgcctcatcctttaacgccattcattatcattatgctctcttcatttttcatattcttcttgcttttcctcgccatcaatggtgaggatgccaccaggttggaactcatacacagaaactctcccaagctttctgggaatgttaggccgaaaacccagatggaaaatatcatacagtttcaccgccgtgacgttatgcgtatcagaaatatggttactcgtagacgaaggagggttactgaaatggaaacatctgtggcaatgtcaatacattctggttcggattatggagctggggagtactttgttcatgtcaaagttgggagtcctggacagagattcatgttggtagcggatacagggagtgaattgacttggatgaactgtagatataagtgtggtcataagtgtggaactcataaagggaggattgatgatgataaaagggtgtttaaagctgatcgttcttcttcatttagaactgtgccttgtctttctgggatgtgtaagattgagctcgctaatctcttttctctggctagttgtcccactccattgaccccttgtgcctatgattacaggtacctcttctatttttggtgtgtgtgtgtgttgcttaggattcaaattattcaagctaatatattcaagttcaaaatctgcacaagatttaagagatttgagtaatggataagatgatgatgatgatggtttttagtggaaatgtaggacaaaagagtttaattttccaaacaagaagtagtttgggacatggtctttcttgatgtagtacaagacaatagctgaagttgcagaaaaatatctgtaatatttatgtgagtagtttagcttagttagtcgtttatgtgatggaatttcatttgagatggctaatagagtaaattattttcccttttgtttttgagatctaaagtgttgtcaagtagttggggaactcatggctagcattattagtaccatagcaaatcgcagggtatgtacgagctagctgctcttaagtccttacctacatctaacacaagatttaaatggtagttattgtaggtaggtgagtctcatgtgagccacaatatttgtaccaaacaaagggcctttgtactgtctttttaggatatgtatgtctcttcaaatatcattatattttaggggcaattttttaattcatcccattgtttactgatgtcatttctcttgccaactaggtacctagaaggttcttctgcaattgggttttttgccagtgacactgtatcagtaggcctcaccaatggtagaaaaaagaaacttaaaaatgtcttgattggttgcacccaaacgatcaaaggtgatttaggtggcttcaaaggtgctgatggggtacttggtctaggctttggcaagtacacattcacaacaaaagttgctgaagaatttgggggcaagttttcatattgtttagttgatcatttaagccccaaaaacctcacaaactacattgtattcggccacaacaagatcgaaacatcgctgatgagaagtatgcgccatactgatcttgttttgggtggagtttatggttcactctatggtgtaaatgttttaggaatcaccataggatttacactgttgaaaatagcacctgaagtatgggatccaaatcttggtggtggaacaatcattgattcaggaactagcctcacttatctagctgatccagcttacaaactggtaacagctgcattcaacgagtccatatcaaaatttgaaagattgtccacagagggaggaccatttgaattctgcttcaactcaacaggattcaatgagtctttggtaccaaaattacaaatccattttgctaatggagctcagtttgagccaccagtgaagagttatataattgatgttgcacctcagaagaaatgtctaggatttgtttcagctggttggccaggtacttctatcattggcaatatcatgcaacaaaaccatttctgggaatttgatttggagagaagtaccttagcctttgcttcttctagctgcacctaaaaattggattgttatacttatgtaattttttctcctcttacttcactctcattcataaatataattttttttttctttttatttttactaagttacaaaaattcattgtaattcttcttgtaatgtgttgtataattatcatatttaagaatattttcaaactctttcatcaacccaattgtggttcacatgtgttgcctttaccctttcccaactttcctactcttttattcttcttcatgccaactgtcacaccttgaaaaaaatcaaaggatatatatgtccttgttctttgaaaaccaaacctatctcttgtggaaagagataaccacatgtcttaccagaaatacacatattcatatctatatatttatctacaaaaatctgtgtcaatttcttagcaatttcaatgctaagctccttaacagtcaatatttatgtgtgtgcgcgcgcgcattaaatggtgctccaatctaagagtagataaaattgaaccgaatcatgatgcgaagcacatcacatgtaatttagttagttattaataattacgctagtggtcagcaaaaatctaatttatttatttaaactcctcacattgagataacataataagctactattatttaccgcatatgccgcaaataaaggttataatgattagtaggttagagagtatcatattaataatatttatttgatcatggacctcatttttagggtgcacaccggctagattttaacggatttcaagttttggaattttgggaccgaatctagccgtatggaaaccgggtttttgagtttcgggtctcgatggattggattcgggttgggataggtcgggtttcgggttaggctaggtttttttttaatatcgcttttttaataaaaaaaattataaaataatataattatacaatatattattatatgtacatattacataaattaatacattaacaatttaacacacactcacaaattcacaactcaaaaaaatatatataatataattacaatatttacctaaaaaataaataaataaaaatactaacgaatttggggtgggttttgggttttcaacaatattaaacccaaactcaaccgagtacataactgggttgaacccagctaaaattgaaactcgattttttaggtttttcaaatttcgggccagttgagttttgggtttcgagtataaatgtgcacccccgcacccctactcatttcaaattgcttctgagatagaagatcccaatgcttctaagagtctcatattctttttggtaaaacaaattcctgcaccattagggtgtttggtatttttctttttttttttttt

SEQ ID NO: 29583 - DNA, 2135 bp, Cannabis sativa
  modified_base (361)..(369): a, c, t, g, unknown or other
  modified_base (403)..(404): a, c, t, g, unknown or other
taattaatatttttattaaaaatttaacaataattctatcattaatgttagtatattataattttgttataattaaatactaataaaataataaaaataacataaaaataaattaaaaagtgtaataaatttatggtataatatcgttactggtaggggtgtgcataaatcgatcctccatttacaattgaccgccaaacattagatatccaattgtgatcggatcagattggatgttatttttaaatatacaattggatcagatcggatggtggatgggtgtctaaaaatccaatacatccaacattcaatcgaactaatttgtattttcatttaattttgaatgagtaattagattttnnnnnnnnntacgtcaaatttatatgtatatatgaaaattaannttaaaattttactctttttttttattggatggatccagtccaatccaatccataccggacctaaaatattgaatggatctgatccgatccaaaaaatattaagtctaaaatatataataaatacaagttaaaccaataaatataaatgaaatacatccaatggatagaaccgatccattccaacattcaatggatgttggatcgattggatgattgaaattgattaaatcggatcgaatcggatggtaaaatttaacatccaatatatgattggatcggatctgaatagacctaaaaatattggatgtattgctaaattttgagccaaattaatgcctcagaaatgagtcattaattttaattcgtaggaaagaaaagtgtaagaaaaaatcaacaaaaacattaaattcttatttattttagaagaacattaaattttaatatgtatataaaaattatattaaatatataaataaaaatataaaaaactattaattacattaataatgacaaaagagtaaattaaaaagtaatatttattgtgatataaaatttaatttgtactatactttgtatcaaatttagtatattttttaacatgtgctaaatttagatcatattatacactattattagagttcaattttttgaatataaagtaaaaaaaatacatatacactatatttatagcacttcattaaaaatgttttaacaaatattatatctgtgtcaaatttacatcacattaaaacacattttttgctaagtaagctcttaataatttcgtaatgttgattgacacaattggtgcctaccttttattagcatttcccacgtgcacataaatataaggctggaatgtgggacatggattaatagaatttagcatatatatgtgtatatatatgtgacagcaacttattaataaacttatttataataagcttaaaagtctcaaaattaattcaacccaacaaatcataactagaacttaagaaagaggcaaccattgcatacttgttaatgaagctggcatggttccctttttggaccatttcatacttgaacttaattaattgatcaataagaaccatgcacacctttttcaaagagaatttttgtttatatgtggagctagctagttagctaggcttataatgatataatatataggtgagtactattgaaaatgtgtgctatgtaataatagggctgtattagaattaaagtatactactacttattagaggtggcactttattatctttgtgtggtccaattcaatatattatatctttgttttcttcaaatacagattttgttttggattctaatatcttattagtccaagatacgaatagtggggagcaaattaaagttcatttctttttcaatatgttttctaggtcaaaaatgcttcaaactaaaccatgttaattaactaaagattagagaaagagcttggttattgtaggtgtctcctcattgtttataagaattaatttcacctactctattacttagtagttagtatgatatctttgaaagtgttcaaaacaaaattgtgagtgctttggcctaaaattgataatattataataatatatgggagttaaagtgatgtgacatgacagtcgaacaagatggaagaatatatagggcccaacacttttgtccaaaaatttattttttctatctttagacgttagttactatttttttttttttttt

SEQ ID NO: 29584 - DNA, 1762 bp, Cannabis sativa
  modified_base (472)..(476): a, c, t, g, unknown or other
  modified_base (1077)..(1094): a, c, t, g, unknown or other
tcttggacttcaacgtccccctcactatccttctcttcagcagcaggtcgggtctgttcagtgctcagcatcgtggcaagtcggaccacgtgaggatcaatcgcagtaattctccgtatagtttattttgtgcgggccatcatcctatccctggacggtggttggttggtatgcctagcaatagttacagcatgaacaacaataagaatgccaaaggcaccagaacttggacagcccatggggatggtatcaactacgtctggccagacaatatatgtccagttggacggcaagtatcgtttccaccccttcctgagttccccaatgaagtgtccgtagccttcatctgcgatctggtcggaatagaagtgatgctgcaccgcaggttctggggaaggtgtaccctcactgctcacttcccagtcctcgaaactcgaattagaaagtctgtcacttgatgaggacggactannnnnaagacgaggttggtcctcgtacaagaattggagaagatcttggtcgatatgatgttctcctccccaaaactcaccagggttcatctacaaaagataagacacaagatgagtatttggtcgggatatcgaataaaaacaagcaaagtctaccgaccaagtccaaacaaaagattaaaaagagtaaaatttcacgtgatttaggttcataacccagaattttaaaacctcggactaagggttaatctccactaaaccccgaatgggcaaagtgagaactaaatattgtgaaaataaagtctaaataccagaacagccaagttatatggtcaattacaagaaaagtttcacatttttaaacctagattctctacagttttcctagaacaagttcaagactactgaattttctatagtggaaatccaaaaaaatgaagattcaaacattaaagaaagaaaagatgagaaatttactcactgtttgaagctttgaggttgctcggatgatgctgatcgacactttttagaaattcctcgaagaatttgagagtaaaaaaggtgttcttgctctgagattactaaacaagaaaatgctaaaagtggnnnnnnnnnnnnnnnnnncctatttataagcaaattagtgaaaggttataattatttcgaatttcaaacgcctcaatttccccccaaaagtaaacgttgaaaaaaatcaaaatcaattgagtacctaaagaagtgcaaccgtcaaagcatgagaatcgattggagtgtttctagatacgaattgatcaaagcttttattagccaaataatgaagagaatttttgtcaaaatcacattggatcaccaacaggtgcatcgaacacgtgccacccgttcagacacgaacttaaactaagtgaagtctatgcgcgactttggaagtcccgtgcagacttgggggccaaatgttatcccattttttgcactatgatgtggcaacgcacactggtgacacgtgtctgctattctctgtatttggctggagagataatctgaacagacctcagccatgcatctgcacggacaaagtctacctaactgagcaaggtaagggcagatgatccggacaataaacgaagtcatttctctgagtagtatatcaagacttagctacttcagctttgatatcgtgaagctcacacacacaagcaatccctacaatcatgggatcgtatcaaagggatatggcaagctgtctgaatccctcaatttatgtattctagatatgtaatatatgttcttaccaa

SEQ ID NO: 29585 - DNA, 1174 bp, Cannabis sativa
ttaacaacaggactaaaggtttcacgataatcgatgcctggttgtttttgaaaacctttagccacgagtcgggccttaagacgttcaacagtgccatcgggattgaacttaatccgataaacccacttattgtcgacgacgtgcataccaggtaaacgagggacaagatgccaggtgccatttctttttaaggcaaaatattcatcatccatagctgccttccaaacacgacttttcagggtgatttcaggggaagctggggtagtgagggagaaggctaaaaggctaggatttttgagaagtgaagcaatgaaagtttttggcttgaagatgccagatttggagcgagtaaccattggatgtgatggtgcaggtaatggtttaggttgcggtatggaaagtagtgaaggcaacggactaattggtaaatggacagccaagggaattgtggggtatgaggcaacataggcaggccttttgggagaagaatgaccatgtgcaggacttgttactgatcattggaagcatctgaattcgaagagccaatttgaggtgatgtgactgggcttgctaagctttgagatgtatcagttgcaaaacatagtgtatcatcttgaatatttggtgtggagaggaaaggaagccaatgactgtagtgaattgtggactcagaaatagaggaggacatttgcaaaggatctgtatgaccaaaaccagtggagaagggaaattctaattcattaaaagatacactgtgtggaatatagatacgaccactagaatgcaagcacttatatcatttatgattaggactgtagccaagaaaaacacattttgcatatcgaaaatcaagtttgtgattgttgtaatcacgtaagtggggaaaacaagcacacccaaaaacctttaaaaattttaaattaggagaaactttaaacagtatttcaattggagatttgagtgcaagtgttggtgtggacaagtgattgatgagaaaagtggaaatgctaaaagcatcccaccaaaatctcagtggcatggaggcttgagagagtaaagtgagacccatttcaatgatatgttggtgttttctcttagatttgccattttgagcatgagtatgaggacataggtgcctaaaatgaactccaatagaggtgagaaagggtgctaa

SEQ ID NO: 29586 - DNA, 2648 bp, Cannabis sativa
  modified_base (2029)..(2035): a, c, t, g, unknown or other
taatatgttctattaatttaaaaagtacatactatcatataaaaaagatagagcctaattaatagtttttgtaaaattcatagttaaaattaaatagtatttacctacccttatcaatattacccaaacaataaataaaaaattagaaagtgtcatgtcaaaataacacccaagcatttgcgtgaaactctataaaacgtgcatgataatgaaattgcaatgtcatcgtcatcctattattattattattattattattattattattgggacacgattttgtcatgtaattgtagaatgtatttcgtgatgtacgacaaccgttagataaagagttatttgatctgaggattgaggttgatctaagagtaattatggttaaaaaatagtaacataccctgagacccattattacataccctgagactcatctaatgtattccgtacatcacggaatacattccgtgaaagtacattacgggacaaaattgtatccctattattattattattattattagtagtagtagtagtagtagtagtagtaaacgtagacgcacttcacgcgattatgtaaaatagcaaatataaattttggttatgtcttttaaaaattattggttgttctctatatttagttaaattataatttagatattgtgtttctcaaaataaagtataatgatatactctttttaatatttgtaattaaatatttttaccttaactttaaaaaaatttcttagtaacctttaataaattgtgattgatttatgatataattatactgaaccaatccaattacaaaaaaatgcacatgcatcaagttaccattggattaaattgaatggaaatagtcggattgaatcagttttttgagaaaattttaaattctaattaaaaatggatctaatttaattacatataatacatattaaaaatatattgcctttattcatatataataaaaaaatatctaaatttgtttttatttcttgtttattaattttcgataaaacctaactaaagaaatccttaaaaagacctttaagaactcatgtatagtttagtttttatgtattttttagttaatattaaaactcaaacgttgaatagaaataatatttatgatgctcatccatagtctaaaccatcttttttttactaaggtgtcaaatagccaaataaattgtgaataaattaaattactataataattctagtttaaaataatttatttgcctaagaatttttattttgatatttttcagctaattatgaaaattatttttcttatttaaatcatcataatattttatatcataaatttatttatagtttattgtgtgtaattcttgttttaatcatttttgtataacaaaattttgatatttttttaactaatcaaatggcaaaaattaaaaaataagttttttgttttaattttaaagcttagaccaagattgaaaaatgcaagaatatatttgttgcatttttataaagaaaataagaattataactaattgggtaagacaaatctttttaatcacccactaaaagaataatgtaacactaactttgtcacaaagtaaagtagaaaaatagtcatttgtacaacctataatacaaaatccacattgatatctaaactatgtgggattattttaaccaaggagtcaaattaccacatttataaaaagaaattaaaaaaataaaaataaaaaaataatataaaataatgctttatttcttttatataaatatatagacatatagatatcgatgataaaatttatatatttatataaaataattaaaactgtaataatttattaatatatgatattttattataataataagactcttaaaaatatttttttttatatataaatttagtgatataaataatttaattgtaaaaaaaaagtattcttattaataaattattataaataactatagtttttaattattgtatatacgtaataattattatatatattcaactaaaattaataatttaaannnnnnnaaataaaaaaaatatttttttattcgattaaaaatttaaaataattttaattttaaatatttgacaaaaattaaaaaaatataaaatatgtattgtattaatttaaagactaaatttatcaatcaacatagtaaataaattatattaatcactcgcatataaaatgtataatattaattttaggatggacaatagtaagaatatataatttataaatttaacattcacaatagtcttatatcactacaaatatataaacaaaatatctttaagtagtattattattctaatagaaatgctataataataaattattattgttttaattattttatgtaaatagtaattttataaatattaaataaaaataacaataaagactgtaggaaaaaaattacaataaaaaattctaagataatactatttataaaaaaaaataattaaaggatcatttttattattcaaaggttaaaaaatgcaaaatgtgtattgcattcacttaaaaaaactacttagggcgatattaattttatcaatcacccacataataaataaataatgctaattttgagacaagttaaaataaaaaattagatatatatatttataaata

SEQ ID NO: 29587 - DNA, 2142 bp, Cannabis sativa
tcatcacgacctccattcttgtcattttgtcgagcataatgaccatgtgatctgactcgtcgagattatccttttctccagcaccacctttagcaggcttatcctggtgatcatccttcaatgtgccttgaggatcattatttgacgtgtctcgaggatcatcttcaacatcatcaaaactattctctcttgattcatcatctttgaatacaagagcgtcaagatctgtgtcttttccaagttgatccttgtgacgactggtcacctcattcttatcttttgtatcccttgtcttagcattaggatcagtgaaatgaagaccagacttgttttaggtgagtacgatgattattgagtgtaatcttcagatggtatcaatgcttcctttagctctcaatgaaagcaccaaaatatttactgaggttttagaaaaacaaattataataaattagaattgaagaaataaataattcaaagaaaaaaatagaacaaacacaaggttttaacgtggttggagcattaacaagtcttagtccacaagttgatgttattatgtatttaagctagaaaagcctttgggaatacaataagcataagctctctgtatttgcttgagtaagtgttgcaagagaattcaacccttaatccaaagaacctttcaggtatttatagtactatgagaattatacttagtttctcttttccctctaatgggaagtttacatgaaaatacataagtttggactgtcctcgtgaggtccagcccgtaagaggatagatgtgctgactaggtagataggatatggttaagcactaaaaattgtgtcctataattgtgggcaattgattaattgcttggtcttcatttaggtaatgtccttttttagcttgatacgatcttccgtcgagatttgagtaatatttcattccttattctatgcacttgaataaaaaaaggaaaccagaccaatcttctaggaacacgctgtttggacctctaatatcacagtaatagaaatggttccaaatatgggctgtccttggcggaagctcatctggtcatggagcttagttaccttcttggaaggccttgtctaacttgggctacccaaattatcttctttgggccctctagtgggctttagatgttgacctgaaatccatgtgtcccttgtcggaaatacggataacaattgatataacgaaaatcgctttgatcctatatgggtatagttgatggatgagattgttgtaaatacatttacataaaatcaaattttgagctcataaggttatacatttataaggtaacatatgtttcccaagtgagagattgctggattaaaatcctatttgttggcacatacgtatactgtatatactattgtaaagtgtgatacataattaagtgaccaactatgttatatatgggtatcaaaagggtattagtcatggagataattatgtgtagataccataaattgatttataatttgttgaggggccaaattataaatacccaaaactcattctatagtaagcctataaacaggtagtggtccataagaaatactaaggttcttgtattctcttcttccctatcagagaaaaatacataaggaaatattgtattcttgaaaaatcataattaacattctgtgtaatttccaataatggcttcaggttagtgcttccgattatctcgttattatctttttcttttttgatttagcaacgattctatagaaatataatttaaggttgtttatattaaagcacttttagaaatataattatatctctgataatatttatttcttgagtgttttattaatcataataatttataataatatggcaaacataagcccataaaaaagctaaaataaacaaaaatctataaaaaaataggcagttcaatctaccatatttaagtaaaaagttttgcaatctcatattaagtgtaatttcatctttgtaaaagttactggttggactcttcgtttaaataaatgacaaatcgatattatattttcaaaatggttcaaaatggtaatttggagctcaatttttatcaaaattgtatttacccttgattataagtaattaatttaaaatattactgatcggtttcttcgtttg

SEQ ID NO: 29588 - DNA, 2638 bp, Cannabis sativa
gctaacaagtcaaaggtacaaatacagtttttgatcgactaaaatttaatgatttgaagcatgcgataagttgggattagtgtgccataacatgtcacttcaatgatgtatatacatatacatatatgccataaattggtattagtgtgccgtaacatgtttcaatgatgtatatacatatacttgtgtttgtatatttcttatcaggttaccatgatcttcaatggtagataattccctagaaggcttactactaatttttgtcgtatacaactgaactcactgaagcactataacaggatgaataataaaagctgaattttgtgaattttctgctttgttgaatattcttttgttccttttagttttcttaatagtttatttatccttttcctgcttcccaatattttagcatgctgttcaattatgaacttgatttctactaagatcagtgttcaagcagtttctgagttatgaaatactagaatagatgcatagggagctgggagttagccgttagttgtttatccagcaactttttgttgttggggttggttattttaagatctttccaataaacatttttgctacaagtaattttctttggtaactttcgcaaaaggttgtttctggagatgatgatttaccaaagagagatgatattggagaaaggcgtagaaggcatgaggtaaacgtattacaacgagctgggattgaggcagaagatgatggcagagatgaaatcggggctgttgagacggatggggatgatgttgagatggatgaggtgggtgaatcagaagagggctcagaagatgagttctacaaccaagtaaaacaacaaagagaggcaaaacttgctgccaaagctcagatttattcaaggtttgtcaagtgaaaaaacacgttcaatcatttagtttgtattcttgatagtatgtgcggtgttaattatacagtatgcttcggtctgtagggactcgacgctaccagtcgcatctttgcctcaaactgtggacggaaaacgccatatatcttatcaggtactgaaaaatgcacccaattttgattcttggaactgaacttgttaattagctaacattttataatttaactctcaccgtgttatacttgattaataaaacagattcagaagaacagaggactcactcggcaacgcaataagaaattaaagaatccaagaaagaaatacaaggtattactttagtatcttttaacgaaacgcattaaaatgtttgatcatttgttgttcttccttgtaatgtgtatttgctataacccttgttttctctgttcctcaggaaaagcacaagaaggcagtgaagaatcgacaaggccaagtacgcgatgtgaagacaccaaagagccgttatccaggagagatatcgggaatcaatgcctccatcagtcggagtgttcgcctcaagagctgaaaaatgtgttttcactcaaatcaaatacccatttttgtttgtttcatttttgactcaacatatatgctctgcagagttggtgttaatttaatccaaatgtatcggccatatttgtattgaggaaattatgttttataattatatggttatattatttgctatatagctatagactagtaacattatagttaactcaaagagtaatgatacgtacacatctttatccttcaattaggagtatttattcaatttaatcttcttttgcattcaattcatactaagtgtaagaaaatgaattggatgttttgaatttgttactttttaattttaattatttaatatttattaaaaaagtatctttcttcacataatttaaaataaaataaattatatttattttatgtcataataaattataataaataaaataaaaaaattaaaagaagaaaaaaaaattgtttaaattttatatgtagaaaataaataaattatatattaacattgattatatatttgatttattaaattttatattatattatatgtattaaatttttaaattattattttttaacattaaaataagaattttatataaattttaaaatttcatatttataaatatgtattgattggatcgttaatttttgtggcaattaatatacaatccacattttatgaattggattgaccattttataaacactcctacctctaattacagtttgaaatgataaaataaataaagattttttttttctttagaagaaacccccaactagagaaaagagttatagagtaaggggagaggggcaaaggatcattatttgattaatcaggaatactcaattatcaacaatactagcaagcaatgagaaagacaagtatattttatcaaatctagcaaattacaactaaaatcatgcataactaactaatcctaaaatagagtccagagacatgaccaacattaatcctcaccattcccataccacaaaaaccaccaccatgaaatgcaacatctactgacataataacccacccaaggagaagaaagagccagctgctgtcccgtcgttccctactgcagccaccaattttgtgtggtgaggtttcaacaattgattattatgatcatagttgattccacttattaaatctgtaacgtatcaaaagatcaccaa

SEQ ID NO: 29589 - DNA, 3938 bp, Cannabis sativa
  modified_base (49)..(61): a, c, t, g, unknown or other
  modified_base (3247)..(3262): a, c, t, g, unknown or other
gtgcgggtgcggtttgagaaatttgaaaaaccgcatgtgcgggttggtnnnnnnnnnnnnncaaaaaccgcaccacccgcactgcaaacacccctagcaaaagctacagtgttgcagatgttgtttggctcgctcgaaacacacttcgacaatgggtctgtgcatagtcgaagaggtttgatcctatctcactggcctccaatctcatcgacagtagggactgttggtccaaaccagcagctggaaagttaaaaattaatgtggatggggctgtttttgaagacacaaacgagattggtactggttttgtggcacgtgactgtgatggaaggatactcgaggcgttttcaactatttccaccttaagttaccaacctgcaattgtagaaattctaagtgtcaaagagacgcttagttggataaagaggaataataagtcgaatgtgataattgagacagactgtattttagttgttcaagccattcttagttcggtctctatgtcttctattttcggcttgattgttcaagattgtcaatttattttatcatctttaaataatattttcattgatcgtgttaaatggtttgctaacaaagccgcacactatatggcacgtggtgcttgttattggtcaggtcgtctttttactgagagtgatgttcccttgctcttcaatccattgtattagcgaatttatctgtctaataaatgttttacctttattcaaaatatatatatatatataatattagattggatttgagttattatacaaattggatttgaattaaaatataaaatataatttacacttagcgaattaaaaatattataagaaaaatagtgtaaattaaattagatgaacatcactaatctattcaaagagcatgataaatcaattcataaatcacaatattaaattaggaccaattagttatttttgaaaactttgacaatgagactataaaaacatagaataaccaagaacatgagttaacatttcgtacaacctacaccgaaaaccatcttttactaataaaattcaaatggaactaatttgaagtttataaattcaaaacaaactcatggataaccgataatgtctaatttgtatctaaatagaatttttaataaaaaaaataaataatttttaaatcttttaattatttttaaaattttaatgtcttttttaatttttttaatcattcaaaatgattttattttaaaatctaaattaatttttaagatttactaaaaaaaatgttgaatttttctcgtttttattttgaggtggtacgatttaatagtttcgaaagtttaggggataaaattactaatttacaaagatacatcagcatttaaacgaaataatagaaatgaacctaaaagaatgactaaatttctgtaaatgtaaaaatttaacaggaattcttaacaaatcgtatattttaaggggcagaattaatattgtcgaaagttcaaggggtaaaagtattaattattcttatattttgcttaaattttgtaattacattccaatgctaaggtgtatattgacactcaaaagtcaacagtttttttattgaaaatatataaaataattatttaaatgaataataaaatattaaaacacttttaattaataaaaattattaattagtagcaaatgagtatataaaaaatgtaatattaattatggtgtaaatttagctcatgttatattttatgctaaatttcattggagctttattttttcattttttatttttttgacgtggtgaactgaatcataaaattaacaatgcaaaaatccacaattggtggtagaacctcctcaaaccaggataactcatcgtctaactgaagggcatgcttttccaaaccatgagttgtataattcttatcgcgagctacatgggacaaaactgtctccagaaatttagaccataaagttataacatccttaaatagcacccctagctcattaaagaacacccttctgttgttggtagctatcaccaaagtttcagctagtaatattgagatactacctgaaaaaccaaaaaaacaacacaaaaattaacatgcattagaaaaggctatatttgaattaaaattaataggatggaaatcgaatttaaacacatatctgaatgaataattagtatttttaccccctgaactttcgacaatattgattctttcccttaaaatatacaacttgttaagaatccccctgaacttttacatttatagaaatttggtccttttgttaggtttcatctcattatttcgtctaaatactaatgtatctttgtaaattagcaattttacatcctaaactttgacaactattaaatcgtaccccatcaaaataaaaacaagaaaattcaatattttttttaataaatcttaaaaaattaatttaaatcttaaaacaaaattattatgaatgattaagaaaattaaaaaagacattaaaattttaaaactaattaaaagatttaaaaaattatttattttttattaaaaattccatttagatatagaaaaaatatatattaaaaatttattttttgtaaaaagtaaattttagggaaacaagtttgagtttatttttctctctctctaaaaatatagattttttaagtaaacataatatttttttttagtttagtttttaactttttttcaaataatttttttaattggattttaaattatttttctttattttttttaaaatattagtctataaatataaataagtttgatttttcttcaaaaaaatcttaatttgtttaaactatgtattagattttcaataattttggtgttatttttttaagatacgtatttataaataaaataaaatttaaaaaataattttcttaagaataatataagtgttttaagtaaatttaatatttttatcaattttttgaaattaatagaatattataatttttaattttttttttaataaaagcaggtaaaattttgtattagtcaaaattcagaaagtaaaaatgctaatttctgatagtaaaaataatggaaccaaagcacaattatgtacctgttatattttaagaaatatttttaacatgccgtatattttaagaaatatttttaacaggccgtatattttaagaaatatttttaacatgtcgtatattttaagaaatatttttaacaggccgtatattttaagagacaaagggctcgtttggtacgccgtannnnnnnnnnnnnnnntgtattgtgttggattgtgttttattgtatagtattgtgttagtattatttaatacaatacaatgtttggtattgacttgtattaattgattgtgtaaagttatatttttaatacactcgatcccaacaccaactacggatctggttatcgggtccaagtccggggtccaggaccaggtccaggtctgggtccgggttcgggtcccgaatatgagtctggggtctggggtccgagtccgggatccagggtccgggtttgggtccaaatctgggtcccgagtccgggtcggagattggtgttgaccccaaattcttttaagatattataatacaagcaaatacggaccatttattatgtattaaataatacaacatacattgtattaaaaaatttggtcgtaataattaatacaatacattgcttaatctaaacatagtgttatttattatttaatacaatacggcccttatacgacgtaccaaacgagtcctttaatgaggtagtgttggacaaaagcactatttattctaatattaagtcattttttttttttggagtaaatttgctataaaaaatttatagtgaaaattatattaaatatgggatttcataaaaaagtttgaaaaatatagcatttataggtttgccactcttctatggcatttttttacattt

SEQ ID NO: 29590 - DNA, 5062 bp, Cannabis sativa
  modified_base (1080)..(1100): a, c, t, g, unknown or other
aagttgaccagaatatgtttacaaaaattatctatgtttacaaaaattatccctaaaatcatgggatttgattacatatcacgtaatgtaaatcggtttatgatttgaaaatggtatagctgtgattttcttgcttttactgggtcaaaataatcgtgtattaaacacatctttagtctggagatgtctcgacagaaactcggttacagtgatcccaatagcgagttggggccattcttctttcgaaggtcgacaatgtatgtctggtgtagatcgcggttcttatttacaaagaatcatctgactcgctagggttgtaagcctcgaatggcatgggtgcatcccaagaactgctagtatcatcgacgacgtttgcaaaatacatatcgagtaggtaaacccatcgaacacgcttgtgctaattaccccgagattagttaactaaccttggaaatcagcagagctaattttcagggttaacaataccctatctattttttttttccttttttctaatatttttacaaaaaataattcatataaaaaattattcttaaaacctcaaagaatacatactactaaacacttttttttaaactatttattctcaattttctaatatttttactaaaaaaagttatataatatctattttttcttttttttttttctaatatttttattaaaaaaatcatataaaaaattattctcaaaagttaatatagtttccctaaaaaaagttaaaatagtaaaaatatttaattaaaattaaactccatatattattatactttattttatgaaatacaatatttaaattataatttaattaaatagagagatcaataaaacacaagcaaaatttaaccaaaatttatattacactagtgtactagttatttagtggggtttacacgaaaactcggtcgtctcgtctaccggttcttccatattgttcatatctactccaacctctcttcgttttgattttacaataatttctggggtcctcttctctacctttccccagttcccactgtcaggtatgtctttctccctccctccctctctctctctctnnnnnnnnnnnnnnnnnnnnntatatatatatatatacagacacgatagagatacatacaaattcgtatatggtaatgcgaaaccgatccctatccgcattgtatatgtaaaaacaattttgtaaagaacaaaatattgcatctgattcatgaaattttctaaatattgcagagcaaaatgttagccttttaaaaaaatgttgaaccgtaattcgtattgtgagggttaaacttttgttatagaatcatgtatgactaaattgtaaatttttcagcattcccgatatttgtatagttggaaagttagtgttttatgttttagttagttttgaatgttcagaaatgtatcatagatggatttttcaatctgagtaattatttgatgtatgggatataagagtccagtatctatttattaattatgtaagttattgctttctttcaatgttttaacctaaatagaataggtctccctcttgtggctgtgatatactataatatgcaacaattaccaaattttatggaaattaaaggagggtaatctcagggtagtggtagtggtgtgtaatcttgtggctaggtctaagatgcttcacatgggttttctgaagtagaagctttattctttgtggtgatttgaactactttattgcacgtgcctgttttatatttcttgaaatgtcttatcaagggattgagaaggccgccatatcagaagtgattatagttctttttttgattgaaaaaaatttagtatagttcttgaaataatttattataatttcaatttgtatgatccttgttcttaccagttcacaatcctatctattgttttctcttcaaaatttatagtcctaacatgataaatcaattagtattaaataagtaaactaaatgacacacctgtggtttgagaattttctgactagacatttgttttccccaaatttaatctatgtttgtgtttctagtgattgtttgccacatctagttttttatggagtaaagaactttatattatacattattgtagctcttgatgctaaaaatgttacattttgtaaatttgttgtaacgcggttctgattagattttgttgtattcactgaaatatgcagagcagcttgagttaatacatgtctatatgtgattcaagatgatagaatggagcacatataattttttcatttttcgttgttttaaacccatcaaaactagtagtggattacatataaataattatataggactggcctacgtgtaaatttattgcctgcaaatggtctaaagctcacaatagattgcatgtctcagaagaaagtaattgaacacaaattaatggtttagaaacttgaggttcttatgaatatgtcttttgtttttttttttttgtgacgttcttatatattatttgcataagaattcgtttttgttttctggttgtagttttttttttaattagggtattgttgaattgcaataaattgatgtttcttcactgcttccggttataatcgaattgattcatgtttctagcagcttaacaaattatttgttcctctttgtagtaaaagtgaccagttgcaatggctgaagctaataactctgatatggaatcaagccaaaagcctcaagttgtgtatcgatgcaagaagtgtcggagaattgttgctgcaggggagaacatagttacccataatcgtggcaaaggtgaatcatctttcaagtggagaaagagaaacggtaaccatcaagatgagccaactgaatgcacctccatctttgtagagcccatgaaatggatgggagcaccacgtgagtgatttagaagatctttgaaatctctagttcctagtaatttttatgtgcttttttatggaaattcaacattatgcacccttatgagtttactaacgtgttctggactttgaacttttcagttgaagaaggtcatgtggaagagagactccattgcatcggatgcaaagcgcggttgggttacttcaactgggcaggtatgcagtgcaactgtggagcttgggttaaccctgcatttcaactccacaaaagcaggttggacgagtgtcatttgtgaagcggtttttgttagattttagatgcatattagcttaacatagatttccaattcaatgctactaatatttgtctttgtgaatataaatatatatcggaatgcatagcatagtttgcattaacatgggaattctgtagtattgtgatcgagtatcttcctatcctatacttctattcattatttcacttatgaccaacctcacatcttgtattaatttagtattggtttgattaccaactttccaatcaactcctccttactaattccaagcttgaaataaatttgtttattcaacttctgattgactatactagggtacgtttggttgcaaataattattaagaatgaaataaaataaaatttaatatagataatgatagttactattatttttctaattgtgcttcagaatagccttctcatttttagaaaaaataactaaaactgaaaaagtcgttgcattggaaagcattacattaaaataaatcggataataccaacaaaaatttgctgccaaattgcttcaagtttatgtgtccattttgaagctacttccactaatatttcacacagctgagagtgtaatttactcataagacatgcatataaaattgcatagttctgtacattcataataacgacatcaaataatatatttattggatatttggattcttatcaacatttttgcatctggcatacctgttacatatagcagacaattattactgtctaaacacatgtatagatcagtattcaagtgaatattaaacataattatatatatttagataataatattttgaagtagaaaagatagaaaactctgatcatgcaataatcaactttaccatattctttgatgtaaatcgttggcttgttttatttctattgtattctcggattcctttgttagcaatagaaccgaaaagatatcttttctaatttttcaaaatgtagtggaccaaatgcaagatatatagaccattaccaaatacaagatatataggccattataaaaggtatggacattacttttaaccaacgacaataaatcaattaatgcgattaaaattaagtaaataatagcaatgataataataataaagattaagcaaatagaacaccaaggttattatagaggttaggccccgtgatgatggtaatagcttacccccattttcatttgtattgacttgtgagaggagaaacaagaagttcttgatctctctcaaagctcttacaataatttctgagtattcctttcttgaatctatgattcttttcgtgtccttgaatagtaaaatgacttgaagagttgcataaaattgttcccaaagctaataagaaataaaataggaaacttattcatgttccttaaatataacaaaataggaaattaggtaggtttcttctcttcttggttattgtgaatctatctcatgattttagggatattttcatgacttgcaagcttgcagatgtatgggttgtatctctaaaagtttttaattaatattgtatggtcggtgtatgcgagttgtctgcgtcatggaagttgataagatgttattgtacttaaccttaaatattcccaacttcttctatgataccaaatctctctgtatggcacattgtaggaggaactgcctatccaggttataaggtcttctctatgtgtcacccagatggatgccacatccccttgtgtagaaaataggataacaaaagagaaatttcattatgcatacttaaaaatatacccactatcaatttttagattcttaactaatttataccaaataatacctattttgacatgcttttcccttattaccctcctcatattaataattatatctagaaaaaatctctctctctctctctc

SEQ ID NO: 29591 - DNA, 1930 bp, Cannabis sativa
aaaaaaaaatactattggtatgactaagttagtgccaataaactcaatttttagtgcttataaatatgtaggcacaacttgtcgtgccttttttgtcgtgtcaaaaaattcgtgcctaaaaacgtcaacgggcaccacaaataatattgtaccaattgactgatttaatggcacgacacatgtagtgcccatttaaaatcgtaaacactatcagccacactattaggcacgaccttgccatgcccaataagttttatttttttaaaaaaaaaaataataattttgtaatttaaaattaatttatatttatatataaaatataattatcaaaaaccaataaaaattaatttataaaaatattttctactatataaattaaaaatccaaattacaagcatttaaataactaaatacaactataaaaatgagtgttcaaataaaaaatacttatattgtcacattcatatagaaactaaaataaacattacttatattttcacaaataacaatactataatcataattatgtgtggactcatcctcctcctcctcctcatcatcattatcatcatcattattctctccaaactattattgtagaatttgcggcatttgtagatagtaaagttgttgcgacacttctagcatttgtgggtagtacgactgctgtatgtgtggcatcatctgcattgatgtcatcagcgatggctgctgcatctgagacgctggtggcatatgttgcatcgatggtatcaaaggcatatgttgcatatgcggtgtctgctgcatataaggcatttgttgtaaatgtgacatctgttgcatatgcgccatctggtgcatctgtggtgtctgttgctgcatctgtggtgtgtgttgcatggaaggttgttgctccatctatggtgtgtgctgcatggaaggttgatgttgcatctgtggtgtgtgctgcatggaaggttgctgccacatctgtggtgtatgctgcatggaaggctgttaccgcattgatggcatctgatgcttcgaatgttgttgctgcatctacggtggttgttgttgagtctactgcatttatggtgtttattgcatataatttaactgcaacttgtgtataagcatgtcagtaaattttgagttgttagttattcaaattcagagtttggtagttatgtagatgatataaagtcaaattttgactacattttcactttagttggtgcagctatttcttagaagagtgttaaacagactttgatcacatcatcttctatgtatgctgagtttttcgcatgttatggagcatgtttacaagttttatggctaaaaaaatctaattttagaaatatgactagttaattctatttcttcacatatactaatttattgtgataacaatattgttgttttcttttcaaagaataatgaaattagtagtgcttccaaatatatagaaataaagtatgatcattgttagagacttggtcaagaaatgagatattgtgataaaatattacaagatcaagtcgatgttagcagatcctctaactgaaggatgaactgtcgtgttgtttaataaacatgttgtattgatatgggctttgtataatcttttgttcttttgggttagtggaattatcttactctatcatttgagattatatttatatgtaattttcttattgaggttatgaactacttgttttgttttgtgggacaacaatttttattattggatatttatgctttaaattatatattgttatattctcaagaatgattgaattaaaagcatgtagttcatatcggtgattattgtcttttaagtttatttgcttaatgacaatgatattttgttggcttaattttttaagcatatttcgtgacactggtttatttattaagtagtgtatggttaatttcactggct

SEQ ID NO: 29592 - DNA, 3133 bp, Cannabis sativa
tacataaaatgttatctggtagttcgacaagatcgaccatcccagttacattcttggcaaaagcccacttaatcacattatgggccgtaaaattacattttctagaaataaaagtaaaactacaacttaacaaaagatttgagagttgttcacattgaatctcatagttaccaataccccaataggagcgtattgataaccttctcagagtcactctcaatcaacacaaaattatgcttctttgagactgtcgattccacagctaacagacatgccacaaattctccaattagagggtcagagaagttgagcactttggaagcctcttacaatattgtctccttatgatccttagccaaagccatcacacacatcgaactgcaaccaactttaatatcacgtttgattttgacctggtcttccaaagaaggggaccaagtaggagacttagttgtcaattgtcattggggaaacaaacaaacaagaaccataatctgtgtaacatatatagaaaaagtcaatatattgtttaatattacacatagaatgattgtggatcttatcattacgggctttccatatcgtgtcgactacaattgaagcatacaagaacaactcctgaacgtccacacctctagcctttagattttaaagaaatttaactcaattccacacacgggctccagattctaaaactggaaaaataccccatgagaaagatctccaaaggtgaaaggcaaattataataaaaaaaacgtgttccatcgttttttctccctctccacaaagcggacaggaaacttcctccatatgcaatcttttagctagaatggagagaataggtagggcattagagagaatgctccaccaaaaaatcttgtgacgctccaaaattttcgaattccaaattttattccacatagtaggagtaacaatgaaaggaggagcacgatttaaggtctggcccagataggctcacttaatagagaattaattatttgactctttagtctaaatttacctgttcctaccctgaccttggggtttatctcccttgattatgttattagtagtttcatgattgaaaatagactagagtttaggtaagtcctaaaaggaaagattattgaaaacaaatagttctctcaaacatatatatagtaaatatttatgtttatggtagagacattagttttgtccctatggtagggatacttttttagctcttaattgttgatctaatagtaataaagttgaacaaatgtgatagtaatagtggaacctaactagtaatatttttacacattttttgtctttacactattgtcttctttttcttcatttttttttcttctaaaaaactaaatgcaatagttatttcattttactttttactatacttaattagtaatattttatttttttcatatttccctaaaaatattttttttagtacaatgcttttaaaaatattttttagtaagtttgttgaggattaacttttttaaaaaatttattttttaaagattattttatgtcttttttagatttattttctttataaatttaataaatacaataattcataataaaacacaaattaatatgtatacattaacatatatttaaataagcatataatcaagtaactcatattaaattgagttacagataaatacttagtttaattttttacggtaataatacttaagttaaaattctggaacttccctaagtacctagccactaagtgttaagttaatggccacatgacagttcttgattagtccaaattattaaattttattttttatttaaaaattaatctaaatatatcagtaaaaaatgacacgtgaataatgacttaacacttaatgactaggtaactaggaaagtttcaaaaatataagttatgtattattaccgtaaaaaaataaacataggtattattacaatcaaaagttaaacttaagtatttacgccacaaattacttaaaataaattaataaatatttattaattcatattaaaataaattaatattacacatgattgtgtaattaatttgaattttatttgtagggacgctaatcaaatagcacataatgtagccaatcatgcattgataaacaatgttacatgtactttttaaattgggatcgaactttcttatgttcgtcatgctttacagttggagtggaaaatagtgttggtgtgtcgtgctgagatcttaaatttactaaaaagttactgatacgaacacgacacgtgacacaaaaaatttataaaacacgaacacgactcaaataagttcatgtcatgtcgaacctacaaaatcttatgtcgtgttggcaggttgtaagctaaattatttattttattgtcatcatgtcatgttcgtgttatgttgaattttaaaatttattttagatggtagacatgaacacgacgtgtaacataaaaaattaataaaacacaaacacaagaagcaaaattcttgcatcgtcgtgtccaacccataaaatcttgagtcatattcatatcaaacctgtgtatcgtgacctaaattgcttccctactttatggctcaacttgctttttccttgtatagatattttgaagtcattaatgaataaattttattttattttttaaaaaaatatatattaaataaaaaaaataataaaattgttaaaatttatctacagtatatactcttcccaataaaaataattatattaaaagcttaatatttttatttattttttaattattttgaggattaatgataatgtagttatttttcataaaattcttagcaacaaaattttaactttaaaatagtttctcatttaaaacttaattatttaatttattttatactagtaaacatttttatctgtgtgctaattacaaaatcataaaaataattatatatttgattgataccgcaagtaatttgtaggaggtattcaattttttttcttcttttgttcaatatataacgatataaattataaaaagtaaatgaactaaaatatatacaattaaatactaaattatataaaattttgataaaaagtatgttatattaatagaaggaataggtttcaatggttacatttttattgt

SEQ ID NO: 29593 - DNA, 1939 bp, Cannabis sativa
ggttttctatattaaagcacttttaggaatatgtttgcatctgtgatttatatatttcttgagtgttttataaatcctaacatgaagacatcattaattaataaatgtcaaagtagcataatatataatctggctaacaacaaaattattacactaatacaaactaagtacaaaaacagaattaaagtaaaatgttgtgtcttaaaaaatgaaaattaaatgaagcacaatctagatggagcacaattttacaacattattgggccttccaagttgtggaatctagataaacacaaaattaagaaattctcttagcagcatcacaataacctttttttttcacttagtaatcaactcaatgattacatgttacttccaataagttaaaatacagaaaacaatttagccttaaataagcataaatgcgcaagattataagagagagatagagtacatcaatttctccctatgattacctgaaaatgttataggaaaaaaaatatattaaccatagtaataagaaaaatattaatattaaaatgtattcttgaaaaaaaaaaataaagatgttggacataaataatgcgaggatgagaactattgaatatgtgcatttacaaattaaagtattttgcttccaatctaaaagctcactttcactacatgtggtcctatcaaagtaaataaatttataacaattgataacagaacagtaagcacaatgcttttctaaattatatcctaatcatatattgtcactttaatttgcaatgccaattaataaagatgagttcaacagacaaaatacactaatgaggacttgattctccatcaacacactaattcacaaaagaactcgggcaactctcaattagcataatgtcaaatgtgcaaataagaaaacaaacaaactaaaattgttcaaacaatatttaaaacttacaggaaagtaaaaaaaaagtttgaggattaagaaaatacctctataaccaagatgaagataataagaaaagtttttacaaatgaaaattacaaatagaaaaacataaactagagacctttcatgaatcttctagataataataagtggatataccttaaaagaattaaaaagaaaaaattactttgaactttcaaagggaaaaaaattatagttctttatactaacttcaaaaaaaaaaagtttccactaataacatcataacaaatatatataattaactcttacaagacatgctcaccacaaaatgtttgttaaaatcatagcaaatactataattttaactctccaattacaagccacaataatatagaacgacgtaggagacatgatcttatagaatcaagaaattaaagagcttgtaatctaatcaaaaaatagagttaacgaaagttcttgatgtgatattctgtacaggaagtttgtgaactgaaaaattaaactcctctctccacataggattttttcaaccaggaaccatttaactacatcagcaaaattagactcctctccacacataggatttcttgaaccaggaaccatttaactgcatcaacaacaaatagacaattactatatgcaaagatagtagagtaaaagaattttgtatttttactcatgcacatttctagtaatatgatattccatatagcttcttataaaatcttagccttatattggttctaaaacacacttgaaaaaaataaaaagtgcccacaaagtaacttgaatatttctatttgttaacactctttgttatccatgtttccagatgagtgacacgtggtattttagaggagtgttcagttcgcatattaccccagggccggccttgaaaatttatgggcccaagacgaattaaattttggggccctcaaaaatatatcaaaaaaagagtgtcatgggatttgaacacatgaccttggacattatgtcctc

SEQ ID NO: 29594 - DNA, 1484 bp, Cannabis sativa
gccgccggcccccggcggagccggcggcggaagagaagttccggtcagggaaagaatctcaaaccttccgtggagagtgatcacgcctcccgaagccgaaggctgacgtaacgtgacgttagtcactgcgcccgtcccgctgaggatacagactcctctaccgcggcgacgggcgtaacttgacacggcttcgactacgtcggagccggccgagatttccaaaacgtgagatctgagcgcgtttggactatctcttgttatgaaaataggtggtttgggcttgtttttggatccagaaggacggccacgtggcctccttccggaagaaccgcttcctcctcctactccgccgcctccaccacccgaacttgtggttggtgcgtcggagtggtgagttggcgagttattaagatttgaatcgttgagttgaagatctgccggtccaagtagttggtggatattgtaacgtgaacccactccaccacctgattctaacccagacattttattaattaatttcttactaattatatttagtacgaaattaattaagaagagaataaaattgagttaataataataatggatctgatgaaattttgagaaggaagagaagtattattattaggtatatagctgggaaagtgagagagaaagtggtgtaattaaagaaggaaagaagggtttgaaaatttattaataaaataagtaaacatacaagcatgacataattgagttagattgatataatatatagtctctctctttataatattataatatctatacatgtgtattcaaaaaagttgtatgtatatatataataaggaaaatttaatagtaggaaaatctatgttcgtatgttcgtttgttttttttttttaattaaaaaaatccaaatagtttattaagctgaagataaagtttaatgggttgtttacgattcatatataagaaaaccagttcaaaatacataagaaaaatttatataatagaataaaaaatttagaaaaaattatataaatatgttcatatgaaaaaaaatatattatttttacttttttaattttttatttataaaaatatctttttactaaaaataattaatcgttattacggttgttttatagtactgtgatcatgagtttatttttttgtttgttgtttagagtttatttataattgatttgtaattgtattgtgaggttaatttattgttatttttttttaattattttcttataattttatagatatgtgtatagtatatataagaaaattttacaatgtacttaaaagagatgcactaatatatttttatttattttggtattcgaaataagtttttaatcaatttttttctcatagtcatatatgttatagttatttaaaaatactctataaaattttaaaaattttaaaaaaacataacacgtcaaaaataaaattcaaacattttattgtactcgtaagtatttatttta

SEQ ID NO: 29595 - DNA, 2393 bp, Cannabis sativa
tctatttatctatctcttgactcgaaatgggagcaggtttgaaaaaggatcttagagtgtctaggattgggacaataattaaaactcacaacattcaaataagagcataaaattctaatattatctaaaattaaacacaaagataaatttaaaactagagaattattaaatttatgaactaagcttttacaatcgtgtagagttgtatatcaacaacattatattaggcttcgttattttcatattattttatatttatattatgttattatacatttatttttcatattgattttatgagattccgtaaaaataattaaagaaaacttgtaaaaatgtaaattataatccatcaatatataaaaagaacaattttaattaaaaagctttgtaataaatcttgggcctaatttattgggcttttattttggcccaacagaaaatttgagcgataaaagagaagaaaatcgaaaaaggaaaaagagagagagagagagatcgaaggtcgaaggtcgaagaagaagaatgggagattatcactacgtgtacaaggatgtggaaggagcatccacacagtgggatgatatccagagaaagcttggcaatctcccggagaagccaccggtgttcaagcctcctgcctttgctccagcaccggacgaagcttctattcctaaggacaagtcctggatcgaccgcaagactgaagacgagcttgaagacctcgatgatgaccgtgatctcgatgacgatcgattcctcgaagattacaggttttatttttaattttctctttaacaattcaaataaaattttaatggaaagttttcaactttctcggatatcttttgaatttggagttttggattagttattatattttatttgtagaaaaagttggaaattttgtttttagtttctggtaactttatggtgatttgagaattgaaatatgaaaagatgtttagagatttaaagacaatttatgaaaattgatttgtttaactaaaattagattggtcattttaataggaagaagaggctagcacagctgagagaagcagccaaagttgcaaaatttggatcaataattccaatttcaggatcagattttgtgagagaggtctctcaagctccatctgatgtttgggttgttgtgattctctacaaagaagggtattatttattattattcttcatagacaagatgatttttcaatttcttccataacaaatctcagtgaagttgttttctgtttataatgttgtaaattggtgttttgtaggatcccagaatgtggggtgctgatgcaatgtttggaagaattggctacaaaataccctgcaactaaattttgtaagataatatcaacagattgcattcccaattacccagatatgaatcttccaactcttctagtgtacaacaatagtgcagtcaaagctaattatgtaggccttcaacggttcggtaggagatgcacaccagaaggtactttctgaaccattttcattgacacaattagtattttctagccttttcatctgttaactagctacagtgtttggaatatcaggtgttgcattagttctctgccaatcagaccctgtactcaatgacggtcaaagtgggagcgatcaatcgagagaagctgttcttgatgaagttcgccaaaggttcatagagaaagttgtgacacaacatgaagaagatgatgatggatcttcaagtgattagtttcttagtaattcttttagtttgctaaggaattgagtttgaatttcagtagttggccctgtttctttgtccctctttgtgatttggctgctggtttttaccttttttgttagttttaatgtactctaactaagattattggttgtgtgaatttgagtctaaatgctcacctcaatttttcgttaatgttataaattaactttcatgtaccaaaattagactcacgaattcaattcttcaaagtctgtttactaaaacagcattttcaatcaatggaagaaaagaatgaagtctcaccagaaagaaactcggctactaagctgtaatgaatttcatattattgtaaacagataagcatacaaaccatgttctgagtttttcgtgccatattatgttcaactgaaaagcactgttcaataacatgctcacaagagaagcaatttttccaacgattttaagacgaaataaaacagtgacccatttctcttgctaaaacaattgttgacatcttaagatgtaagtcctagaaaaaatttcagtaaaatggactaatgctacactttccagaatccgaacggataatcaaacttatggactgatccacaaactcatttaaggtgttacaaaaggataatctcaagaaaggtatgcttca

SEQ ID NO: 29596 - DNA, 1984 bp, Cannabis sativa
tagaaacatgttgattaacaaggctaggattattagtcaaaacaaaaggattattatcatggggcaagcagggatcattcagaatactaatcgaagagccattagtaatagatcttctagcaccatttttaacaagagtttgagctgcccaaatactcctccaaatgaaacttggattttgtcctaacttggcattaagaaaagaaccttgcagataatatcttgctttgtaaattttccccacaagtgtgtcctcgatagtaagcaatctccacccttgtttacccaaaaaagagagatgtagtcacaaaggtcacgaaagccgaggccatcaaaattcttatgttgacaaagtcgcttctaactaacccaactcactcccttacttgttgaattcgattgggatttccacaagaacctcgccatcataccttcaaggctagaacaaaattcttgagttaagagaaaaacactcattgcatagctaggtaatgcgtgtgcaaccgacttaatcaagatttcttttcgtgctttagacaaaaacttagtctcccaactaaaattttttttcctcattttccccttctagaagccgaaaattgcattttttatttctccccattacgcatgggagtcctaagtaaaagctatcatccgaagcctcattcagccccataagtccacaaacacgatcacgcacagccatggtaatattctaactaaaaaagacagaagactgagcaaaatttacatgttgacccgaagcaagttcataactatgcaaaagtcgaagcacattctgagcttcattctcattggccttacaaaacacataactatcattcgcaaaaagtatatgagagaccataggagcacttctagcaacacggcatccattcaaccaatgatgtctttcataatgttttaacaacaacaaaagaccctccgcacatatcaagaacaaataaggagatagcggatctccttatcgcaatcctctacccggagtgataggccccattgaatgacctccatgagtgacattgtaagtaatcatagtcacacaaaacattatcagttgcacccaatgttgattgaaacccatatgaagcaacatatttcaataaagatccattcaacgtgatcataagctttacttatgtcaagtttaacagccatataccccaccttaccaactctcttcctctttaaataatgcatgatttcaaaagcaaccataatattgtcaaaaattaaccgccccggaagaaaagcactttgattatccgagattacaaccggcaaaacttctttaaatctattcgccaaaaccttcaaaattattttataaagcacattacataaggagataggacgaagatcagtcatagattctggttgtttcttcttttgaataagcactatattggtatgatttaactcccttggaaaagaaccaaccacaaagaaattcttaacaaggttaataatatcattacctacggtgctccagcatttttgataaaatcccgatgtcataccatcagctctcgaagatttatccaggtgcatttgaaagagagctcgtctaacctcatcatctaaaactagctccagcaacctgctattgtggacattcgttatagcagcaggaacacactctaaaacatcattatcaaccacggctgaagaagaaaaaagcctagaaaaataatccacaataaccgaaggcaacctcccttgcaaatcgacacaaacaccaacaggatcttttaatctttgcatcgcgtttcttcttctcctagcagttgcaacaacgtggaagtactttgaattaatatccccttcacgcaatcaaatttgcttactcctctgcttccaaaagatctctcgctgcagtaacactttgtttaaattagcaaaagcaattttatgattctcgatagaaaccccatcacggtctctcttccatatttttaacctc

SEQ ID NO: 29597 - DNA, 2633 bp, Cannabis sativa
attctggtgatcattatggattacaagtgggaagatattttcttcttaattcttaattttatctttgtttactttttaatttgttgggagacgtgagactatgatactagatacacttggtttatattatttttttttttgttttttttttttcaatctttgagatagatttattttttatctgctattgggttatgctattttttttaactttgagaaaaatttatcttttatcttttatgaattatgaaagcataataaatatttgtgagaatatattttttttaaaaaaaaatgatagttttattaaagcaaatcagctataatgatagcttgcaaatctgtaaggacaagccccttactataacaacgatatgagtataaataagtatgcctagccaatgtgatgcctgctggtactgtcactgatccgcgctgaaaacctccaagtactaacacgattaaagtcaacgtgaatgcatcagtttttgctttagacaagaagattattggattcaggtggttggctagagaccatgagggtagagtgctctttgcttctgcaatgttgtagcagtcttcaattgatccttctatggttgaagcaattggcctcaaagaagttttgagctagctagttgaaaactactaattataatttcctttaagttgtgttggaattagattatcaagtgcttgtcaatgctattcataacaaagtaactatgtctttcccttttggtttacttgttgcggattgtaatgttcttctcaataagttaaggaatgtttctcttcattttgtgagaatattggtttaatttaaatttaattttttttaattattttaaatttttattttgctttaatagatatttgatgggtttttcataatcgatgtcttaattaaattatattatattataaatgacacgtatataattggtggaaatttttctcgaccctaaagctacaccttccaagattaaaatttttgcatagaaagctatcctagccctttcagtagctacaagtttatgttattagaagaaaattattgattcagttatttgcttcaggtgttcacatgtttggaaatcgattggacacgctctatttagttatcgacatgtcaagtcggtttggaaatacttttattttccaattgtttatgagaaagctcaacaaatgtgcaacgatgattatttattttatctctctagctactttacaaactcaggcaaagatgaaattaataatttgcattatgtgggtgatttgaattgaacaaaacaaaatactccatccatatggataattataattagagtctctctcaacctcttgttgcacaaaattcaactccccaatctcaactactagaccgaaggatggtatcccatgaaaactacctgatctccatggccttaaatttaatgtcgatgttgtcgttggcacgatcacgaagattttgggaggtgagattgttcggagtcataaaggtcaagtgatgattgctctttgtctaagccagtccaagaatactttagattaagtaaaaccctctttcatggtctcaatggggctgcccaactaaatttgctaatcactcaagtgtctcataagccttgaatactacattttatgatttattttgtttcttaaatttgattatatagatgtttgttgtcttttattttctttctctagtattgttaattttttatgttaagagaaatgctaattatgttgcctatgaattggcaaaatatgcactagagttgaatagaaatacttgttagatagggaaaattctacctctcattttctctcttatggtatctatttgtgatttataatagcagttaaattttttctttaaaaaaacgtacaactttatggcttttgtgtatatttaatttaattcatatataacatataaatacgtacgtgtacactagtatctatacaaagtaaacactttatattaatttttaaacattttttttttatttaagcgtttatatattacacaatgtataatggccacttgagctaacctcaagtgattaattaatttttaaacactttattacgtacaaaaactttggctgacttgtataagttataattaattactttagttccccataaaattaaaaaattaattaatttagtgttacgcttacgcatgatcgaatgagatccaactcttaaacaaatgcaacgattaaataaaatattgtacattaatatattaaaacaaaatatagttttctagttaatagttgctattaaataaatactattgtacattaatattaatctttctttttaaagaaggatgttgattaaataaacaaaaattagaactcataattattataaataatattttcagggatagttgacacattaatcatacctgtaagatttctagaaacaacccatctagcaacattgtgagcagcaaaattacaaagtttcaaaaaaaaaaagcaaagttacaacctaaaaaactaggtgatagtctattacaaataagaacaaagttatcaacacgccagttaaaggaagatctccaatcaaagctttgataacaatattttgagtcactctcgacaataagaaaa

SEQ ID NO: 29598 - DNA, 2769 bp, Cannabis sativa
tctgagctccactaactattgcatatagtgttatactaatttctcctttgaaattgtaaggtacaaatggaatcttcataatgtagaactggacaaacggctaagcttttttgaatctaactgggcattctttttaggttttggtaaagtactttttcacctttattattgttttttgagccagttttgtcatatatataatcttcatttccttagcagctagcagtggtttattctacatgagtaataattgtgaccttaattttgaattggtaacttctaagttatgcagcggccttcatatgtggtggttatttgctaagaacattaatgtcatttttagaacatacattccctttggatactcaatagtttgtcctatgagatgaacatcagaagtttaatgtatttatgatttagaattgaatacaggagggagtttgtttacaagaatataaaatggagatgttaaatcttattctgttccttaagcagtgtagcaagatacctttttaaaattactttgatgtcaatgcaggtagtccatgtgctcttcctgttctattttgctcgtctttcgtgtcatctggtgttatggctatgctgtatccactggtatgcttaaaaagcctttctgttcccagttgtttaaattgaagtggatgtattctcattgcaatggtaaaacaaaatgcgtgtttcagtttgttttgacagcgagcaactcagaggccgagaaagttatctcttctcaaagaaataaatggggagatacaagattgggaaggcttccaatattttacgtggctgatgtgttatcgtaagctctaaagctatcatattttcagatgtttttattgccattgtcattagcagtgatgatactacgaaaaactaaactctgccctgtttattcttgttatgtccataggatgaagatcttgtctttcttaccctcggaacctcatgaacagctacaagaaaacaaactgaaatgaaaaagaaaacatttttggctttaagcttcgcttgggcatcttcaaaacaacgttcatggtaatgaccatttcgtgctctcttaatcatctttaatttattagaatgatggcggtggtgtagtacacaacacaagcagattagccagcagccaaaagagacgacgagtttctaactctttcgagatcaagcatatcctgaggaaacagcttccatcgaggtatctagttgtatatcatgtacattcatagaaaatttcacattgagaaagaaaagggtttaatctgtatagcatttaacataaaaacacacacatacacaaacaaccccacgagctttatagtgtttatttcattattgtgtgccataacataacataactataataaatatttcactgctttattattttttttagaaacttctgtggaatctattagatttggttggtcattgtcttgatttgaatccctcatcataaaagctattttcagagagacccatcttattagaatcggacagtagtacggcatggcctattgaatcatgtgtgtgtatgtatatatacatataaatatctttattgtatatgcttggaacactttacaaccattcattcacttgattataaattggaatagaatctctattgatggagacctacacctagtgagtgtgtagtgtcggtccctattatatatattgataatatatcttctcttcaccaaaaccataagaaaaggtttcacatttagtaatccccacttcgaaattagctgtaacaacatttttttagggcaggtaagtataattggagagttgtttcctaacttcatatttaatgttattttttttcatgtgatttatactagtataatagagttgtttggtaaggttttgtggcctaattacttttcttgtatccttgatctcgtttattttatatgagatgaattaatataatcaatatttccttaaaaaaaaatagcatttcccacacattagataatcgacagaaacatgcttttcggctccattggtagtatttttttttaagatgtataatatagttatttaggatcttattaatttttgtgaaattttaaataatatagtgtccaaattatattttcaaaataatctatgtataaaacagtgctcatgattaacaatccaaaatccaaaaactatttaagttatttagaatcttacatatatagttctattttaaaaatttaaatagtttatacggttgaaaacatgaaatatgctgttttgattagcaaaatgattaaaaatgagttaatttacctaaattattgtactcgtggtgtccaacaacaataagtaaatactaattagttattaattaaaatatatgtgatttattattaaattacatcaataagaagtggcattattaggaactacttgtaatctttaacacttaaatgatttcatgaggtttcacacattatttttaaattaaaaagtataagccttatttagtgaataactatacgaatagttatatactattagtaccaataacataaactatatggcatgagagtaacctatgatgcattatagaatgcttttataggaaatttgtactttctccactaatctttaaaagttaatctttgttaattataaattcttattataattgttttatattcaaaatcacatgttgaaatattttttttatagtaatatttgttataattataatattatttcagtaaatttttaaaaaatttcgaaaat

SEQ ID NO: 29599 - DNA, 1316 bp, Cannabis sativa
agtaccaagtaattgataataaaaagataggaatgcctctgagatgtcttctagtttgtcagttcgggttccatgttggccttcgatggagagaatactattggctctcctcctagccttgatactagcatggaagatggctgtgttgtcatctccatttttaacccaagcaatcttggatttctagtacaagaaagaattgagacccttcaagagttgcccatacttatttcgagcaatttcttcctttactataagcttcgggcagagtggttctgattgcagcttctgttgtacttcaagtagctctttttttttttgctttatcagtagcactttgaatgtttgaaaagtggttttgatttagctctttaaaagctactttgagatgctttagctttgtaactgtttagaaaattttagagccgtcaattcattggttccaaaccccttttacaatctcagagtatcgaggatgagaagtccacatcttgaaatacttgaatggattttttccactaagtacttcatgagataatgagattatagctggggtgtggtcaaatagctcctcagttgcaaaaattactttagtagaagagaaattatctaaccacaattgattagcaagaactcgatcaattttggagcatattcgttcattcccttgtctcttgttattctaagtatagaagccgcccctatactttatgtcttcaagttgacatgtttcaacacaatcaataaaatctattgcagcattgtatttcactctttttccaatcctttcctccttaaacaagatgtcattgaagtctcccataaccatccatgattcatgggaagaaaagctccttagatcagttcataatagtttcctaccctctaactcattgaaagcatacacaaatgtagcaaagaaactagacttaccatccatagtagttacttatagatggataagttggcttgtacactttattatgttcacagagtaacttgagggattccatgccacaattattcgacctccatcatgccaagctatgttagtcgtaaaacaccatcctttgaacatatttaagtataagacctcaagctttgaggccttaactctcgtctcaaggagaccaacaagaccagccctttgagcatgaagcatgctcttgaattgattttgcttgtagtgatcgttaatccctcggacgttccaaaaaattattctatctatttccaagaggaggatctccccctcatcttatattactcattgtagcaattttgttggaccaaataatgatctcactagctgctat

SEQ ID NO: 29600 - DNA, 2237 bp, Cannabis sativa
  modified_base (42)..(58): a, c, t, g, unknown or other
  modified_base (2197)..(2211): a, c, t, g, unknown or other
gaaaaaaaaaaatttgggcccctgggctgggtgggccctagnnnnnnnnnnnnnnnnnctatgcccagggccgggcctgctagaagcttatattattatttataattttataagttattaataattttttagtagtatttattatatacaaatatgtaaaatttaatattaaattataaggtgattctacaatacactcctttaaaaaaaaatgtactgatgcactcaattgtttcgacatcactactacaaaaatagtttttcctgacgtatttaaatagtcgtttaaaatattttcgtcggttcttataaccgtcgcatatacgaccgtcgccaaacgggtaaaataggcgatggttaaaaattgttgctaatgtggacttcgcgacggtttaccttcccgatggttttaacctgtcgggaatataaaacaaaagagagaaaaaattaaatacagattcagaaaaatctgtattttttcctattttttcctttattagttttataattttacctaaattaaaataaaataactaattaatttaattaaaataacaactaactttaaaacacattaaatttatacaatagcaatataaatatatataataaataaataaatatatttgtaccgagctcggatagagagaaagagagagagggagacgaacgggaggtggtggtggtccgacgtacgagacggagatgagagggacaccgacgggaggtggtggtggtggtccgacgtatgcgacatagaggagaaggagaccgacgggaggaggggtgggtggagatcgatggacgagagagatgagaagaaagggagatcgagagaatagggcgatggtgcagaggcgtgggtgagattttggagagttaagattttcattttagggtgtgggaaatggaaaagaaatgggtgagaagaaataggtaggcatgtgggaaatagaaaagaagtaggtgggcacgtgagaaatgtggcgagaagtaagtaacgattttttattgggctcttatacctgacggtttaaaatcgtcgcctatataggtgacggttttaaactgtcgggtataagggcccaataaatttacgaattccaattaaaaccgtcacctattcctgtaattacagttataaaccttcaggaatactaatttttcctgacggttttaaacagttacttaatttttttagcgacggtacaaaaaaaaaatattttaggaccgtcgcgaattctgacttttgtagtagtgcatccagaataattttttaatctaattttttttcatattcatatacgttatattatttaagatatcttacaaaattttgagaaattcggaataatttataatataaaaaataatgtgcaaacagtatattttatacgcgtataaaataaaatagtgcaacatactgtttgaacgaaattttcggcgtgttaaattttttttaaatttattaaaattttgcaggatgacttaaataactataatttacatgatcatgagaaaaagaaattattttggatactaaaataaatagagatgtatcgatgtattcattttaagaggtgattatagaattttctaaaattatattaataaggatataatatgtttaatttggttatttttggatattattggtacataccttttagcttttagagcagtgacaactgttgttttaaaataataaaaaaaaaaaattatgaagaattggtcccaaaattctactcccacaaatgcttactatagtgagatctattccttctctacatgtaagtgaaggttaagagctactttaaattatttttatattattatttttttaatctcttcaaatccaattgagtgtttttttagtgttttactatttaataataaagtatgttaaaatataatattaaatgaagaaagaaataatataaataaattgatatagggtaatataaaaatttgaggtaaaataaagaaaatatcgttttggtgatatattttaaataatagatattagcggtaaaattaactaaactctatgattagtggcacttaatcacataaactaatttttaatgataaattcgcctccaaacctcacttctattagttatttatcacttctgttcaaaagactttattaattaagtgctatggtggacataccatgtgacagtcagtagtcccnnnnnnnnnnnnnnnaaataccgggtaagctgtgcaatccc

SEQ ID NO: 29601 - DNA, 3541 bp, Cannabis sativa
tatataatgaacgaaagatggaaaaacatgaaatattagtttaagtatgaggtatagttatatttgattgagatatattgattttatgttcattggtatttggtgaaggaaagaacaaaaaaacacttgtggaatattaaattaagctttttgtttaatttttttttcattatgctggtggtatattattttttttttaccgcgcaaacagtaaaacaaattgaaaataatggagttgagcttcatctatataaccaaaggcattttaggtattaacatttataaaaggctatttacttcatttttaaaaacaaagagacattaactttcatcaatgtgagatttaaggccatttattacaatatccttaataaaaccctataaaatcctaacttatacatagccacctcactaatctaaaaaacctctatgtttctcttcttatctttctttgtcttgcccaccgtcagcactagaaggtatgattttttcttctctctctctttttttgtctcgcccatcgctagccctagaagctcttttgttttcctttcctctctctctctctctctccccctttattttctacgatttcacccttttttttcttgtttgcaggtggtaattcttttttttttttttgcgagataacttcaaatatgtcgccacaaattaataagtagcaaatacgactaagagttatttatttttgacgacatgaggactatttgcagcgtcaaattcaaatattccatttgaaaaaaggagtacgtacggtaaaaggacctttttttggctgcaacttgcgagaagtcgccccaattagtcaccataaatactaggcttttttgcagcgacaataaaagttatcataaaatgacatattaacaacgacatacttttagtatcttattagcaacataactattgccacaaataacataacaacactaatgtattttccacaaatttttagcgacaaaatgttggtacaaatacctttaatgataaaattttggattttttgcgataaaaatgttgccccaaattaacattatttcttctggcgaatctattattaatatttttactttttttttttttgataagtaatagaattttattacaaatatttcactttttgcaactgataacaatcatagtacaactaacaagttatactgttatccaactactctatgtcttctatacttgttttctccttttgaaattaaataagaaatctaatacaaatacctcttttaattttatgtacaagaaatttaaagtgttattatcaacactgattctattatctatatatcaatgctgatttatcattagttttactttaatgtatttccctttaaatcttgagcctatgatatgtactgtattgtgaatagaaaattttcaacaaagaccttcaataggcttaggatccccccctttgataatatcttcttaactttgctctttttacaaattgtgctaaggaagcttgaccaatacggattcaacttttggttgcatacaaatggacgagtaggtaagaacataacagaaagataatagatatattaatatctttttaaataattttagtagacctttaatttatatgaattaactaattatatataaaaatacgttttccaactagataaaaattgaggaataaataaatgaacaattaaacttatgtctccattgcactctccgatgatattatatgacttcaatttgaccaaaatatatctcaatatattaacaaattaattaaaagtctttggtcaatcatgattagatcaataacttcaattttatattaattttcaattgaacttgaatttatatataatcgaccctctcaaatatgcatatttagtcaaaggtaaattataggtagatttctcatattgtgctttgagtagaatatatattttttatatatttatttattaataaaaaattattctacactttgtcctaattttcataatattttgcaaaatagcgtccgacacactctctaccagccccatcaagagtttcagacaataattaatcaagaatttcagtcagtttattaaaaacttcaaacttaaattattatttaaaagaattatcaacaaagtaaaaaaaaaatataaaaataaaagaattaagcttatacatttccactttttactctaataattattgatcacataatttttaataatttaagatataaagacctttcacacggattgtgaagaaccgacaatatctaaccttaaattgccaactcaatcaaaacataaataggtcaccacctacaacaattaattcaagtccaacatgaccaaatcaaatacttactactcaattaatttaatatctaaggcaagttaataattatactcataaatacatatacaattaaagttgacctatacattgtctataaatatcaatccaatttggctctctcaaaacgcttaattagtattcaaacttcatcgagccaattgctagctagctactaagctatataaatatatatatatatatattatatatatatgtatgacataacctaaacaattgatttggcttaagatttgactaattattataatcaattaattaatgataataattacttggcatctttaaaataaatatatattaaattataaatgattaactccaacggaaacctagtttagctaattaataaacccgtgcaaagtttgtcgtctttcgttggccttttaattgagattaaaatataataatggtaaatattgaatttgattatttcaacaacgataagatcaacgactaaatttaaagtcatctacgggcacaagaaaagtaattaacagtactctaatgttgagatcaaatccgagagagaggtacccaccaccacgttctaccagtactataattaaactaataattaattaattaattaattaatcattttcaatgtactattattatttaattgttattctaaacattgacaattaatagtgatatgtatatatatcatgatccacccacctaaggctaatttttatgcgcatgtccaaggttttctttcacaaaagtaatattactttagttattaattaattaattacaccaatgaatgcaaccttgagcagctctactttatatataatggaattcttgctttacataaaagtgggtttggaaatttggatctttaatttatgcaactcttatatttatttatattaaattcaaccactacatattaatattattttttgatccgctggaaaaagaaaaaaaaaaaatataataacatcttatgtacttatagtgtagtgaaaaaattaggttaattaatagtgctttttttttctttcttttttattctgattattaaaattagtgcaagtaaatttgttaattatttaattgaagtatatattttatggctgaactatataataaacgtaaaaaaatgcatgtgtaggaatatatattttttttattatgatctgtatatatatatata

SEQ ID NO: 29602 - DNA, 1373 bp, Cannabis sativa
agagagagagagagagagagggtacaaagaaaagagagagattgggtttgaattttgtaagaatcttctgtagataaagaagaattttaggtaagagtgtgattatactgtaacatgctcttgctcaatcaatgaaaaagattcaatagtattccagaactggagtagaaccataaattatatcgatctataaaacttgaaccagtatatatgttttactgctttaattgtttttagttttagataattttgtttgtctctattttttcctaattattatttgtgattcattaatattatcattgctaattgtttattcatcaagtttttagttaatttgattatggacactagccctaattttccacatgctgccccaatgattttggactggaattttctttttcttttattcatctctaacagttgataagaggataaggatttacaatgtgagtcataatacccccacaataatcatgaataatattaatattttattatgcaattgatgatctatgtactaatttttaactaaggtgccatctcacttattatttatttataaatagaaaaagttgcgcagcttagggagactttggatgcatttcacttgattttatttacttttaatttagtcaaattttaaagcttctgttaactgtttaagttaattttacaccaaattaaaagttaaagttattgtaaaatttaagctagtaaatataatatttatttatttttgaactaaatttaacataaattttacgataacctaatatatttatgatttattacatggtatttatagagaaaaggtagctaggtgagtttagacatcaaattaatgtaaaatctgtgcataacttgactcaaaaaataagttaatgttatatttggtctaaattttattaatatactctaatgcacttataaaaaaaaattattttaataaaaagatgtaagaaaattaacaaaagtattaaatttctattaaaagtatataaaaattattaatagcatatttaatttaattgataaaaatattttattattttatttatatatttcgttgttgtatattaatttctatatatattttatttgatttatttatttaaattagaatatttagtgtctagcttttctagtttgggaaagtaagacaaatatgataattttttaatgataaattcaaatcttctagagctatttctttccaatcaagtttcatatattattatgatcttatattgatatttaagtgatttgatcagatattgaaggttgaaattcgaaaagtaagttttttttttctataaaaagaaacttatacttactactcacattaaaaaattatattaggaaagttt

SEQ ID NO: 29603 - DNA, 2722 bp, Cannabis sativa
aaaaaaaaaaaaaaaaatgaagggaaagagaaaagagaaagatctgatcgtgtgtccactaatgtatcgtgtatgtcagattatgtttgaaaaattgaaatattattattattattatcattatatattatatattataatataaagatgaatgcatattttttataacccactaaatttgaagctggctgtccatatgaatagatacatatatatgacgattattattttatggatttaacttgttgtacatgcatgatgatgatgatgatgatgatgattataaattattattaataaaatttgtattggcaatatttagtctataaatagggtaagaaacttggtagggttgataaattaaagaattaaggaaaatgagtattaggagcgtggagagtgaaatggtaggggcgaagagacgcgtgtatatcattcgagacattgataatagttatctcacccttaatgatgaagataacaaggcgtatctacagttccgcccccaacgcccaaagtgtgcccaaaaggcacaatttgagatcatcgatgtggctggtgacgaaggttatgtacgcataaaaagtgttgacaacaacaaatactggaaggaactattgccacacagcgatatcgagaaaaacaattggatattggcacaagacgacgatggtcgcaccaagaacacgttgttcattattaggcatgacccagagaccaaaaaaagagcattttattgtgcagaaagcaacatgtactgtgtggcttttaccaaaaccccagtccacgactgtctcaacgccggatcaaccgacgtcgcccatgctgtgttgcttgattttctcgacatttaaagttataaattacaatcgcaaaataaagggtctaatctattgatattgattccatttgtcttctctcctctttgtaaggtactcatcatgggagcttataattaattaataagtttgtgtcaaacttgtataaatatcgatcacatccaactttttattgtgaccaaacatgtttacaaaaaatttctatatcgaaatggaagaatgtaaattattgatttaaaatataaataatcattaaagaaaatataaataatttagaatcaatatttcactatgtttagtaaacttttaagaagagaaatcaaaaggaaaaaaataattgcctatcgtgttattattagaatttaaattttttttatttgtcctttataataaattaataaacaaacagcacttcgcaatgaatgtttgacaaatttaaaattacatgaaataaattattgagaaataataagaattgattagcactctttctcataattcactatttttatatctcattcattcaaattttttgtcattgatcattgtatctctcgtactttgttattaccgtatttcacgttttatcaccgtatttcacctattgtaatcattatatcttacttgtagttgtcgctatttttctttgcaaatttcaatctcaatcttagattccatcttgaagtttaaatatttttatttacacatttttaagatctaaaacgactacatcatcaaaaataaaaaaactcaataacttatcacttgatgtgtttaatacctctcttagaattagcgacttgaactaattaaaaatatttaatatatattatattactttttttcttaatattgttttgaacatgtattgctaatgttcgattacttaatattatgatagatttttatttttccgataaaaaaaaaaaaaaaagaaaaaatatcaaaaagatgtcatagtagaaattctaatattatatatgccataattactaatttaaaagtatcattaaatgactctaatatataatgaatatttcaaatatagtaatatagagcataacttcggatctcataacgatataaatcatattaaaatgtcaattctagtgtatatatatatatatattgtttatatttatatataccttcctgacctcatatatactgagtctaaaacttatcaatgggaaaccttacatgttttatatacaaaaattcaaaagtatatataatagctatgcacacttttctttctttctgcgcaataatttttacatctttaatcataatacatcatgtataatattgtgaaggagattagttagttatagtcgttattttctgtttcttggttagttacagcttgtagttaatcagttggtttattgcaactgttttctgtttcatcacagctgtatatatatccccttgtaacgattcataagatcaagaagctattctttcagctctgtgttttctctctttctttcttctttgtcttcttcctttcgttcttcatggtcaggcataataccagatcaaacatggtatcagagccttttcctccattaatggcaaatgctgctgttaatagtggaggcaacacctctaccgatcctcagcccacacactcgaatccccctacaaatccatggagtcgaacccgtgaaacagagcaatctcgcagtcttatatactttagccattctctttctgtaaaacttaatgaccacaattttctactctggaaacaacaagtcctagctgcaatccgtggacatcagcttcaaaggttcattcaagaagttgctcctccacaacagttcctctcagatgcagatcaagcagctcaaaagtacaatccggagttcttaaactgg

SEQ ID NO: 29604 - DNA, 2282 bp, Cannabis sativa
aaattcataagtgaattagattcactttagagagtcattctgtattatttttagatgttcagtgtgttttgtgcggaattacgtttgttttcttcctattttaggttttcatgatgaagtatataatatggattgtaatgagaagaaacatgataaagaagatgaatatgatgtatttgacattaattttgaagttttaaaataatgtgagtggaaaattctaagtttgagatgtttaacacgtcttgtttgtgatcgaagattatgtctgaagattcaagtctgtttttgactaagatcctttcattttttgggaagacgtttcaaataaaatttgtgaagacgttttgactaagatcctttcctttttttaggaagacgttttaaataaaatttgtgagatgtcttttatcttttcaaaacatcttgaattgtcaaatttcgaaccgtatcaagagaattatgactaaaatattattcgtcatagcaggagatttttataagtgggcttaggggttgcagcgtttattgaaggggctgcaaatcggcgttgcagtacaatttaaaggggaattggtgctacgatggatgtatagtcaagagagctgttttggagcctcacaaagtagggctgaacattcgggttcaaaactcgtaaactcggttgacccacaaccaaaaaagtagaaaaaacaaagaagaaaaaaattgaaatagataggtctgtgtaagagttttttaaagttctcgattttattgtcacctagacttgtaacgttatgttttttcccttttaatatatataacttaaataaattatacctaagctaaacttaaaccaattcaaagtttcctatatttcctatagataaaatgtatttcatatatatatatatataaatatatataatatatataaaatttttgtagtagagccactaaaaggtcattctagtagacctcttatatgttggcattcaaaaaaaattagttaaattctttttatgatcgtgtaagttgtaactatttaggatcacttataaaattttcaaaaaattatgaatattttacaatactgaaaataaggttcggagtccaagtccggggtttgtggtccaggtctcaattctggtttagctctaagtccaggttcgggtctgggtttggggtcgggtcaacgtccggtttcagggtccggggttcgggtccaagttcgagtctgggttagggtctaaggtccgggtctagggtctggggtttgggttcgagtctgggtccgagtcagggtttgagttcgtgtcagggttcgaggtttgggatccaggagtctgggtcgtgtccggggtcttgggtcagtcggggtccaagtccatgtctagggtcggggttctggttgggatcaaggttcagagtttgtgtccgtggttcgtgtttgggtctaggtttgggtctgggtctaggtctggatttaaggactggggccaaggtctccaacttcggactctttgtaaatattataatacaagctaatacgaattatttgttatgtattaattaatattattcacattgtgctaaaatttatggtcgtaataattaatactatgtaatattttatctaaacgtaatattacttgttatttaatacaatacgactcttacaagacctaccaaacgagccctaactccacaatctagagtatacttagccaaacaatgagctaacttattagtctctttgaaattaaacaaaaaaacctttgaagctttagagagaaagagacaaagttttaatgctttcattgattccatctaagtcaccagtgtagcttgaagcttttgacaacaaagaaattgcactagagcagttagaggaacccactgatcttgaactctccaagcttgggaggaacccatttgacagccgctcgcacctgactttttggtccttctctcattgttgcttttgaaagttcgccagaaattaaagcatcactccaccaaatctctaggcttcggacttgactccccactctagacttgttcctcaaataccaaatttgcgaagataaaataaaaaaaatatcaaaatcatcatttgacatcaaagcataaacatgagaaacaatgagctataaaagggttatttgcggcaaaaccccctaaagtatggaggtttttgcaactaaccccttaatctaaaattttggtggtaaaacctcctaaacccagcttctgttagcagttagccctttccgtccatttttgggtgttaagtgaca

SEQ ID NO: 29605 - DNA, 1631 bp, Cannabis sativa
aagaaataaaaagttgggcttcttttgactacatatatcaactaggaattaaatggcccgtgggttcccaagcccgcggcaattccagctattagtaatcataatgattggtgggcctgaacaccaggacccacctgttccccgttttttggaagcccaataacatcaacaatgtgaaaattatttggctctgtgatacaatccgaattctcttccactaatatagccgcctctttattggagagaatatcaaccctttttctcttcaaatcaaaaagattcaaatcatcttcagacataaatgtggattcattctcatgaatagtcaatgttgcctcattaatgtttttcaatttagattgacccgtgtgcctaggatcaaagagagattgttggaaaatcactcttgatgcgggtgggtgattgctctgcctgggtggactcacgacttcagcttggaattgaggcacgaaattgaatgcaggggattgtggcagatcgctgctgccggtagaaggtggagctggttttctcaaatgatcaaaacttgattatcaaaaatagtacatggaactgaaataaaattttaacaaataaagtcatcttatattatatagtaagtactataacttcaagtcaaaatgtattctcaaatatatcaagtaatcattgtatgaaaacatcaaatttatcacatgaaaatcacccatattactagtgatctacaaaccttgcgaatacatttaaagtggtttgtgaagttcattaagactccgaacatagtctcctgaaacattaaccaaattgttaagacatgattgctaagcttagaaatagctaaaaatcataaattcgcaactctcatacctaagcttgtaaagctttaccaaagcttcaaacgagcaacttcaaacatcatatctgaagtatgacaaattaatctacctcctcctatacaatgaaacacctatattacaagcagtttttgaattgttatcatcaatataatcttttagttctatttttgcaatattttacatctcacaatatcaaaaataatgtcaattaaggcaataattagatgattgggaatgtgaatgttgagtcttctttccaataaatgaagcttccttagtaatcatttaagaaaaacttatattacatttatgtgagtgaaagagtattaaaataaggcaagggtgactcgtgagccgtgaagagagagcatgcctaatcgggtaagtgaatcgctattaaataaattatatgatgctaaataaataaataaaaatctcttttaaaaaataattttagatttcttgataatatttaacaatcatatttaggatcatttttttatttaatatgtttaatttatatcttgtataatttatgatataatatttataaaatttgatttctttacaatattttagatgaaaatttaatgtttcaaatgtatttttaatcgaaaatattttaacacgtgcattatatattaagaatactaatgttcaagtatgtatacatattaaaattatataccaagttattgtatatcttaaaaattaaattgattgatgacactatgatggagtacaccattaaaaataatataaataaaattaaaa

SEQ ID NO: 29606 - DNA, 1903 bp, Cannabis sativa
agggagcggtaaccacgaccatgccacacaggcaaagggatgaactgaaacagaagatttaaatgaaaaatatgacaggaaaattatagtactgaaaggaattttttatcatatcatcactaatttattagttatctcaagaacagaaagtacgcaatccagagacctccgattgcatcagcatgagaatgagtaattataaccgcatcaattgttcttagtctggcaaaaataaaactagttacgagaaagaacatactagagaaaatgcaaaaacatgataatgagtctgcaggagaagcgctgggcaatcggatggtctaacaacacaaagagatcaaaaatctctaaaaatgaaatggacagttaatggtagttttgctatttgcagaatgcgaatttgacatttatcaatgtaatcactacatatacagatattgtgaccctcagatagccagtgtgaccagcagaaaattacactattaaattaaaatgaaataataaataatcactaaacaagataataactaaccaataggctggaaaccattgaagaccactgtggtagaagaatctgcattacagaaactaattgatgaagcactgtcatgacccataacaataacagaaccaatgtagatacttactttcccgcatctataaggatgttgccttttccagatgttgtggcacatcgaatgaggatgcagtctcctatttttattacccggttctgcagcttttgagcaaacctgtaaaattaaaaatcatgacattgtctgaatcatcaaagttttattttgtaagatatataaggaatcagtttgaacttggagaaagtgcagaaaaagtacgtaggcctaaaggttgagcattcatatctcgcatgtcttcagaggattaatcaacagctcacacgaggaattccttcacttgttcctgtaaccataaaaatgatctctgattgacacttaggtaactccgcaccagagaccccccttgcattacctgctacgcatgagtcatcaagtcataaacaactgcttttggaacctacatataggggaaatcaccagaattctctgtatgtttcctcatcgatgatagatgctcttgtcatgagtagtcaacataattattatttttttcctccaaattacttgatattttactaattcacataggcaatggaagcagccataaaaaaggagcctagttattgcatatggataacagatgaaagagaattcattgtagcattagcaacaagtttagcttcttaaacaacataaagcaccagcattcaaccctgaatcatttcattaaaattcccaactaatataaaaaatctcatgtctatgccatacttgtgcaaaacacgcaaaaagtaatagcaaaagctacgtatccttaagaaaattaagaatgttggtctatttagaaacagtaaaatgatgtaaactcaagaaacttttgaagttaacataaaaaaaaaaggattcggagtgtctatatgatcaaagttatacttacgagagcatatgtagagaaatagcagtacccaaataaacataacagtgacataattgagatttctagtctattaaacaacataatcctaataatataaacgccaatgataaaacccatctatatctataattaaactgaaacagcacaatgccaaatcaaaaattaaaaaactgataataatgtagaacagccgcaagacaaacaaaccctaaacaaattatatacattaattatttaggggttacgtaccagatcgaagacaaccatcgagaaaccgtctaaagggagatgaggcagtcttaggaagtgaaattgaggaagtggagagtgggattgggcgtctgtaggggcaaaataggttagggaataa

SEQ ID NO: 29607 - DNA, 3014 bp, Cannabis sativa
agatatgggaaatcattgatgagatatgagaatttcaattacattgacatttgcatgctgctgcctaccaacgtttaaaaaggcatttttaaggcgcgcctcaagctgaggcgtttgaaaagtgcatcaaggcgtgcgccttgctgagaagaagtgaggcgttgagttgaggcctgaggcgtcagaggcctgcacctcaaatttttgggtgaaaaatgggctatttaagccctaaaacaaggcccaaactggtattttaaatttagttttctgctgcctaacataaaagacttaaaaatctttaaaaaagcccaataaacattaatgaaaaaccccaataaaatacttaagtgagccaaataaaagttaaaaataaaacccaacttttatcttcttcatagtagctcatatcttcttcacagcagcacacagctgctgcatatttcttcaagttcaacccacaaaaaaaaaaaaaatgcttgctgccttcttccttcgaattggtgcactgccctgcccctgccttccttctcactgctcctccattttcactgccttactccacaactccaccttgctgttgccttttccctcttctcatcacagaaaaaaaaaaccttgctggtttgctactgccttgttcgagttaggtgcttgctggttgctgctgcctttctttgttccataggtaaacatttgaacattatttagtttttttaattcataagccatatttagttgttcttaggttcattaagtggtgatttattatttggttgttacttttttttttgtgtagataagaaaataaatagaaaatcaaaattgagtcatattggaggagctagtggcagtggtagtgttgacggtaataatgataatagacttggaaatagaaaagttctggcttggaagcatggtgttgaagtcgatacttcgggtgaaaatgctacaaataagaaaaattatgtttacatggagtgtaaatactgcagaaagattattacgggtggtgttccaaggtttaaacaacaccttgctcatactaggaaaggtgttgcaccatgtaaggaggttcccgaagatgttaaaaatgaatttgtggagctcttgaaataaaaaacattagaaaagtgtgtggctcaaatgaaattcgaagagatggttgagccgggatcttattagactaagactagtactcccgtgtctgctaaaggtgtaagaggaccaattgataggtttgtgtgtgatggtagtgataggacagccgctgaaaaaacccataactcccaaaaatgagaaagaaatgcgtgataatgtttgcatggacattgggaggtatttctctgagaatgctttgccttttcatttggctaagagtccatcctttatcaatatgtatccctcgattggaaattatggtaggggattgaaacctaagagtatgtatgagcttaggacttggatattgaaggaggagataaagactaccgacacaatagttgaggatattaaaaagacatggccatcaacgggagtttcaataatgtcagatggatggtccgacgatagaaatcgaagcatacttaatatcttgatcatcaagcctaagggcactgtatttttgaaaagtattgacgcatcctcatttagtaaaaatgcagaaaaattgtttaaaatgttggatgacgttattgaagaaattggagaacatcttgtagttcaagtggttaataataatgctagagcctacaaagcggcaggtacattattgatggagaaaagaaagcatctctattggactccatgtgctgcacactgtattgatttgatgcttgaaaaaattggagagttgccacaacatgcaactgctttgagtgaagcaaaaaaattgagcaagtatatttacaatcatcaattggtcctagacacgatgagaaaatttgccaaaggagacattgtaagacctgatgccactagatttgcaactgcatttcttacactacaaagcatttatcaagtgaggcaacctttggaggctatgtttacttctaaagagttgatacagtgtccttgggcaactaaatcagattgaaaagatgcaagaaaaacaattttgaaggacaagaacttttggccaagtgtgatgtatgctattaggaccagaagtcctttagttgaagtgctaaggttagttgatggtgataaggaaccggctatgggatttctctataatgcaatggataaggctaaggaaaatatagcaaataatttgggtggagaagaaaaagattacaaggagatatgggaaatcaatgatgagaaatgggaatttcaatgacatcgatatttgcacgctgctgcctactatttgaatccccgctgtcattatggtgaagatttttccaaccatccaaaggtcaagttggatttgtttcattgtatggacagactatcccacatcccaaagaaagagaaaaagttgaccttcaatgtagcatttttcacaacaaggaaggcttctttggatttacccaagctaaacagacatttggaaaacgattactaggtaatgaaatgtctaaatcttttactaatgcttttggaaaatttcttagcatgttatctaaaatatttattcttttgatgtccaattttagtggattggtggactcaatatggagatggcacgccagagtttcaaaaatttgccatcaaagtactgggtcttacttgctcggcatcaggatgcaagcgaaatcggaacactttcaatcaatttcatacaaaaaaaaaaatcgattgactacccaaagaatgcattctttggtatgtataatgttcaacaaaagattgaaagatcgatatttgaggttggcatctccaccgtcaaatgaagatgatgctttgttgcttgatgagttgccatctgatgatgaatggatcattggtgataacgaaaatgaaaatgtgcaaagactaagtgatatggagcttgagagattggaattgac

SEQ ID NO: 29608 - DNA, 1939 bp, Cannabis sativa
caatatgtatttaccaccataatggaatattagaaatcaccttccatggacagcaagtgcagaaacaccagttttttcaattctcctagctagttccacagtatcacgagatgattttaatagccgaatcttacatgttactggggtgttcaagtttctcttcaaggtagtcaatatctgtaatttgaagaaagaaaggaaaatgtgatgttgtgtagataaattacaaaagctatttaaagaaagtaaaaagagaataataaacgttacacacatcatgaataagatctggtttactcaacagtgctgctcccattcctccgctcacagaaaatgccttagggcagcccatgtttatatctacagctgcaacatcattacacctacaaaagaaatttcacaataattcaatcaaggcttagaataggaaagaagcagagtaagttaaatgctttagacaaagacttttctccagacaatgtcagcaataatcatatcaggtcagaacacgtgagaaaattaaaattaaagtttccgagaagttgctttcaagtcactctttggtgcccgaacctaaaacaatccatgtaggtaataaaatttccagtaaatcaattgaatcaattcagtaaataaacatgaatatacatataagatagattaccagattacaaggaaagacgaataaaacgatcaataacagaagctctaagtgtttaacttcatacatggagaagagaatcacatttcataagtcacaaacagcttacactatctgagcagcagcaagagcccttacagcatcagaagttcctatttgaaatactacattatttctttcctcattgcacgttctgaagataacactttctgtcttcttctccacaaaatcaatggacccaatatgttctacaggagaagaaaagagaaggccttttgatcatttgaaacaaacatatctacatatcatgtttattcttttaataagaaaatatatatatatatataaataaataaattactgattgaaaaaggcccaattacaaagaggagaagatatccttctatagagcaacatactaaaagcaccaaaagattacacaaactctttctagaaaagaaaatgttggtcaacatttttttaatagtggatcttgatttttatttgttctcaccatcatcattaacaacttccacaaacttcctattaactaacaaataaaggcaaaaagattttaatttggtcatttttatcccgtttcctaatctctcactgagcaattttgcttttttatacttgcacatttacttcaccctcatatttatcaaaattcatatatcaaactatgcatgcattattattcttccatctcacactttgtacattttagatacttcaagaaacttttttttccattttagttaaattctatatcaggctttatccaccaactgaccaaccccaataataagtatttctacagtaagctttataatttcaaaacaaaattaattactttatgttagagctagaagcctagaactggtaaatctatttcaagtaaggtacaaaaagtagtataacactactttcaaattatattttcacatcacatgttgcctccaactactaaacatggcaatgttttgaagctagaccatcaaagcatgttaaatttgaagaactaacaaacaaaagaaaatcagtgtattgatcttctgcacgtaacagagattaccataaaatctgcactctaaattcagttgtccaccttgtaatttaaacggccatacattaaaagtaaagtaagatagaaaaaaagatatattgaaattccaatggtcaccaagataattcatcacctacaaacccagttctaaattgccctattatatccaactgaaaaaagaaaaagaaaacaaacacaaccccagtttt

SEQ ID NO: 29609 - DNA, 1180 bp, Cannabis sativa
actttttctctctgacttgagaattgtgcccatgcacacgagggggtttcatggcccttctggccatggaatgcaccaaaaccccactggttttgggaagaaaaaaggtcactaccccactggttttgactggaaaactagtactgcttcgacttataatccgaaactccgaaaatattggagtttccatactaaacacaaggtgttcatggtgactttgaattgtgatggaggctctgtacgcatttgtgaaaggactagacattttgggtatgaagttgctgtaacgattgatgctgtggattggatcattgagaccgtgaaggaggttcagcagaaagaggaaaagcgaagagtcagtttcaaaagatcgtttcggaatagttctagctgctatcttgtggagtactactcgaatataaaaggaagctttttgaaaatttcagtgcttaagaacaacatgatgaaaacagtcatcataccagaagaagagaaggcaaacgggtggtctgaatttttaaggtgtctcaacagcaccatgaagagagaacaagcaattgttaacgagaatagagttcagcagacagcagagacaaataatggacgagtgtggaaccagcgatcgtgggtaaatgtagtgaaggagcctcggaaacaaatgaccaatcagaatattcaggtggagagtgttgctgcaaaaaagcttgttactgctacaaagtttggccgaagaaaaggtgatattgagtggatggaattatacccagccatcaatcctagttttaaaccaaaaaattcttatccagagaagagatttcaccaaccaaagctgtatgagtatatgaggtcgagggctcaaatcagagattgggagctggccaatatccttacccgtgacaatagtcatgtatcttggagtgtcatattctataacctctctagggagttagggagaaaactggtggtcagccaattatttgatgacagatgcatcgtctggtgtagggacgagatggatagagaggaattaatcaagattcaaaaagtgagtgttccaggggcacaaactgtagtgtcattttctccatggagctgggagtcacaaaaggaaaacattaaagtagagtgcagggactcttggattggagtacaagggttgcctctgaatctttggcatatg

SEQ ID NO: 29610 - DNA, 2751 bp, Cannabis sativa
ttttttttaattggacgggttacacttaaattttagcaacccgaactttagattggattagaaaatatataggataaaccgcccaaaccgaccgatgtacaaccctaatatacacatgacatatataaagcagcactctaatctattttttttgaataattttatttataaagcgaccactttttttaaccaaataaaaaatcacaagtgtacctacacactactatactatgtaatctttatttgacttaatattattggccaaaaaaactacactatgccatgaggtacaaacaaactaagggtcttacagtagaattgcccattatatattttttttatttgatatttttacgtgcttgcaattgtagtagtgtagatattagacctacgtttgtatgtgttctttataattttttatgataattttttttgcagcaatgtaaaaataattttgattcaaaacttttgtaaaatgataataataaactttaaatgtatttgtgcaataaatattaatagtttatttatttttttaattaaagaatgataaatatttttaaaatatgtgtagtaaaattgttttatttttaattaaaatttaaaaactgtcaatattattttaagttttgtgctttataaaaattatcaatcagtttatttattttgttaaataataattgttgattgagattttcgataactaattaaataaatgaaaatttagagttagaaaagaaaagagaatatggagactatgaattttacgttgttgtgacgttaataaatcttagttcacgaactagagatagagaagatgaaattctctatctaaaaagacagtatttttatataaaaaaaaatagtatatttataaaaagttccgtaaaagtaaagttgtataattttacccaaaatctagtatttttttgtaaaaagtataaaataaaattaccttaagccgatgaaaactctacacaagacacgtcacttctgcattgattcgtgggccccatttattgtgctttgtgctctcctcatctaattgcatacaaaataaaaaaaaataagtaaactaaaaaaaattttattacatgcatgtactccatcgtatatatgatggaattcattttttttatcagataaatggtgtgatttactaccctatactataccggcaaaataggatgtcttactgtagatattctctatatatatacactaagttgaaattaaataccgtgtacacttaattatatttagttatacttagttatatctttattactgcaacttatgttattttcccgaataactaaaattcattaattataagaaattaaaatttctaaattttaaactaaattgaaatcattaaaaaaaaaatgttttgactaaaaatattttattaataccttataaattattaagatatgttctcattaattttaaatcaaatttatagataaattaacaaaaaagcagaatacgaatatcaaaattaaaaactatttacattatttctcaaataagataacttcattataaagcaatattagtttaagaaaaatcaaacttgatattcatattgatccagacaagcttctaaacttgatcacaaacaagttcgaactaatagagataggttaaattgtaatttttgctctacttttttgcaattcttcaagcaatgattctctacggcctttggatatcttgttgttcatattagaaaagataataaataagtatactttgcatatattatagtaaaaaagtattaaaccactaaacaaagctatggaaaggcaaaactacctataaaagttttgataatcggataagatttagtgacaatctgactggccaaaacaaatatgaaccatctaagtctaacaaagtatagtacacactattatagatatgaataattgatatttttgtctcttgaactttcgacactatctaagtttgtcttctaaaataaacggcttgttagaaatttccctaaaatataacagttatataattatattcattttgttatgatagtgtaactaattctattacttagcatgtgttgtgagttgtagttttcagttataataacggttcttgttctttatttttctgttattttcaactgtattttctactgcttctttgggttttttccctataaataaaggctcataccaaagactttgtagcttttacaaatctttgtttttcactctcatagattgattactggtaggactttgtatatatgagctcattatggtatcagattgccattgacaagcgtcgaagatggatcctagtcaccttgaaaatccaccacgctcctatgttcaacaattcactgctcccactcccgccctagctccggtcacccaacaatgagatccctttcagaactccctcaactcctccttgactgtgaaattggattctccagtttcctaccatggaaatcgcaggttcttcccacaatgataggtcatggtcttgacgatattctcctaactggaattcctccgcctgaacgattaattacagggggcctgaacccagaattcatcacttggagaaggaaagatcaactctctctttgctggcttcgctcgtatatgttcgagacaattcttggatctttagcctagcataattcttctcatgctatctggagagctcttgatcaacgcttctccagtcaatccaaggctcgcttactacagatcaaatcac

SEQ ID NO: 29611 - DNA, 2757 bp, Cannabis sativa
atttccctagccaaccgtcttcctaaaaggtatgcttgcttgcactatccagaaccatcgaaaatcaattaggggcctttgacttcattaccaggtacgggtttattcaatttttcaccttttaaatgtgtttttaaatctactgtagaagttagggtttgcatgtttttccttcaaatgaattttaaatttcttagacctgtgaccaatactgttggagtttgtaaatatgaagaattttattgctttcgagttttagtcttagcaacttctaggaaatagttgtgttgttacaaaaatactgataaaatttctccgcactcagaatctttctagttctgggtactttgtcaatttcttcctcttgatgttcctaatttcctatctggaacagatgacccttgaaggttttcgttcttggatagtgaattcggtggggacctcttcaagcaatttatgggggaagaatcccctgctccctctctatataaggtagctaactgcttggttttctttcttttcacggaaatcatgtccaagaaggtctagcaagaagaggttgagctggaagaggaggtcatgtgatgttgaacgacagtccatgagaaatagaccagtatgttaataagtttaggatttatggtaatcttagggaatacgagactcgacaagggcttgagagtgttcttaggttatactggaataggcacgttcttggagagaaaccaagcaaatgtgttgatggaagcttcgttatctagagctaggcccatgtggaaatgggtgcacaccttccgctaaggtgttactttgctaacttttgtgcagtagccagagttgcacccttccagttcatcccacaagtgtatcatcttttatgtgtatgctacattctttgtttgggacacaagaaagcagtaccaacacctaaagggatcttgtatttctacaagattaaatctcaacccatgagaggtcacaaggagaagactggcttttacaggctagaaagatactccaaaaaagtggcccacccaatcagctacgtgaagtattctcatgattttcgagactattggttctatacttttgacttcccattgaggagagttttaacgctcagcttagacttcggtatattcagtaaatattcgatctttgtccttattttacttctcgtctttacaaatcttcatgttctgatgtctattttattctttctagattgcatttcccaatcacctatgaatccagagttggagttggaggaaaactttacttttataattccttgtcacccaagaagttgtaggtggctcaccttgtaaccaccgaaagtctctaaaatttctccccaccaaagtaacgacacgatgtcggtgaaggagaacatccaagaatttctttaaggagatcctaatgacatgaaagaggccattgcagccatttttgttgaggaggccttgaaagctatgaaagttgacgaccaatggttggcttaatggaggaggaagtttccaaaagagatgagtgaggctgaagaactcactatttatttttaagatgtagtttgaaataagggtactctgggagcgagtgcctccgaaagtggtgagacacccttttgtgtaattagagctccatcgttagcaaatttaagtcatactgatcagggtgggttcgaccaatacttttgtgaaaaggcttttccaagaagcaacttccttattaggaggctccccagataacatagataaagtagactacataatgagaagtccaaactacttcgttcctccagtacaccaccattttaaagtgtgtgtgcttagtagaatttattttctagggtcttccaatatgagactaacttaggtcagaagacattgtctatttttctagtggaaagaccaattatgctaagataaaacagtttagattgttttgatatgttgtttgataatttttattgtgattgtatttgatataatttaacatgtcatcacttcatttgttttcacaaaacaacctaccacattctagatgggcattctgaataatttatttgatgtcatcaactccaaggccaataagtctgtgaagtggctaaagacaacaagagcaaagttaaagttgcacaagtctctgggaatgtatctcagaatccaacacctccaccattgaatcaagaggttggtctgaaggattcgaccataagaaacctatatgctgttattgacttgacagagcctattttggctgtcgtgccattgcgacaagtgccatggaacaagttgaagaggattcttcagactgcaatgggtcagtccttatttccaggaagcagtctaggacttcagacgatgagatgaataagaaggctattgtggacataaaagagaagctgcaataactagctgcctcaaggaaataatcttctgatcatcattcatggaagggatctgatgtcatcactgatggcggaaaatctttcagagggttgtaagatggactcagataaggagagcatggagacttacaagatccacatcttcaaggttctgaagcaagttcatcttgatatcaaaatcaccagtaaagatagagatacacaagcattggaaagaccttggccggacctctagctggcctcccaaggatagcttatcgtctaacctctttgaaccaggatagcttattgtctaacctctttggttaggagggattattctgagtttttatcacgcaagctctcaa

SEQ ID NO: 29612 - DNA, 2777 bp, Cannabis sativa
acagaaaatatgtaaccaagagtaactgcagtctttaccatcaagaatacttctacacccagtccttccaccaagatatattaccttccaaatgtctggccctcttaagagaccatttccattgattgacatgaatagaagagcagatgtcatgcttactaaaattgatgcatgtgagagagatgggaagactttgtttactactaaaaatcttcacaaagttgggcggataatgtcttgtcagcgagtttatgtagacactcgcttttttgatcttggtcgatgcctcttgaaaaagatgaagaggatggtcaaagtgaaacattcatcatgtctaggtgataattctatggtatagagttatttttagtggctttaaactttgaattatcatgaaaagaataatgaaagtgtgttgtttgttacttcaattggtttttatcttcattttctatttatgaagctatcttttaagtctcgtaaaaattgttatttttagttgtgtttattaattaaatgttgcttgtttgctgttagaaaataagagttaaagtactagtgaaaaggaaaggttgtgaggacaaagtgggcattgaatctgaaactgcgctgaattactgagcaaatgttgaaacaaatttagcattctaggctgacatggtcaaggttacaaagagaatttcattcatccaaatcaacactcatgtggtagccattaaaattcatggcaactggctgttgtggatagaggagaccaaacttagtgggacaagaatggaaagaaatgggcttctattttacggtattacattgtaccctaatgaccgagcaactaatgaagtacaacccccttcatcaattttgtaagttcaactgccatttttagaaggaagtaattgcagagaaaaaagtacggaaagagaaggagaaacaaaagggaactttgactttaagaaggagaaaggcaaaaggagcccccataattcttatttataggatttgtcttcttcttctcatctctactctttttattcctctaaatttcataagaactgaattgttgccatggattgtaatactctattttggattatggtaacttaagtatgtatgagctgattttgttaaggcttaaatggctatgaactcctatgtttggtatgattaattttaagcatgattttagaaattttacctttattcattcaagtgagtttcctatcatttatttatacttattggctgtaagtattgctaagctacatttggttctgaaaaggctagatctagtagttacaagtttgatgatgcaagttaattcctaggtttaagtttttcttactaaatggaataggaatatttaattaccttgcataacttgagaattgatgtttaatttttattctgcaattaggtttgatataagaatatattcaactaagtagtaaaacataatttgtgagttttggaaaaatctcataaacataagtaattttttttaactctatgcaactttgctgaaacaatgctaaagtaatgttgaaaaattagacagatttaacataggtgagattagatattcaagtctattattccatagattctttttcttgtagataattttccagtatttgttgttttattttgagtttattttcattgtcaccaatttgttttactttcatcaatcatccattcgtctttgtttatttttcttccaaaagaccttaagttttttattagttggttttacatttatttttatttgtaatccctgtggagacgatactcaacttatcattatattacttgttgttgatagcgtgcacttgtgtataaatatatttttcacaacactaggacagtgtcagaatatgagagttttgtttaaaatgacccaagataatcagggaaaatatttgtgttcttagattggaatgatggaaaagtgacttctgcctgaaccatgccagaaagaattgaggaatagtaggttgtttaggttccatgttcagtagttttaccttgttatcttgtttttcttcagttgtagtaaccacttatcttttcttcctcactaacaacatgagtttcttagctaccatggtagttcaaaggggaaggttcctgtactaaagaagactgaaccactggtcagcgaggttgtttagggtatccttgctgcttcttttgctcctacaaagaataaagttcagaagaggagtagacctgctaatgttgtttcccctacccaagatcttggcagagagaagtctaaagttgttggagctgatgagggatctctcatttagatctattcggatgaggcagataattttgtttcaaaccatattttggacctggtggagcaactgcatgtgcatagctcctagcttctttctaattgtgatgccttaattggatccaaggttgaatacacgtcattacaaaagttggttagctccaaacctccacattttattgcccaaagatgcttcagtgatatctttaaggtaataatttttgttgtcatctgttgaaatagctttctttcacctatcatcacttgacttgctggaaactattgatgctctagagaaaagtatggctatagaaaccattgatgctttaaagaaaccattgaagaagaatctggccactactcgtaagaaaacttcaaaggttgaagattcttattgtttggcacttcgtgagaatactttaggtattactgagattgaggatcaagttcaatgcttgagagagcaagtaactaa

SEQ ID NO: 29613 - DNA, 3806 bp, Cannabis sativa
ttattcagcaacgtgagattgatcaacatgtttcccttgataatattgagcctaacactattgagcataatcatattactaatcactggcttcttagtcagccttctgtgcatgaaacaggtgaaacttcaggggctactgcatccgatgtacctaatgttgtctctactgaatctacactacaatagcttgttgtcagtgatcactctgatattgacactcagttgtagcatccatcaccatctcactcagtgtatgccgctagatactcatcaatctgcagtaatctcatccccagctgatttacctttggttgctggctgtcttaatgctcctaaaaagaacagcttgcacagaatgaacaccagattcatatctggtattcataaatcaaaaagctttctcatcaccaaagagccatcaacaatcaaagaagctctagctcaagaggatttgaacaatgcaatgggtgatgaaatccttgctctttctagaaatagaacttaggttcttatcaagcttcctcctgatagacaagctataggctacaagtgggtatacaaagtcaaagaaaatcaagatggttcacttcataaattcaaagtaagcccggttgctaaaggatttcatcagcaagcaggatttgatttcactgaaacttttagtccaattgtcaaaccagtcactattagagttgttctaactcttgccttgtctaaaggatgggaagtaaggcagctggatgtcaataatgttttctcaatggagatttgcatgaagaagtatacatgatagaacccccaggatttgaggtacctggtcaagagcatcttgtttgcaagcttaacaaggctctgtatgggcttaaacaggctcctcgagcctggtttgacaagctccaaaagtgtccggcttctctgggatctgtttcctctaaatcagatcactcactgttcatgttacacacttcatcatctactacacttgttctagtgtatgttgatgatatccttgttacagggagtgattcacaagttgttacaaggctcattgctgctctaaacaatgagttttctctcaaagatttagggaaactgagctattttcttggcattgaagtgacatacagtgataatggcattcacttgtgtcaagaaaaatatgccaaggacctgcttatcaaagctcaaatggcaggggccaaaccatctcctaccccaatgactagtgggcttcgattatcagctcaccaggggaccctataactgatgttcaaatgtatagatcaattgtgggtgcccttcaataccttaccatcactagaccggagttgtcttacagtgtgaatagagtatgtttgtttatgcaaaagcctctaacaacacactggcaagctgtcaaaagaattctgagatacattagtggcactaccacatttggacttcaccttagaaagccattatcttatgacttggttactttctgtgatgctgacttggcatcagatccagatgacagaagatctacatctggttttgccatcttcttgtgtttaaacttgatagcttggaaaagcaaaaagtctctagatctaacactgaagctgaatacagaagtcttgccaatgtcactgcagagcttacatggtacactatctattttctgagcttcaaattcgaatgccacaaattccaactatctggtgtgataatctgagtactattatgctcacacaaaatcctattctacatgctaggaccaagcatatagagttagatctttactttgtaagagagaaagtcctcaacaacttggtgaaaattaagcatgtctctacattggaacaactagatgatggtataaccaaagctatttcaagccaaaggttctcggatttcaggtccaaactcaaaatcgaagatcattcgattatgagtttgaaggggggtgttaagatagttattctgtttattaacaatcagtgttgagctgtcatggttgttaagagtttgtttcaattcagttagttgttagctgttatttcttttgttctgtttgttgtaagcttgtgtatataagcttttcttttcatcaataacagatcgacacttctttctctccaaatctctttctttgccttttctctctttcctttcttctttgtgtttcccattgtttcttgcttctggttctttaatggcgagacaattcaataggcaattcaacaatggtaataaaataatcaccaacaactatgaactcacaagaagatcgagttctatagttttatttttatacagagagaacttagaagaggaagaagaagaagttttgaaaaaggttatctctgactgtaaaagaggttgatatttaaagacaatgtctaagagtgttggagagacagtattgtccccaactaacttaactgtcgggattgaatctttaagaaatttactgaatgtaagtaaatactagctagacttaactaactttaagtaacatcacaaatcccctgttagttgaagttagtgaaaccaataatgaatagattgttccaagatcccctaagggcattaactgctggtgtcacactacaagaaaatgttctattattggctgaactattaggggcggactaattgtatgattttttttaaaacaaaagtaataatattgaaagaatttctttgtgagggacttttcccagtattaaatttcaaatttattagtagcggatcattatcggtgaaagttcgccgctaataacattaaatattatttaaaatattatacttttaattattaacggcgaatcctattattatcggcaaacctccgcccttaataattttatatatatatatcagaacccttatttatctctccctcttcgtcactctcttcatccccaaaaattttgaccacacattcatctctccctcttcatccttaatatcaaaacccctattcacctctccccttgttcatcgtcgactagcccaccgttctgaccacgcaacgatgagctcaccacctccaccgttgtcgacattcccattgcttctgtcgaactcatattcatcattgttcaggtatataagtatagttaagattagttaaatttttcttaattattcactactcataagattgaaaattattctaatattagatttgtagaaggtatgaatatttatatatttatatatttggaacacttctcaatgggtattattcattgtaagtactaaataaatttaattataaatattatgtttaaaaatattaaatcattagattttgatccgattgcgaataataaaagagaaattttatattttatgcttaatttagctatttaattaaagaaaatatcaaaaaaaatatatttttttacactatattataaatatatttatatgaaaaatatttaagtcaagctgaactttttttatcatttttttgttgaaaagttttttttattattttttttcagcaaattgaacaacctcagcccatataatttaaaatgaaagattttctatttaaatagaaaaagtaagcataaaaacttaattttttcctaatattacccattcatgggtaatacccattaagagtacactcttatatatttatatttatatatatgtattattataatatgtgtctgtgtttctgtatgtatatttttctatatttgcttttagattttatcaaaaaaaaaaaaatgagaaccaacaccaaatgtttgataaaaaaaaataatttcattatttttattcaattatacatagattaattta

SEQ ID NO: 29614 - DNA, 1785 bp, Cannabis sativa
caatgtatgtatggagggccgactttggtataagcaggtaagacttatgtttaggatccatttagactatagactcaaaaaaaaatttaattttaagattatacattattttttattaattttaaaacgctacatttttattaataactaaaaaatatttttttttcttatggcccacttatattttagggtggaccaggtatgaatggggcggttgcatttgcaccctccaagatattgtaagaagttgaagaatactttttttttttatacattaatcaaatttacttgtaaataaaatttaatttaaatatacttttttatatgaattttgtacccaaattatcttcacactctcacataattaagaaatattttcaaatataatatatttgtattttttgcagatggatgtgtagatttatggaaaagttagaggtaaattttgtttagaaaaaaataaaaactatcttaaagtgataagagtaaaattagtagatagttgaaaaaagaagtaaatatactaaattttgaaagaaaaagtaaaaattaaaagagatatataatattgcaattttctcttagatatataaactacaaatatgtaattttaacttgacaataggaaaaatttatccaaattcattaatctagtctcattcataattttcataaaatggattctccttaaaagtacattttccacaaaaagagtggtggcttggcccctccacaaaaacccatgcccatacgaaagctctataattatttcttgtaattttcttttttgatataaagtaattagggctttaacggttagatgcatcaactttggcttacaaattttcactttttaaagagagagagagagagaataaaagcaagagagagagagaggtggcttggctgcttggctggcttgctagtagtccacaatgatggccagtaaagccacgtgggacaaagatatgcttatcttcaagctctctaattagcaaaaaaaaaaaaaaaaaaaagccaaaattaaaaataacattcctttcttattccaaaaaattaaaaattaataatttattaaaatgaaaaaaccaaatcttaaaatgaatgtaatgctccaaaatagaaaagaaaaaaaaaagagcttaacagctcctgaacaccgtggcattcgcatacaaagtttattcttctctctttctctctctctcacttacttcttggaaacccagaaccgttccttcgaaattaccattatacccctgtggctgctgccaaccaaacgctatgcgtggtccccatttccaatgggcaatttcgtcacagagtggaatacacgcgactacccacgttgtctcctatgaggcgcctttattaaatacccaaaacaccctggatgcgggggcttgtatgtttgtccaatggaagggtattatcgtaatttggagttcagtattgctgtcgggcccataataaatcgagaaaaaaaagaaagaacgtgagtgatccgcgcatagcactcgaaacacaaaaggtggctgtgaaaaagagagagaaagaggagagagagagagagagaaatagtttcttttctgtttcgagacgttatcggatttcaaatttctatttggccggagtttgggaaccacgttcacgtccggttagggtttatttttcatttttggataatatagagagagaaaagtaaccgttactgagtaaaagtctttgtcttcttcaagattttggatttgaaaagttcgattaaccggtgattggtactcctgg

SEQ ID NO: 29615 - DNA, 4345 bp, Cannabis sativa
attttataacatttatgtttaatctttaattaaaagttttaattccactgcacttttcttaaattaataaaattagattataaataaatttgtaaaagtacacacgtggcgtccctgtgggacagggcattacacaagaggttagtacagcaaaagagacacgaacaataaagtcaactgcataacatggagcagtagccacttgttgattccccattcttctccagagcagtttgagtggaggtaacttctccatcttcttagcctaagaacatagatattctccctgaatactctgtgttacttcaaactgaggtcacttcttccgtcactctctaagacaagatgacagttttactttgagcatcctcatcatcctgctcaagtggcattgtccaagattcatcagtttagtaagtgtcagcatacacccactgaaaagacataatcaacccaacctttcggagattcttagtactaaatatagatcgcccatctctctcccatgcatcaatctcaagtaacatggcatcaactctcctcttcatgtcaatcagaggagctagtcttttgaaagggccaactttttggaaggttatgtgtctcgttggaagaataggagtatagaagtactcttggttgtaaaggttgcagttactcttggtaatattttctatgtatgggctaaattggtggaatttgtaaaatccttcttctttacgggttggacttcttttcaagtcacaaaggaagtttgtttcattgggagttggaataggcaagtttctcaaacgataaaatatgaagaaggtggcaagtatcctatagccatttggatttatctactaagggcagacaccgcagaaatcaactatggatatgaaccatggatgcaacggtaattaagaacccacattcatatgcaatctcgaccaagcactacagcaggtgttctaggagccattaggacagccgtatcatggctttcgaatgatagttttaggaagacaataatcgtctcatgttaattgagcttgatattcagtaatagtgctaaacacaagaggttttagcttgaaagctcgatctctcagatcatcactctcaatgacagcgttaagaagctcagttgccatcaccttcccacaacgcgacttgtctaagttcttagacttatgcataattaccttagctctaatgaacttagccacacgggggtcatactcatcacacaaccttctacttcttttcatcctagccatgactgctcaacaacacaagttgcttacaacccaagaaaagtctaattgggttgagtgaattcaacaaattttggaggaatttttcaaggcactaggatagtggttagaaattttggaggtcttagaaaaaatattttcaacgtttttgggagtttaaaattccttggagtaagatcaacaaaggtggagaagaagaagtttttcaaaaaaaaaatggctccaattccaagaaaaaaaatgtttttataccttggaatgaagaatgcttgaaggcttgatgaagataaaatttcaaagggctctttaaaggattgggcgtgtggaaactttgattgtcaactctcttatatataggtgagttcaatctcttaatcctaaagctaatgggagtcttttaagtttaaaacttttacgtaagaggtaaatgacacagattgatatattgttaatttgggctatttccaatcaagttcaccaaaaagtgtttttgtcattagaaataatgaagattcaagtaaactcggggagaaaccacaaacttgagcctttggaaacagggcttagcacccaggttgacctggtgttgggcccaacgctaggttgacaatcaacttgggatgctgccttcaattgctcaaatgccaaatctaactcgactaatgaatccagaacagtcaaaaataaggtaggagtcctcatcctcaagtttaagaactttgaaagtatcaaaataagatcctgggagctcgtgaatagggtacccagtgcccaagttgacaaatggcctggtgcgctaggttctgtgtatccgactcagaaatgaagagttttgagtctcccatttctgcagaacaagaacatctctgagaactaatgaccagcttcgccagtatacataaaaaagctaagtgatgtaatatcacttagacaccttaaagtacatttcttagacatttttacacttatccagcatctaggttgacgtcatttgtcaacctgggcactgggatgtcaacctgggcattggatgtcaacctggtcactgggtcatgaactgcctttagtaaaatagccataactcactcaatattgatctgattgatgcaattcaacttgcattttgcagctaatttagtgatatatcaagtcatggcgcacactttaattgcaattctgaatctatcatcgtcgaatttcaccccaagtgagttgtaaaaataagctatgagttatctaccgtgggtcccgctgggcttcgaaaaatggccatcaccaccaagagctaattttcactgttaaatcatcataaacggtcaaaaacatctaatttttatttttcttctattttttagggtctccttcacctataaaatgagagctcccttagctcatttttcactttcaaaaaactacccacaagatcagagtttctctctttagaaattttagcctctaatacttagtctttttctgtaattaccatctcgtgagaaataaaaacttgaagggcatgaaatccattaacaaagtcaaaatataatttatgaattttattgattgaaactaagattaaattgaacttatgctttattaagggcatgaaatccaacaaattgcatgagcacaaaaatagtggttctctcacatttaaaaattgaaatttgaaatccttttgaaatgattaggcaaggacacctttaagccttattagcaagatcctatttacttaataagctaattaaatatgattagtccactaatgaggccgacaacaaattcttaatcaaaagtatgtgaaatgttctacccaattggggtgattggtgaagttaatgttacttgtcctctattgacgtgataactgcaggtacaagctgtcacttttggtgttaaaaaagggaatgtcagagagaggattgagtgtgtgtatctcaatgtttataccctcttttgtaaatgtcatacctttagggaaagaggtctaacctttatagtatgtatggaggggacaagtctataatactattgtgacataaggaatcattgcttgtaagtcttctggcccttttggcgggaatcacatttgggaggaagtgttaaaaatcattcaggacgatgcttcctttctcttaaaaaacaaggtcatattgctttttgagcaacatcctggtcgggacgttcctctctctccactttgcttacttgctaatgataggagcatcttcttaagaagactcaacatatggggatcttcccaaggctagaataatccttaagttggtctatcctttgtaaattgttgtgtccatcatattgacgatacatcatcactagatttttctatgtggtggtaccacttgtccttcaaaaaattgggacaacaatgctcataccactacattgaagcctagttttatttttttaacgtgcattaattaatatttcaaacgcaattaaacaaaattactaaaactgaccacaaccgactgtaactgaaaaatcagttatggttggttatacactatcatactgtcgggtacgatgtgttaaaataaaaagctaaaactgcccagtcaaaaaaaaaaaaaaacctaaccataaccccaccccattatgctatgattaagtttcaaaattttgttaataagtactccttaaccccggttcattatgttgggaataagttcacttggaagcatagctccacctatgaacgattggattggggaattgctaatgacaagtggcttcatcattatccccaagccactcttcaccatcttaatttttatggatcggatcatagggttttcaaattaattttacttgatgatagcatgtgtaaagtgaaaaataaaagatttatttttgaaaaccattggcttactgacccttcttattttaatactgttagtaacccttggagtcattcttattttaataatcatcctttgtcaaattttctcagcaagtagaatacttgtgttaatgctattaaaactcgaaataaatcttttaatagcttaactacacgtattaataaaatagacaaaaaacttagtgacatattatcttctcttcct

SEQ ID NO: 29616 - DNA, 3167 bp, Cannabis sativa
aaaaaaaaaatcatagattgtatagaaaaagagaacacttatgtcttttaaaaaggtgctgctaggatgtaatgttttgtattttgaatgaatcttctgatttaccaaaaaaaaaatcacaaattatttagaaggtacgagttcatagtttattacaatttatgtctaatagcaacactcattttaatcatttctagttaaaaggttaaatattattttggaccctgtgttttgcaaaaattaataattagattctatgttttgttaaataacaaaatggaccctatattttcaaaaatggtaaaaataagaccctgagctcaattttcaataattttatttttttaatataactaactttaagatcatttctaacacgaacagatacagcaaatgtaactagttttgtcataacatctccagatcgatttattattaagttttcttttgacaaaaaatcagtttaggatcctatttgtacaattttagaaaatacgtggtccattttatcatttaacaaaacagaagatttaattagtcacttttgcaaaacacaaggtctaaaatggttaccctagttaaaattaagtataatttatcgtgggcaatatttataggacatgactatagtctatagtatagggataccattttaattggttccaatcggtagagatatctatttttcggcctttgaaaaaaaatacaatcttttcatttttaaatgacaatcaacaacatcatagttattatagatattcgacttatttttttaaaaaattaaataatttgtgatatcaaaaataaaatttaaacaactagttgcaattaaatatttaaaccaactttttgatattataaattattttattaaaaaaaacacagatacaatatgtattatatatacaaaatatgagttatataagaatatataagatgtatcctctttagattatgacgctggtaaagttttgcctcctgaacgtttctttattataagaattttttctgaactataaaaattattgtatatgtcccttgaaattgcattctagtcaattatttaaacaatttgttgttatagagccctaacataactttaatttaacataattcaagagttaagacaaaaaaataaaaacataattaacggtgtagtgagaaattatgagagtatatatctatatatgcatttttaaagttattgtttttgtgtttaatatcaataaactaaattttaataatttatagttattaaataagcttttgtaacatatagtcatatacgtaaattgttataaaaaaaattagcacaacgcaacttgaagagaatatttataaagatttgcatagttacaaagaatttttacaacaaaatttagagaacataattctatgtacaagtttcaatcataaatctacgatcaaatgtataatgagaaaataaaatctaaagaattaaataatgaggcattcaaaactaaaagataagtgccaaatgagttggctgggtcatttcaaattatcattatcagcaatctccgaataatgtgtaaaaacaggaaaattgtgtatgactttgcttgtacgtacggatgttgaggactctaacttacgcggcatcacttcagctatgatttctcatttttaatgattatgtgtttcgtatcttgacttccttctgtgtgttttctttttattgatttattattgttttgcacgactcccttcttttttaagaaatcgtcgtaatgtatatgcctacattgcctaggctattttctttattatttattattttgtagtaaatctgactcagaaaaacaaagagctaaataaaaagctttaacatgtaagtaaatctatcactaaaaaagttaaaagtaattatctattagaaaaaacatgagagtaattgttggaatttaattactattgcagcttgacagtaatgctgtcaaatattgagaaaccattacacacaacgtcccttaactctgtatttgaagcaacgatcctattcaactaatttgaatgggtggaatggcatgtcattatttggcttcaattaaactaattcaattcttgtttattaataataataataataatattaaattctaagttcacaattcttgccattgacatgtaagaggaacaacttcggaattcttggtgattaattaagatttaaaaattaaacgaccttactactaaaatattagctgtttttctctctctctttctccgttagggtttgtgttagattaaactcatttaatttgtcaaaattagtagtttcatcttatcactcatcagataaatttgaaaaaagttgttgtgagttataagagatggctttgtcaccaacttaaagagagtctcaccaacatctataaataggagtgtgtatactctctcaaaacaatctccaaagatttcaaagtcaagtttagagaaagagagagagtccaagatcacagaagtgatttctctcattgtgagacatttctttgaattgtttattttgttgagttgtattcttggatatattccattgtgtaatatttactattcaatcaataaagatctatgattcattcattctcaagctaagtttattcttgtctaatttcatctaagttctactttttgattttatgattggttctagttatgtttgtgtgttcttgaacatcactactattgtaacaacattgttttgagggtgatcattcaccacaaatggcatccgagcttagggtttagatttcaagaatcacattcaaccaatcaagattcttctttgacatttcaagaatcaaactcgaactttcaaaaattggattcaagcaatcaagaacctggtttgaatgggtacaacaaggtttgaggtggacaagttcactagttcgaatgctttcaacctatggagaaataaattgaagacctttctagttcaccaatctatgaggcacttgatgctgaagccatggaattaattgaaggcaggaagaagaaatttgagattgaagccaaagcacatggtgccattctcctcagtctcgatcatgaggttttgagagaagttttagatgaagacaaggccttgggtctttggaacaagttgagttcaatctacatgaagaaattgttgggttttgtgc

SEQ ID NO: 29617 - DNA, 1562 bp, Cannabis sativa
tttttttttttttctgtttagataaataaaatgtaaataaataaatagtatcaagtattttattttttatgtatattattattgttaatagtatttactcattttgtaacacttgatttgaatatgtaaataattttgaaatcttttaaatgatactagtattaattgatgtattaaattgatattgaaaacaaaattcaatggtgtcattaataataataataatgaaaagacgtgttttatttgactatctaaacaatgcctttgaattttcctttttcttatatataagaaaagaaaagtattttcttttttgttaaaagaaaagaaaagtctattaattaaaaaaaaaaagaaaaaaaaaaagaagaagagggaaatggataatattggtgtagttacgttacgtaatacgtagccaaataaggtggttaatgtagaggtggaaggataggcacgaggattaaggtggtggagttacgcaagctgtttttgtgatgagccgccgtctgtttcagattgagacactttatgggttcaccattttggcttcatgggctacctaacggcacttaacccaatgattttaggggttttttcataaatatgcaaaaaggggtataatttacttttagatgtcataaataaataattaaaaaaattatgagattaaagaataattaaagtttaaaatatggaaacaaaaataataaataaatttaataaaatttgtaataataagtttcactagaaaagtcgcttgtgttgaaaaagtttccagaaagttattgtcgccgaaaaaattgttgaaaaagtcgccgaaaaagtcgccggaaaagtcacgtcgtcgtaaaagttattagaaaagttatagtcgccgaaaaagtcactggaaaagtcaccagaagtagatatctcagatataaataaaaatagaaccgattttataacataatgaaaaaaaaaaacaaataactcaaattggttataattgaaatataaccggttctgtaacataatgaataaaaataaaaaccacaacataacgtaaaccagttataattaaaatagaatcggtttcataacagtgttataatgaataaaaacaaataacacgaaataactcaaaccggttataactaaaatagaaccggttaaataacataatgaatacaaacaaatagcatgcaataactcaaaccgattacaattaaaaaacaagaggaaatcagttcctaaaacaatgaaacataaattaaaaacaaaactagttctacaataaaatacctcataaaaccggttataattttttattataaaaaaagttgagatcaattccaaaaaatattgaggcataaatatgaaaagaactagttccatagcaaaataaataagcacaaataataacacacaataactcaaatacaatataaagaaatcgattatatttatcaactagttaaaaatttgagataaaattatgcgaatcaacggttcttctcgtactaggttgaattactattgcgaacctgtcatcagtagggtaaaactaacctgtctca

SEQ ID NO: 29618 - DNA, 2263 bp, Cannabis sativa
gtctgaactctaatcactctgccaaggtggttccttgccacaacaacaatacacatactatccaatcccactttaacatcacaattcaacttaatccaatcctaagggggaggggcccaaacttcctttaaagctggggtgggacattgtagcaaggagtcacatatctgcataagaagtacaaatattatcaatgcattttttaatatcaacagtacaattattatggaccttctcattgcgcaccctccaaatagtatccacaacaatagaagcgtataagaatatatcatcgacgcaagcccctttaaacttaagatcccagatgaatttgacccaatcccaggcacggatgcctgtatcacacacagggtagataccccaaggagaagaacgccagaggtgaagagccacatcacaagaaaggaacaggtgttcaatggattcatcgcaccttccacaaagggggcaacttggatcttctatatggaatctgttgccgatcacagctcttacatggagagcacaagataagatacaccaccataagatcttatgtcgctccagaattttgctattctagagtttattccacagctttggagcgacaacgcagtggggagatctttccaaggcttgggctagataggcagatttacacgagaattgtccattactttccagcgtccagatccatctatcagtaccggtaccagagggttgacccccttttagaatagctgaaactgattcgtggtcaaaacagtgattcaacttacgaagatcccaatgcccattttcacaaagaagctcagaaacacgctgaaagttgggagggttaccccctcttggtttcggacagaaacctttatagtggggaatccagggatcccaccatatatccgtagattctccgttagctatcaacttgcaggcccctttcctcaagatagaattggccttaacgacactcttccaaaaccaagaatccgagcttttgtacctacaagtgagaaaatctttgcccctgaggtactttgcaatcagaactttacaacataaggattggctcccgttaagaatattccatccccatttagctaaaaaggcctggttcatttctttggttttccggaatcccagcccaccaaaagattttgggaggcagagcatgtcccaagccttcaagtgaaggccatgattacctttctcgaaaccccaccagaaatcacggaccaaaccatctatccggttaaccatacgagtagacagtttagtggtttgcatggcatacataggcaaagacagtcccacagattttataagggtagctcgccctgcctttgaaaaagttttcgccttccagccctgaagctttgccgaaaggttgtcaagaataaaattgaaatcaacatccttttgcctagatctgaaaaggggcagacccaaatattttatacatccttctggataatcaattcccaaggcttccttgatatctcgatgcatgtccatcgggtgtttttactgaagaaaatggttgtctttagcttgtttacctgttggcctaaccaagaacagaatttttctaagcagctctagaagccatttgcctcagttaaattagctctacccaccaagattaaatcatctgcaaagaaaatatgagagagaaccggacctcccctgctgagttaaatagccttgatggagccctgctcaagagaattggagatcagtcttgaaagcacttcagcagcccatatgaataggtaaggggagagtgggtctccctggcgaagcccacaagagggttggatatttcccacctgacccccgttcagaaaaatgttaagagtcgtggtagaaacacactgcgagatccaaagacggaacccctgaggaatgcccgagcactccagaacatgatcaataaacttccagctcaacctgtcataagctttaacaagatcaatttttattgcaaaacacccctccttacctttcttcctattaaatgagtgaataatttcttgtacaatcacattgttgtcatggatattccgccccaagacaaaagcatcttgagttgggcatatgagggaaggaagcaaaggttttatcctgtttgctaataacttagcaatgactttgtaaaccacattacataaagagataggcctaaagtggttggtacgtttaggattttgggccttcggaatgagcacaatgttcgtggcattgatccccctatgcatattgc

SEQ ID NO: 29619 - DNA, 1773 bp, Cannabis sativa
tatttatatatagatatatttatagtaaaattgctgaccacattcatcattaccataaaaaaaaggttataatagcaaaaagccactgcaagtctactatagggaaattaaaccttattatataattcttttttatttaattttttaattttttatttatttatttatttatgatgatgatgatttacaagattagcttgatctctttgagtgttgatagtgatgtgtctttgtttttagttgaatattttattcatttttcatgtttgtgaataaatttattgttttctttttgggagaaaataattgggatctcatttgggttcatgagtttaaacaattaatgttcttggctttttcttcccaatcaatctagggatgcatattggccttaccctacatcttggagaagtaggtgtgttgaatttataattaaataaaaataaaaaaataataataagaatgagattaatgaatatgttataccattacaaaacatgctacaaatctttaattttaattacaatatcttattataattttttaattaatttttatgctggaattcacatgctaaaatattttttaattttttttataataatattcgttataattacaatatcaaccctgtaaatatttgaaaattttcaaataatttacagtaccaaaaaactttatcatttttaatactataaattattcgaaatttttgaaaaatttacagggacgatgctgtaactataacgaataccgccataaaaaataaaattttttaaaaaatattctggcatgtattctcaggtacgaaagttaactaataaaaaattataataataggaggaaattgacaatagcaccactcctctttaataattacataacttatgttgtgtattgattttgtgaagaagataagatgtaatattaattttcttttgcaaaagtgattcaaagtgatgattttgtttttggaaagtgatgtttaaagtttatttctcaagtattgtagtatttaagcaaggcaagacatgaatttgagtggattttagaaaaaacaaattgagttttatttaagaaaaatgtaatattttaaaaataaatgaaaaaatatatattttttggtccctagacaagggaagctctaggcccgccctagcctagggtcgccttgtacttaagtttcttatctaattttattaatcaaaattaaaaattagagtccaagtgagtaatgaatacataattcaaaataattttaaatttattataattatgagtattttagttatataaaaaaattagtttcatcttataacacgaggtctaaatagaagttttgaaaatttaaggtctttacaagtaataaagtaaaatattgaatccaaaataatatttttgacaccatattttataaattggatcaaaatagtacctaaaatcttattttgatcgataaataatatgaggatgatagcaatgagtagggacacaaaggtttgaagttattttgaccaagctagataactaagctacaaatatcttacaattaatgatttattttttttagtggcaaatggtaacttctttggtagtaatgctataaatagtaataattaattctagagtcaaatctataataataaatactaataatgaggataggatagatcacatatattattaaaagtcgactttaagaacataatacgtctaagactatttaaattttgagaccctcacttatagaaatactaggtgattgttacgtgc

SEQ ID NO: 29620 - DNA, 6507 bp, Cannabis sativa
ttaatataaaattgtgtttgaatttttaagtgtgcttaattatgtaaaatatactttcgtaatttgataatatttaaaaataatatttgcaaattatattttttttgttaggggcctattttttaaaattagaacagggcctccaaaatatttgagacggccctgtgtcctagctatttcaatgtaaattttcaaaaacattagaatagtttataataccgaaaataaaattcaaacaattatgtgacacaagtgtaaatattttaatcctatttttagtattgtaaatcatttaatttttttaaaaaattacaaataattctaaataactacaacatatacaaataaaaagaacaattaaaccgaaaagctcttttgaattcttaaaagaattgagggtgtaccgaaacacttattttaaagggtacactataaattaacaacaacaaataaagatgtttaattatttattacattaaaagtatgtatgtaatttatagcacttaaatttagaaacttttaagattatttcacttcataacttaaaaaccgtttttaaaaacagaaaacaactcttagaaactaataggaatgtttggctaaattttttaaaaaaccgttttcagaaaacttaaaataacttaaaattagaaaatattaaaatgttattttttattttcaaaaacatttttttttgtctaacattttttttttacattttatctcacatacctaggtctgggtctgaggtggggtttgggttccaggtctagggtacgggctcgagctgggatccaagtcggggtctagggtccaggtcccatgtccaagccaaggtctaggtacaagtctgggttggggttcgggcaaggttcaggtctcgagttttggttcgggttagggtctaagcccgggttccagtttgagttcggtcttgattcgggttcatgtcctgggcctgggtctgggaccagatccgagatggggtgaattaaggggtgttcacgatgcgggtggtgcgtttgaccatttttcaaatcaaccagcattgcagtttttccaatttcctaaaacgcacccataccacaaaactaaaaaaccacagaaattgcaccgcaaaaaatggtgcaatgcagtgcgatttttgtggtttctgcagtttggagtatcaccaaataattaaactatcacaaatacaacaaatcttgagcaacacttgtcaaaaataccataaggcttgaaaatatatatgaaaaaaaaattaagtttcaacaatacaataattagtatgctttgggctggatattcacatattgaacctaaataaatataaaaattagtatttttataatgtgcggtgcggtgcgatttgaactgcatattaacaattcaaaactgcaaaccgcaccacaccgcgcggtttataaaaaatttaaatcgcgactgcactgcaaagaattttaaactacattttttttgcggtgcagtacaatgcgcagtagcagtttgatgaacacccctaggtggattcatatcatggtatggtgtacagtattgaaacttttttttcatataaaaaatctaaaaataattttacaaaacattagtcaaatatcattaaatttttgaaatgacaaaaaattatttcatattctcatttttaaacacaatttctgtctctccctatccaatgtggtttatgttgttgtaacttttctttcagaaaaaaaatttaaagaattttgatctctccgctcaataatactcacttcatccatcctaaaataaaataagataagaggaaattaagttataaacttgcgacaagtaatatgcatcgttaattcattcaaaaaaaaaaatatgcatgattaatcattatacttttaataaattattgacatattcctcttgaattaatcacagtttaatacacacaattacaacacaaaattttgaaaatttaaaattaattacttaaggcgtaaatgtgaaacagacatagatcagtgtgaaaccatattattattattattattgaaaaaccttaaattccccaagtcccaaaagctaaataaaaattatagaacatattcattaaaacgagatcagtgttgcgcattttaatgaatcaatataaaatatgactttgctaatgtgatatcgtatttatcataaaaatacatgtgtacaggcatttttatcaatataaataaactatatgaaagaatataagataatatcacagcatacaacatgaaatggtgtgttcgaacaagaggaaaggggaaaaaataatgtaatcaacttacaaaaaaggaagactagattaatgggtttaatcacaccagaaaatttgtattataaccacaaaaaatacaataatttttttaacaaactttacacaatactatattcctattttaacgagcacaaaaagatcaaatagttgattagcgaactagttgaaagaggtaaaatttgattcaattttgctgtttggtatctactacagctaagatcatccaatatggatggaatgacaagttagctagtaaaacaagttaccatgtctatgcaaatgcgagagcgcttccatttcatgatttgagcggagatcggtgtatgaatgaagaatcatcaacacttgtttatctacataatagcctgcaggatggttaacttcataccatggaggtgctagtatgagctatcctacgagcttcttccaagtccttcacaaacctgcaattttccacccaagtaaaaataaaaaatagaaaaaaattaaaggttttagtatactcaacaatttggaatttactttaagaagagaaagatgaacatattgatagggaagaacacatatttacacctactaaataaactgtataacttggtattgcttctaagatgcatgtctaaataacatgttcgtttcgcttctctgatccaatttatgagattgttttgaattgaacatttacaaatgagtttaaggacaaatattgtatgtatacagttgcattgtaggttggggtaagcaaaaacaatattggtgattcttgcaagcagttaaacaatgactaatgaattaaacagacatcagttaatgcatatacctctttgaattgagaaccacagaaccaccaagtatgaaacgagttccagaattggacacattttgtaaggcaacaacacgcgattcctcatatgttgtcccaccaacaatgaatatgattacatcctgcggcctagaatcacatgacattaccaatattagtagctttctttgaaaatactaatttacagttttctgatactcgtgtaattacacataattactttcatgaatggttcggaataaataaaaggctataattaacttctcatgtcattcttcagaatactatagccttttccaggttttttttttcttcacttttcaaatatcaaaaaaagaaaaaacacctgcaactatctcactacagctgaattttaactacacctccttgcaataagtctcccattgcaagaaaaagaaacaagatttgcctatcagaaagcactcttgttgaaaatttacagaacatttttagagcatagattatccacatactaaattgcaagcaggcaaaagatagtaaaagaacacgacaatcaaaattccagccaagatgtcagccacaggagaactgttagtacagcaactaacctgccctgttgaaaatgatttccaacatgtggatagtccacatctctcaaccgacccttattgatgttttccatagtttgatagagaagaggctggtgttgtgtgtacacattttcaactccctagaatacaagtcgagagtaattttagcatcaaaagcaaacactcaaaacagaaactatattttccaggacatacctttaatccacgagccatgttacgtgcaatattcaaaaggtcacgatttccaaaaagatccccagttcgcttatctacaccagcttgcttcaagagaaactggacaagctgtaagccaagacagacatttcgttataaccagtgatttactctatcagccactagcaagaggtagaacagctttgaagacttcgcttcagggattgagcctctgagaaaaggttcaatctccgtcagaagtgctcagggcctataccacacaggctaccagtagaaagggaaaagaaagtgttataccccacgcttgtatttcggagaccgagaagacagtttgtcaaaaagctgcatcagttgaacaaggctttccttctcataccgcaatgcatacaacatcacaaggcgtaggcagtcgaaatcagatacatttgcattgtctaaaagagttttcactgcctacacagagcatcaaatgtgcagagtcaaataatagaagctgagttttgtatgttatttaatttagtttcaagtgatcgcacatggaaaaaaaactcaggtacttatctcaacatcaactattatctacagttgcaaaataaataggatgaattgttgcagaatgagtgaaagcatgtagttttttttcctttttgtagcatggaactggttaatgtggcgtggcatgttcatataaatttattaaatgcaaattgtctgaataactttagaattcatccttttcactaaaatatgttaaacgtatctgacatgataactgaaagtttgtataaaaggagaaatagtcatctgtgctatataaacccaaggaccatagcaccgtgagatggattttacatgttctattaccattcacctgctgcccacactgtatttgaattcaacaaagctaaatggcccctacccgtcacaaagtagccccggcttcaacaatctaatgtagcaaacacaaaatcctgagagcactctaaaattacaaggaactactaataccacttgaacagcaaagcacaatggcttttgcaccaagcttccttcaactttcagtgttacgaattatcatccaagttatttatattatagttcttcaatgttcaaagaatttgatagaagaatataacagataaaactgcacatatttttagctaccaactactcgataaataaataaaaaagcaccaagtagaagacagctacaaatcaacaacagctgacacccaaacagaaccaatggaaacctaattttaacccaaaaactattcatttaaaccttttgtaagtctttagagactgaaaataaattagtgataatcttaaatttatcaaaatcaaattagatatactagccactccaaaaagacaacataaaaatatgcacaaataagatagaagtaatcaaaatactagccacatgggggaatctgggaatctaaaggagtttcccagctactttggcatagcaaaatggcaattttttccatacaaaggttctagattctgataagcaacttgtgcataatggaaagttaactggtttagtggtttcagttatttgatgttgtaggaaatagataagaggagttttagatctgctcgtgcagttttcttgctggagtgtcaaagataattttccaggcaaattgttagcaagatgatggagggaacaatcaaagaagaaacatgaataaaggacatacaacaatgtgaagatcacccaaaggctagaattggaattgccataatcagttacgcagaaggaccgtgaccaatgggaatagcagcaatgggctaggacacaacaactatgagtacgtacaggggcagcaacaatagctttgttgtgaaataacaatcatgtaacgctatcaatggaagtccagaagtgtgagtttctttcggagatacgcagatttgaaagatggggatttcacaggctccagctgactaggtttcagagttgagaggtatttggtaacaaacaatgtctcagattcagagaagttggattgtgttggtgtcaacatttaacattttcttacttcagtgcaacaaagtggagcttcagttatttttgtgtggttttcttgctggaatactatcagattctaaatgggaatttttgatgaaacgttgttcaaaaacataaatgaaaggatggaaaataaataaataaaaataagcatttgccgtatcttagaattatttcaagattacataatttaaagtagagaaaaaaatacgaataaaagatcttttacagtacctcaaaagctgccccttgtccaccattgcaagccaactcctgttcagtttctgaaactaacatgagttttcgctcttcaactatcctgctcatttcagtgaccaatgtcacgtgctttgaaacatttccatgcattttcctatactcgggataattgtccacaaatttggccatgtcctctgcaaaaaacttagcaatttacaattaaatacacctcaatccgcaaatccaaaatattccattacttggaggatctacaatattcaaatttcctcatacaaacctattgtctggatattctggttactttttgaaa

SEQ ID NO: 29621 - DNA, 1380 bp, Cannabis sativa
ttaactatttctccttctagtctccctactaaagttataaccaagaataaaattttatagttatttgaaagtgacatgtactcacctatggttgccacaattcttaaattttgtagacagtacaaagaactttcactcaataacttcttaaacttagaaactaaatttttttcttagtgttgcatgcattatattttcctgtaagatacatggtagacacattgagtattttataattgataaattataaaaaaaaaattaatagagggaaaatatgagtaaaataataacgactttctcatcaataaaaatcttatcaagacttatcaactctccattcttcttaatattaagagactctcacattttacaaactcttatctttatgctccagttatctgtatcaatatttaagtcggtaagaaaagaacactccatctgtcaaacgaaacgaaaagagtagaaggaaagtgattctcattaagttgaaacagtggtgtacagtttatatagttacaaagtctaacagaaaagttaggaaaggcaaaactaactatctgacacactttacctaatataactgaaaactgaaaaataattgtggataactaacagtaagcaaacacattgcatattatatattctcaacattacatattcttaacatcccccccctcaaactcagggtggagagagacaaaaccctgagtttgtcctttaagaagagaaatcaactattggaaagggctttagtcaaaacgtctgcagtttggtcatatgttggtgtatgtttaaccactagtgttttggccagaaccttttccctaacaaagtacagatcaagctagatgtgtttagttcgagcatgtaggataagatttgcagacattaatactatgctgaggttgtcgcaccagacagtgggtgatcgtggaatctgaactttcagctcaccaagaagggcctgaatccaagtgatttctgcagttacacttgttaaacttttgtattctgcctcagcgcttgatcgggatacagtatgttgttgctttgaggaccagcaaatgagattggagccaagatacacgcaaaatcttgcagttgatcgtctctcatcgatgtttgatgcccagtcagcatcacaaaaaccaactaagtccagagaggtggatcgagtcatgtccaagccatagtcgagagtgcccttaaggtacctgagaatatgtttgactgttttccagtgagattccaggggtgcatgcataaattgacaaactttattcactgcatatgcaatctcaggtctagttaaggttgcgtattgtagggctccaaccaagcttcgatagagttgatgatctttgacagggtcactcccaa

SEQ ID NO: 29622 - DNA, 2201 bp, Cannabis sativa
tcaatattactcaaatggtcaaagattcaacaaatagcattatttctagggctgcctttgggaagaaatgtagtgatcatgatgagtacatatccattatgagaaaagctctcaagggagctggatttacatttggagagatgtttccttctttgagttttcttgattggatcagtagggttaaatatgagagcttcaatttaagatcttcaagaataatggaagatattataaaagaccacagaaatactatgtcaagggggaaaggtggaaggaatgaagacttcattgatgctcttctaaagtttcatgataagaacagtactgatcttggcctcacattaacaattgacaatatcaaagctgtaatttgggtaagtacttaatttcaaattcattttctgtactatatatatcacttatatatacgagtaataatatgtttaattaatcacaactttacaattaaatataaatatttatcactgagatatataaattaaactacacatgtatgaacttggattttttctatgatcattactctaattaataaacatctatcatgttatttttgtaatacatatatatatatatatatttataattctataagtttattattaatttgtgaaaatgttaaatttattttgtcaggacatttttgtagctggaagtttgtcatcatcttcaactgtggattgggctatggtagaaatgatgagaaatccaaaagtgatgaaaaagactcaagatgaggttagagaagtatttggcaaaaaagggttagtggatgaatccttaatcaatgagatgaaatacttaaaatcagttgttaaagaaactctaagattacatcctccagctcccttgttacttccaagagaaagtagtgaaaaatgtgagatcaatggttatgagataccaatgaaaactagagtaatggtaaatatttgggcaattggaagagattccaaatattggattgaacctctgagttttatgccagaaagatttgttgattgttctattgactttaggggcaacaatttcgagtttattccatttggtgctggaaggagaatatgtccaggcatgttatttggtctcaaaaatgttgagctttcacttgctttgttgctataccattttgattggacgctgcctaagggaatgaaacctgaagatttagacatgactgagctttctgccattactctacaaagaaaagatgatttgtatttgattcctaataattatgtatgatatgtcatctaaggcaaaatcacagatgatgacgatttgcatttgattactagtcacttatgataattatctatatgcatggttaaaaaataaatgattaatttgtaataatttactacttaatcatacatatgctagctcatgtttagctttctcttaatataataaagtttgaatttaaaaatgacgactatagtcaagaatacccgtcggttttaaatggttgtttagtatagaaatggtttaaaacacttaaaaattgaaatggggcatttaaaggggaatcctcgatagatttaaaatgtcgggcatagtatagtactcgatgatttaaaactatcggggatttttggcctaaaataaaattccagtactttcagatctcatttcttaatcttcgtcactcgtctatcactctctcacatctgcgatttgcccaaaccctttgaagccctaacgacgaaggccatccaccagcgacgaagaccaaccaccactgacgaaggctgaccaaccaccgagaatcctccctttgaagccctctcattccctcactctctcttggtccgttcgagctccaccaccgattaagaaacccaccactggtgtccctcttccctcctctctctctctcggtccattcaagctccaccacttgtcacgcttttatcttcccttctctctctctctcgctctctcttctctcagtcagtaatttgttctctccaccaccagccattcctaacctcgaccgccatccacctcgtgccactatcgacgaccaacaaccaccacctcattttaggtatattatttattttttattaatattaatttatatatttaatatatatagggcccgtttggtacgcaggattggattggattagacagactaatttgtccaatccagtgtttgggtatgttagaagtct

SEQ ID NO: 29623 - DNA, 2043 bp, Cannabis sativa
aaatgatgattctggcccaattagttttactgtttttagataaatataatatattattgtatttttcaattattgagaaaacttaaaattttaaattaaaaaaaattattttaacaaataaaaatattgggagccgattttatacccaatttttaaaatcacagaatgtaatctgttgtacggaatggtaagtcccacgtactattaaaaaatttattattttttgtgaattttttatttatttaacaacatttgttgtaggtttcttctccggttgtcaattgtatttcttaattaaaaaataaaaaggtacgaaaaggtacaatcaagttactgttttgtggtagttaatagtacaaaagtattgcagacagtgggcacaaaagtacctcaggggaatagcctctgtgtattcctagtctttgccggcctccaaaacatcgccagcctcaaatacgggctttccttcttcattgtagccatcaaatggcagcacctgagctactcccacttcctcatctcctttagcatcaggaggagtggcaggacggacctcgccctggtcctccatctcttggacttcaacgaccccaacagtatcctcctcttcggtagcaggtcaggcatgttctcccctaggcaaggtggaaaggaaggcgatatgtgtgtcgaacagtgaagatttatgtaccgtctgcttggtctgtgtcatcattctacgtttggacggagttttatttgtgtgcttggcgatagtcacaataaaagtggcaacgggtttacccgcagcagcaaggttttggcggccctcgggcagagtgtcaactacatctggacggactatgtacgtccagttagttgggagatagcgtctccaccccttcttaagttcccaaatgaggtggttgtatccctcgccttagatctagtcgggatagaagtgatgttgtgcctcgggttctgggaaggtgtgtgttcactacttatttcccattcttaaattatagttagaaagattgtcgctgggcgaagatgggctagcacggagacgatggtgatcctcgtacagaagttgaagcagatcctggtcgatacagtggttgcctccccaaaattcaccagggttcatctacaaaaggtatgagacaagaaaaatgagaattggttgggggcaacaaataaaaacaggttgaatgtaccgatcaggtccgattgaggaatcaaaagaagaaatttcactcaaaaacggaattttcaacccagaagttcaaaacttcgaattggaatttgattctcactaaacccctaatggataagtgaaaatggatatcgtaaggtcaaaatcaaagtgcaattaaaatcaaacgtcgtggttaagcacaatcaagatttctaaattttcaacctaggatttccatggttatcctagaacagttaaagaacagtcaaaattcgcagccagatatccagaaaattaagcatgcaagtgtataaaagaaataaataaagaacttactcactagtttgaggttttttgtgcagctcggatggtgttgacaagagttttcctaggaatcctttgaaaattttgagagaaaaagtcacctggaaattttttgctctggttttcgagagagaaaatggctaaaaggaatattgaaggttttcaatcctatttataagcagttcgaaaaaaaatgatcatttcaaaaatttaaactcctcgaattccccctgaaagcatacgttatgtactcatcaggcagagtaaccgtcatcacgcacggacatcaagtcgtgattcgaggcagaactgtcaatcaacattaatgatccgaaattaaagagacccttggttagggtcacgtcagttcgtcattcaacgcctaggacatttttcactcatccggacaagactccaggctgagtgaagtccacgcgcgacctggaaggtgttggaatatgttttaccaagatctaaatttactaccatgtatgttatttaacatcctaaatatgaatatctaaaacaatgtaaataaa

SEQ ID NO: 29624 - DNA, 3852 bp, Cannabis sativa
agaatggagaccctaaaggaattgcacccagtcccacatacgaccacctgaatcaattatcgaaattaggcccgaaggggaagcctttccaaaggtgtgaggaaaagttacaaaacaaatataggtgttctatagattgtcagcttacgttatcatacgccttaacaagatcaatctttaaatcaaataaaccttctcttccattcttctttttaaaatagtggattatctcttgaactaaaatattattatcaagaatattcctactaggaaaaaaagccgcttgatttggacaaatcaatctcggtaggaagggtctaatccaattggaagtgactttagatatcaccttattataaaccatattgcaaaagggagatcgatcggaattgggacgccttctttagattgggaacttttggaattaacactatattggaaacattaatgttcttgtgcatggtatcagttgtaagaagtccaacaccgcctcacagaaatccagtcccgcagtgtcccattagtgcttaaagaatagcactgacattcgatcattgcctggagcttctaagctcctcatagaaaagagcgtttgacggatctcttcaagatctgggattctgctcaactcatcttgctcaagaggagagaggtgatctggaataaaaggttctagacagtctagaggccagtgggcgggtttgagaaagtcccacccaagtactcagtacacactctcccagtttcccctctggaagtaacccaacaatcattcctatctagaatactaccaattgaattcttttggttcctaatggtggccgagatgaagaaaaactcgaagaatttatccccatctttaatccagttaactcgggctctttgttgccaatataacactttatgtttgagattctcatttatccgagtaacttgtttgtaaagactgaacaacggcttttgagaacaaatggatccatctctcatccactatggatttgtctagcacaaatatgatgtgcgctgaacactctctataattgtcccaagttaaattatctcctttaatgggcatgtcaatcaaactatttttgtttaggaggtcagcgatgaaaggcctaaattgattactcccaattgagccaacttgatacgaggagttaattataaaattaacattgccaagaatcatctaggcaccaccaaaatgcttacccaaccccataatgtctggacaaaacttatttttcttatgaaaataaggaaaaccatagacacaagacaagagccaggggtattcacatgggttagaataaacaatacccaaaatctaatttttggagatacaaatattctcaaagctaaaacccaatttccaatccaaataagcctaggagtaaaatggtcaaaatccagaacaccgcttacacacggtatttgtaatatctcaaacatttgtcccactaagaaaaagattctagacttacacatgtgactcaaatgggcatccatcgcaatttctgtcgtcaccgagcaaaaatcataaaaattacataattcatatttaacgtaaataatactcctagagtttaataaaatctctagaattgaaaaattataactctagtgcccatttctaaaattgggacccacaacataataaaattataattaattataaaaaagtcaataatcaatgctaattgcctttactaatccatattctattatgcagtcattacaaaaaattctccgtggaaatcttttcatctaagtgctctgagcaatcatggctcaaattagaactccctagatctttgcaatatagtccttgcttagaactacacatgacgccattacaagaggtttgaaaaagagatggcctaacaacaagagctacacaaagtccataaatgaatccattaaaattgtcacttctgggtccacctagaactaggcccatcttctcacccttttcattcaattgattcatactaaccacggacccacgacaaagcccattagactccaccgagccgaatacattgtttacaccagtgcccaaatcacaagtagacctcagtcttgaattcaaattcgtccctaaaataggtaagttcccagacctctttccctataacagagctccttcatcagggcaggagctaaattctttcaagctcacaaaaacaacttcacccacctttcctgtcttcaaggggatccaaacatttttagagttaggcctaacctctacctgacctgtcacactcaactttataggtactcttgggcctcgagatttttggtaggagagacagtcacccaccacgcctgtaattggttgcaacggagccagaggagcagcacccagcctcagcaacctggaaaaatgacctaacccagccacactcacactagcgatcactaatttactagagaaacaactcacaaatgttaagtgcgtagctaactgacttacaaataaccacatttataaatacaaagacaaagctcttgaaatgctcgaccatcctttagataatttcgtcggctgctacaaacctgaagaatggaaagcatttgtggcttcaagattaactcctgaataggaaaaattgagagcaaatgtgcaaggagtcagggtcaaaaataaatttaaccaccatgggggcgaggtggtattaagaaagtggaagaagataggaaaaaagagttaggccaccaacttactacatccaatagatgtgacttgtggatcaaattacacactaacaagaagggggagcttgatagccctgctcaagaggttgctaaaaggattgtaagtttcaggggatcttctttatccgtgtacatcttgtaggtatgcatcttgaactttcgagtgatgaggaggtcatggatttcttatgagaaggcagaccctctcctccacttcaattctaagtcagttagctttggcgtggtacagtccttgaccaacagggttagcatgtcagactatgcttggatcaacatattcactgtaacgccttgactctcagggacgccacgtgtgtgattttataaacttattattactaatctatacaatttagaaaagtgtggtttaattaaaatcttaaattaaatccaaaataaaaactttcgtttcaaacactgtcgtgatatggggatctcctgctaataaaattcctttacaattaatttacaaaaacactatttcaaaatcaaggttacattttcaaatatagagaaaagaagttgatgttgcttcccagaagccaagataccatagttgatctgtacattactgggaaacctccaactcatggccgaacacagctccagacttttttacctgcaccgcgaagaacccatgagtcacagtgactcagcaagaaaagctactagataaagaaaaatcatggaaagttatagtagatttcattaccgcagaatatacataccaataggtcatactcttccaacatacatatacaattcaacaatgcgaacaaacttattacaaaattaaggatatttatagctaaacataatcaacaacctcagtgtttcataagacaccctaaccatacatcatcataaacacttacttttaatgcttcataaagcactctggttcaagcattagcatattcacacaactttagtgcttcataaagcactctaataatgcatcattataaacacttattcttacatccctaggtcactgagactgcaaggaaagtgactaatttcataagcaatataacatccactcaatcatactatgactaaaatgcattcaattacaactcttcacataatagcacacttgatcca

SEQ ID NO: 29625 - DNA, 1040 bp, Cannabis sativa
tcttaaccatttggtgagcttagtaattgggcgtaggacagattaagcataaagtcagtatagtattgcttatatatatgttatgcatatcttactaggtcggtcgactcattagtttgctatcttgtgtaggtaagggtacaactaagctcgaggagcagtgagatgagcttggcaagggttgtacatatcgcagcagtgcaacctagagggttctggtcttgtaacattttgaactgtgtttcatggttgccttgagattttgtaggttgtaaaaaaaaatataatgtaaccttatacgatatatgtattttcagtaagtagtttaaactcgggatcctgatttacaaggttttataaatatattataattaaatcatttacaaattaacaaattttaaaagttgggcattacaatgaggccctaaaacgaaaggtgaaagagtaggaagaacggaacgagtggcaataacaaatgatgcacactcaaaattaaatcatgagcatgtctcagcaataaatgatgcaattggccgacattgttctaggatttaacattccctcgatgtctccaattctactgattctaccatttcggcctcctaacgctgggtccttttcatagactgcctatcccggtaatgacgacgacgacgacgatgctatggacttgtaattttttttagtttgcaatgtaaataatattaatgtttataaactaaaaatagtttatttagttttggatattttataaaattttatagttacaatataaattttggttttataatatattttgtattatatttatttattattatcttaattttaattttaattttattataaatataattattttaaaaaaatacttttgccggtgaactataaaatgctaaaaaaactgaattaactttttattgtccatgttttgtcggcgcattaatgcgccaataaaacttttgcagttaaatgtagattaggcaccaacatttttccaacgccatatctcaccggcaaaacgtcatcatggacccctc

SEQ ID NO: 29626 - DNA, 2775 bp, Cannabis sativa
aaaaaaaaatcgaaatattttttttttaactttatttgttacaaaaaagaaaaaaagaaaaaataatttctgctattgtagactaatgtactatatcgacgtcgtatgaagttccaaaattgccctttaacacgcaaggtaagagtagaagagtggaaatggtattattgtaaattcgtatatttttaccttacctaacaatttaacctcttcttgaagagtccaaagtatacttatccacgtgttacatgaggagtcctttattaattttatttttttttattttatttaatttgagattgaatatgagccgctcgattcacccttcccttccacgtgcgtttcttttttattcttttaattttaaataaggattttttttacctaaaaataattcataaattaaaaaataattgtctctttcatatctttatttattttgatttttttcttgaggggatagtagcacattatttacttttattttatactttattatgatatatttctcttatataatttagttaaaatcttatccatagtagtacatatatttatagcacaatcctatattataaatattctccttatttgattttttttgtgtgtccaattggaacacaacaatcagtcgaatatgtttcattcaatcattgtgtaaccatatcatgcaaacttctaaaattggttcttttttaaggaagttgaacccataaaataaagcctaaagggacatatacttctaaaattacttagtaaagaaactacattgtttataataatgagttagatgttatattaagattttttattctattttttttaggagaaatctatctttttatattagtcacaattttaattttgcaacatataaattgactaagcatatgaaaatattttccattgatgtaaaaaagaaataacttgatccaatatatacaaacatatacttttgctataattgaacaatatataaacatattcagtacatcatttttcctcatgaatttcaattatatatggaattaattttgtttatagaaaataaaattttaatgaatatatgtgattatatttttgacattaaaattcatcattgtctttatttttctatttttcactatcatataaattcatttgttgaaaaaaacaaacaaaaacaaaacaaaataccattatgtaaatactcttgttgatgttaggaaaacgtcaactaacatacatcatatcctaagaatttagttcatgataatcatgttcacatttataataaaactaaaaacagaatttcacataaaaaaaaataagaagagaagaaagaaactgattgtggaatgaattcagattgtcactctcgctttactaatcatccttttctgattctagggttcaatttttgcgtcccacactctctaactcaaagtttatttaaattagcatcagtttaaactcaaaatatcgcaaaaaatacaaaatcgccctcaagtcatacggactccctcgccgcggtgagtccaatgcttcgaaaacaggccattttgcctcgatcgtcgcagccataagtctcctagtcgtgaccatcaataatttgtcgcgaccaccttctgcctcccgcgcgaccattgaacaaaacacgaaatcctccaatttgtagcaatctcaccgtggggagatagtctagaaaataacattttcaatgtaatttttctcgcctcggttctttattaaatattgatgcactagacttgtaaaaaccacataaacctaaaaacacagcaaacaagcataattttgtcataaaaagtattaaattgactgaaaacaattctaaatacaacctgaaattttgactaaaaatagcttaacagtcactcaattcactggtctaggaacatgaacaaaagaaataacaacaaacttattacaacaatcaataatatctctaataatacaactcaaatttaaatgatcagtaatacgcttgtttttgacaacaataacagtaaggcaattcgattccacaatcaacttgtcataccccaactaaatgcacaaacccaagcttttgtgaaccgcaagagctttagccacatctggttggaaaatgtcatcaaagcacataagtaattaattgtaataaaattcaatacttaagtacttttgccgccaaattttttactcgcgtaattaattatagagtaatttacggtgtaaatacttaagtttaactctcagttgtagataaatacataagtttaatttttgatagtaataatacctaagttatattttcggaacttccataagtactgttaagtgtcaagttattatctgtatgtcagtttttattggtatatttaaattaatttttaaataaaaaattaaagataagaattaatcaacaactcacacgtaatcattcacttcacggtcaagtctttacggaagttttaaaaatataacatatgtatttttaacaaataaaacgacatacgaagttttgctccaattattattttttttacaaaaatattttttttattttttattttttatttttttaatagaaatattgattttggttgtttatttgttttttttttagaacatagtttttgtttagttgcattgaatgcgagaagaaataattgctttaaaaattatcatcataattctatatatatctatatctcattattttggttttgtatactcgcacgtcttattctatagcgttacacctactcccacttcaatttttttttttttttt

SEQ ID NO: 29627 - DNA, 3917 bp, Cannabis sativa
ctggtaaaatattttcaacaatagtgtgcaacaatgtgataatgaaagaaaatgacaatcacccagtacactcaagtgtacaagaacctgacaataatacagaaacaacaactaaacaacttttatctgctttaaggaggggatcaatttaaaaatatattattttggttgatgtaagaatttccattggatttagaaaaaaaatctcgcccatgagcaacccaaggatcctcccaaatttttgtatcctttccatcagaaatcattttgtagtctccttttcgtaatgtcttgttagcctttaccacattcttttagaaccaggaatcagagtccttgtagctttaatgaaggagatttttacgccccaaaggtacttagcctccaaaatcttgcaacaaagggattgactcccggttagcaaattccatcctcatttagtcagattggcttgattcatttctctggtttttaaaaacccaacttgccataatatttaggaatgcatagtttgtcccacgccttgaggttgagtccatgattccctttctcacaactccactagaaatcacgcaccattccatcaattctagccacaagatgactagaaagcttggtagtttgcatgtaatacataggcatggaaagacctaaataaagagataagttgtgaggaaattagcttggcgaattccataagatggataaattctccctacttagcccccattgagacaatcattaagagtagtagtagagatacattggttgatccagttgcaaaataactcaaggccccaaaactctcaagaacaaaattaacgaactgccagctcagcttgtcatatgccttaacaagatcaatcttaatggcaaaacaaccttctttaccttttttcctcttaaatgagtgaataacttcttggacaataatattgttatcttgaacattttggccaagaacaaaagctgcttgagtcgggcaaatcaatctaggaaggattggcttgattttatttgcaataatcttagagatgaccttacataacattttaaagagaaataggcctaaactgactcatccttttgggattcacgactttaggaatgagcaccaaatcggtagtgttgacagccttacgcatatttccagtttgaagaaaatagacagtgcatagtaatgcctgaaaaagagaactgacatcccatctagaccaacgattttatttcttcccatagtaaaaagagtccttcttatttcatcatcagtaagaaacatgacaagatcttcatgctcatctatcgaaagacggtcatgaatgaggccctcaaaattgggcacctgagacaagttgttactcaaaaaaattccactccaaaaatcaatgaattctttcctaattaagtgacgcctagtaacccacacatcattcctatccaacatactctcaatagaattatgtcaagtggtagcagacaaaaagaagaatttggaacattgatctccatctttaagccacgagatgcaggctctttgttttcagtaaagagctttcctttccaaagcttggttaatggaaccacgaacctcacactcctctttccaatctctagtacctgcaggcaacttctataggtgattaagaacatgtttggcattatttttctgttttttagtttcaaaaaagtatttttaaaaatgagaaaaaaaaattatttttaaagttttcaaaacacaagtcgagtttggctaatgttttttggctaatgttttcaaaaatattttcaaaaataatttttatttttaatttattttattttttaaaaaacacttgaatactttgagaccctgatatgaataagacccgaacaggacctgaaccccggacctagacccaaacactaaccccgaccccagactcaaaaataggttgggactggatccggacccgaaccccaacccgtacccagattcaaatctggacccaaccctagcccagaccttggacggtcgaatccaaactcgacccggacctcggaccaagacctggaccaagaccttagacccagaccccgaacccaaaatttgggctccaaacccagccctaaactcggacttggatccggacacgacccttgacctggccctggcttggacccaaacccagtcctagccttggccctggcccgaccccaaatctcatcccgaacccagacccggccctagagtcggaccctggagccaaaatcggatcccaaacccgaactcgaaccctaaacttggaacttggaccccaaacctagatctggacacggccccagacccagactcagcccaaacctgaaccttgacacgaaactagcccgaacctcgaacgcagattcagatcttgactcagactcagaccaaacctggccgcagacctcggcccgaacccagacccaaacccgaacctggcccggaccccgaaccaggaccaggcccggaccccagacccaaacccagccccaaactcagcccagaccccgacttggattcggacccgacccgaccctagacataggcccgaacccggactcagaccccaaccctgcacccggaccctacccgtccccgagctctagcccgacacgaactgaaaatgaggagagagaaaatgatgagagagaaaataatgaaagagaaaatgattagagaaaaaataatgagagataatgatgagcgagataacgaggagagtgaaactaatgtgagaaaataaagagagagaaaaaatgtgagaaagtgatgagagagaaagtatgagaaaataatgagaaaaaatgatgagagagaaaacaataagagagaaaataatgtgaaaaatgatcagtgaaaaagtgatgaaagagaaggaggagagagaaagtgatgagagagaaaataatatgaaaaaatagttagtataataatgtgagataaagtggaagaaaaatattaactgaaagtgaattgttttataaaacataaaatattattttgttgttcttaaaattcttattttttgtaattttatttttaaaaattattttcaaaaaacgaggccaaacacgcttaattatttttaaaaaatattctcaaaaaaaaaattatttttaaaaaataattttttatttctaaaaataaataatatttttgtagttataatactaaatatgcactgtagttttataaaaaaaattaaataattatatgattgtaataagagagtgaagattaaaaaaataaatagaaaatattttggagcccaaaattttgattttaggtgcacataaagggtatatagagaatttagaccgaagtgactggttccaagtcgccaagtttgcaatggtcagatcacgtatacaactgtagtggtgcacatgctaaatagacaaactttaatgttggaaatagtatatataataaaatatactaataatattatccaaaataattgatatatcatacaattagatatataaaactaacaattaaatttatgtagcatgtaagactggtctaggcataggcgggcttaccgtatttagggcttatattttttttgagcccaaaataaaaaattttattttttattaaatttttatttaagtaaaattaaatgtcttataaacaataaatatttataatttagttggttgaggtgtataatatataatgttatgagtttgaattctatgacactcattttcaataatttttttatgtatatttttttagagtgagtgcccaaaaatataactagccttaggactatatattctcaaagccaaccctaatatcatgctaataaaattatagggatatgattttttcccgtgatgtacttattccgtggtacattagatgagtcttagggtacattaaatgagtg

SEQ ID NO: 29628 - DNA, 2008 bp, Cannabis sativa
  modified_base (981)..(982): a, c, t, g, unknown or other
tgtattggttaaaaaaaaaattaaggttaataagtatagaaaataaaatttcccttaactaaacatatcctttgaataaatgatgatgaaattttttggatggaaaaagatattagtgtgttaattatccatctaacattaactttgcgacttatataaaatagatatgtttttgaaaaaattattagacaataaaattttaatataaaaaaaattccctaagaagttttttgttctacgtacatatattattatataatgaaaagattagaaagaagatgaaagtaaaattattttgaattgaaaaaaaaagaatcgaatacatagtacattgtgatacatcaatttatatactaacattgcgagctagcaaaagttagctatgataattagagaatagataagccataagtagagttggataacgaactctaactgtatggacagaaaatggctgacaaacaaactaaagctaaactaactggaagaccaactaattaattgaaagagcactgtaggaaactcaacattccaataatgcccttacactaacaccacaaagtgcaaaagaaaccaagatcaaacttgacctttctccatcaaaaccctccctttatggtagtataaaagctctcttttcagcaaaaaaccctaacagccccttttctttgatttctctaaccctagcagccgcacatcactcctcattctcctcctcttcttgctgcagtaacagcacttcaatggcagccaagacttcttcttctccctttcttcttgttgcagtagcagccgaaccaaggctactccttctcttcaaaccgtagcctagccctatttctcttcttcttttcttctagcttcaaacaaagccctccatacccgaacctgtacaaccaaataaatactagaaaaatgacagcaagcagaaaattaacaacaagatgacaaagagtttgatttcggagttcccctcaaaannaagggtacatctccgtcaagcttccctcaaagacacttgattcttcactatccatgtcaaaaccaattacaaggagttggagattcctagccacaatttcagtaggtaatctcaagctttttctctttttccttcttttatttttctggttttattacaaataaaactctctaactctctctggttttctctcttattttttgaggttgtttcttcatgaaatggctgctgttattctccttggctggggctgaaaaacactcctcaaaaatgggtaggttactcctctatttatattgttgttgttggctgtgatgtgtttgttttgagctgagaaaacagttagaaaaatttattatttttcccttgtcttgctgaaagttggttagagtcttggaatattgttatttacttctttattgtaaagagcttaaagatctaagcatatgaaaaccaaactgactactccaagagttataatggtctgctgaggcttgtaaaaagtcttatgttatttttcttgtaacttgtttaaagcattttccatgagacagttagtatggaaatttatccaacaagcacaaattctgttacccctccccctcaagatggacagtatatgtcataaacatccatcttgtggatgtgagagtgaagtatggtataaggcaagagtttggtgaaggcatctacaagttgctagttggtactaacaggtattagatggatggtaaattgcttgattttgtcttgaatgaagtgacaatcaagttcaatgtatttggttctctcgtgaaatgtaggattgttggcaatataaattacgaactggttatcacaataatgaaagttggtgtgtcttgtgagatttgaaagtcgttgagaatgtattgaagccaggtgatttcactacagtttgctgctgaagctctgtactctgcctcggcagagctcttaaaaatcgttggttgtttcttagtgctccatgaaacaaggcagttgcctaaaaaatgcaaaaatcggtgg

SEQ ID NO: 29629 - DNA, 1445 bp, Cannabis sativa
ggatttagaatagttttcaaagacaagataaaatgatgagtgtaatcatatttcgatgaaattgaaaatagttactgtttattggatttagagatggtttagagtagaatctccaagaaaaaaacagttacgttttgctttaaatgatgaaaaacacatgggtatgtgtttgtttaggcacaataatttgtgttcttttttctttactttctgaccctttttcatagtttatttacttcttcagtccacaataaattgaaatacaataacgaagtaggccacccagtcctctcttcactttctagtttctatcatcattaatagtaatacaacaaaaggtccccttaatttttagctaaattctaattttgaccatctattttaagaaattatataaaaaaaacccaatatttattaaaatggtaaaaaataatcctctctacataattttagtcatattttatttaaacaatttttcttttcttttttttttaattgagcttaaattagattttaggtgatttgaaaagttaattattaaaaatacacaatattgttgatctttttgaaagaacaaaattcaccaaaaacatgttagaggactattatttactattttaattatcaaagggtctatttattattttttaaaataaaaggtctaaaatgaaagaggggaggcactttttttgtgttatccctaattaaaagaaaaattacatgaaatgtgagattttatataaaaaaaaaaaattgcgaaaatatagcatttataaatttgttactcttttatggtatttttttacatttaaagttttttatggtatttaatatgtcacatttttataaacttattacccaaactcgtattttatgttgaagtaagttaaaaaatattacttttattaatcaattaatcaaatttacctctaattttatttaaacatacatctttttatatatattgtacccaaattaccttgacataagagaatcacatgaagagtatcttgaagtgataagggcaaaattagtacaatgtttaaaaaacgaggtaaaaatgatagaatttaaaaaagaaggtcaaaataaaagaaaataatataaaaatagtataaagtgtaattttatatttttgtttctagtccaataaattttatcttaaaatatgtttttgtaatttaaaatatgataactgtatatttttttatcaatacaaaataaaaaaaaaatcaaaactaacatttcaatttattttataatttcttcataaataattaccaaaatttaaaatttaaataaaattcaataaatactaactaacttcatgttttataataaatattttatgatatcactaaaaaaactgtaagatgatattctcaataaacttattttataaaatatttttataatttttttaaaatatatatatatctttatat

SEQ ID NO: 29630 - DNA, 2712 bp, Cannabis sativa
tggtaaaatattcccaacaaaaatactatagcaggaactagggttcttaacgtggtaaaaccctatctgtaatacataaaaagcctcaaaggtaaatacattgactcgtggactaaggttcattaacacctgaaccacgaaaaaatctcattctcattcacttagtcgtttatttaatttgttaaagctcttaaatatttctgaaaatcttggtaaacagatataatttggggtttgctgctaagcaccatacttttgtaattttgaaacttaaacatagaatttttaagtctttttttttttatagttgaattattaaaagttgagttattaaaattaaaatcataaaaatgtaaaataaaaaaaaataattacttgttatgtcttgttgatttgtaatttttattttattgatataatttggggtttgctgctaagaaccatagttttgtaattttgacacttaaaaatagaatgtttttattttttcttgataactgaagttttaaaagttgagttgttaaaattaaaatcataaaactgtaaataaaaaataagtacttatttattaggatgtaacattttttatatttggaaaaaaaattacacattttttttttgtgtaatttttaagaagaaaaaaaatcacaattcacaatgaaattaattagtgacaaatatattatacaaaatttaaaaaaattatttgcaaacatgtaaaaaatatctacaaaatggcctaacatatttgtgctattttcacaaagcaagactacttttgggttcgctggatcaatagtatctatacgaagaatcaagacttttggctctttacgacgagttcgaatagatgtttgtattttagagaatttgtcaagcttagagatgtcatcgataagcatgctttcttggctgctagtagttcagggaaatttaaggcgaaaaatttctacttgtccatcatttcagcagataagttgaagtaccataaggtagtttggcacaaattaaaggtcatgaagcactgtcttattctgtggcaggccattaatttgactcgtgatcttcttgccaaatttcttaatgtggggtcttgctatgcccagtttataaggttaattctaaatctcacatttttcttttatttagctacattttctcaaagatgatggtttctgaagttacgagttggttaggccaaattaattggcctagtaattttgatgattggatggttcattgtgttgagcctctgaatgggatggtggtctctattacttctgttgtaatagcaattgatatgtattatatttggtgtagtcacaacagatgcgtatttaaagctacttgtggttcagcaagagctattagcaatcagatcaaacattgcattaagattaaagttcactaatactattgtactttgtctaagctttttccttttaaagagaaaaatataataactgtaatcaacaatttttgagttgtttggttgcagcttttgcagtgtgtattgttcagtaatagttggaataaaattttcttcctttccaaaaaaaaaaaatgtatacatatataaattgcatagtttttcaaaacgaaacttcggtatgtttaatatataaaagcgaataatctgtaatccatagtgtttgatgtttaatttatgagtatcttgtaagcgcaagaagagaagacttgttaccaaatttaataaaaattaaaaaacattttttgaatatgtttcaaaagagatcccttccaaaaataaaaatatttaaatgttagaaataattaaacagacagattgtgaagcccaaaatatagaagccatcggttttacagcaaaaatgtttttacatggcaaacatattacattcaaggaaatgctaaataattttattggatgtaccctccaatgaggttccagaatctctggccaaacaaagccttgacggcttaaagaaaagattaaaggagaaattaaataaaagtgaatatgcaactttattaaaattatacaaattcacctcactttttcgacagtagcgcactgcattgtgccattatctttgatgctcttgtgatcggatcagtcatataaaagttctcaacaacagttccaaatggatctgaacttattttctgagcagatttaggcttcaagaaaggtgaaaatgaagctggctctctttcgtccacatgcaagaggttcggtgcaacagtcttgatacgagatctgattgctgcaagcgaatcatatggcaatggagtccctaccacctcagacagagccctgataatcttccaatcatctctggcatcacctactgttgggaccgcaggcaatgtttgttgagtgcaaccttcagtattttcatatgtaccctccttctcgctgaatgccgatgctggcaaaattacatttgcacgatacacaccccgatccccatgatgtccctgataaaccacaaaggcatcagcgggaaccttatccaagttcacatcatcagcacccatcaaatacacaaatttggaagtctggaggctgtctacagactctggcacaagacccaggtcaagtgctgcagcctgggcagcactgagaagcaaaacattgaaaccattccaatcaggtctgataacttttgcattatttgctatggcttcaacagttgaaaaaattgcatccttgtctaccctatcaaaaag

SEQ ID NO: 29631 - DNA, 1008 bp, Cannabis sativa
ccttcacttagataacatactacaacaatccgaatcaagatttcttgcatcgaataacgaacatcaatgaaccgtactagcaaacgttgattaatgattccataattttaatatgttgttgattattttattcatgaacagtgatcttaattctccgtacaatacaagtaacatcctcatatatgaataaaaaaaatttcgatatatatatataaattattcgaaataaaatattaataatttaacattcaagcatatatcaaaatattcaacaaatatgtataatcaaaaatgtctttacatactttttagggcataaatcctaatatcgcagtggtatcgatgccaatgatgttggtgtggggtgagaaggctgactgcggatggcgagttggctactgtcgacaccaagaggactagagtgagagagtgatcaagggtgagtagagagttttagttctagggttttattttgatttgagtgagaattgtgagatctgaatgtgtataattttgtgagtaaaatatattttttttttttaaaaaaaaaaagaaaaattatattatgtcaggtactcgaacgcagtacttccacaatactaaaactcgggtctgtttgaaatacaactgcgtataacctggacccgatcatttgtttgcgaaatatattttatgatttttatcgtttgtttaaaaaaattattattttttgtgttaatttaacattaaatttaatatttaccattaaagttggcttatggacaattttatagtgttaacaataacatcttcattgtattactcaatattatttttagccaataataattccttttagtaacatatttgttttatttttaaatttttttttccttttaggttgtaacatggccaaaaaaaaatctaggattagaaatacaatttagaagacttgaaaggaggtaacagcaaaaatgggagtgacagatggaggccaatcaatgtaataaggtgagtaaagatgtaaga

SEQ ID NO: 29632 - DNA, 3521 bp, Cannabis sativa
  modified_base (2386)..(2391): a, c, t, g, unknown or other
aaaataattttagagtgtcatgtcaccatctaaatccttacctttataaatatatataaatatagactaggtaatgaaagtgctctttgtgcgactaattaattttttttagtattataattagaagatatttttttttttctaataattacttaaaaaaaattctaatacataataataaaattatattatctaatttcttattattaattattattatttggagttatttattacaaagtttcaaatttgtaccgttaatgtatatatatagaattttatttttttaaaaaaaattattattataaaaataaataaatagggtagtgtaggaaatattggagtatttcccataatacaattatttttatatcccgatcctttaaagttattgtcattaattattgagtctcacctgtttttatcaccatttttacctattgtgatcattgtaactcatttatagtcgtcaccaggggcggagccagaatttaaatactagggggggcaaccataaaaatttctaaaaaatttatattgcacccccttaaaagattgttttggtacacctcttatttgtttcacctaaaaaaaatttttttctttattttttttaataagcgcgtacattttcaaaaaaaaaaatctaaatattttacaatgtcataaataaaattttaactattacttaccacatgtataagaaaaagcacacacgcatcaacaaaataattgaatcttattttgaacactgtaaactatttagaattttctaaaaatttatatgtgattctaaataattacaacgtagacaattataaagaaaaaatcgtactaaaaaatttttctggatacaaaaatagatagggatagaaacttccattctagtggatttactataaaattatccaataatttttgtaccatataatatatattcatgtatagtacacattataaaagtgtcgttctggcaagctctatctgttttgagatctaacaaaaaaatttagtgcattttattttatgattgtataccattgtaattatttaagatcgccgataaactttaaaaaattataaactatagcataaaatttaaatattttttttttcacttataactttatttttttgtatatgcaaatacttatactacacatttatatgcaagtaggtatatataatttagctgcactacatatattacacattttataaattcttgggggtcatggccacaccatccctaaaatacctccgctcctggtcatcactagtgtccttcctaaatcttaatcttaatcttggattcaattttgaatttcaaacattttttttaatacatatttaagctctaaaaacgactataatagtcttatcatcgtacatcattaaaaataaaaacttaaacttatgacttgatgtgttcactaattagtcctgatcacttaataatttgttaatcatacatcatcaaatatgagtatgttgatcttttatttttaaatatagatctaatctaacattaatttggccaacgctttcactcttgagacttttgtttttgttatattgttagaataatattttttaattattaaattataatattttttaattatacagttagagttagaattcttttttaatatttttttgaacaatttttttagacttttttaaacatagtttgaatttttttggaatatttttattagaataattagcacttttgtcctttgaactttcgatactatttgatcttgtcccctaaaatatacgatttgttaaaaattatccttaaaatataacagctatataattataatccttctgttaagttctgtttcttttaccataaaaaattagtatttttaccccatgaactttgaccaatacaaaattttgccctcttttattaaaaatattatttttaaaaattataatattctgttaattttgaaaaaattaataaaaagttattaataaacttgataaatatgtttatttaaaaccctaaattattcctaaaaataatatttttaaactttattttatttataaacacatatcttaaaaaataataccaaaattattgaaaatctaataaataatttaaacaaattaagattttttgaagaaaaaaaatcaattttacttatatttataaactcatatcttataaataaagaaaaataataaaaaattcaataaaatataaattattttgaaaaaaaaagttaaaaattaaactaaaaaaagattatgtttacttaaacaaatctagatttttggagaaaaaaatagattcaaacttgttctggtaaaatttaataaaattaaatttttaatattttatttatatctaaatgaattttttaannnnnnataaataattttttaaatcgcttaattagtttgaaattttaattttcgtagtcattcaaaataatttttttaagatctaaattggttttttaagatttactaaattttttttgaatttttctcattttaaattttgagaatgtacgatttaatagttgtcataatttaggagacaaagttgctaatttataaggacacgtcagcatttaaacgaaataatgagacggaacttaacaaaaagactaaatttttgtaaatgtaagagtttagtgaaaattcttaacaagccgtatatttaaggaacagaattaatattaatgtcgaaattcaagaggtacaattactaatttttttattattatttttaataatttttaattgataagatttagatttatttaatatagaatttaaaatcaaaaaataaaataaaataaaatactttaaactgtcacatcaacactaaaaaataaaacatgtaatatatatattaagatatcggagggttatttttaaaaaaaaaaaaaatatcatggaggattatgtatgtttaggtgagaaagaaaggtattccttataaaaatggaggagaatttttcctttattttctctgtaattttgtgtgggttcccactactttctccatttccaaaatttctgtacaaccttaatttcaatttactctaggagatgattttttttttttttttgtaatgagttaaaattgttattagagaatattgctaatttagtgtccagttattttttgagatatatctaattcatatttgtctatggttacaatggttgccatttaatgatcatagtttttgtggctttatatatatatatatataaatatatatatattcttaagactaatactgatttccaatatttttgtttctaaaagcataattttgaaagaaaaagtatttttactattattgttattatatattggatttttttttttttgagaacgtaaattttgtttttattatagggtattttttgtttttgatatattgagaaattatattatagttatattaagtattttgtattttttaaaaaaaatttgaataatatatgatgccaaaaataatattcaaacattcaaaaccagg

SEQ ID NO: 29633 - DNA, 2901 bp, Cannabis sativa
attttttggggtaggtagtttctaagtagaactataggttactctactatgtattttggggtttttgacgagtttttcagtgataatttgttgcatgtttcgctgttagggtaatctttagattattgctcgtcaaagacattaggaatcgatagtgagaatcaaacttagaaatgttgtcatgctttatgaaatttgatgctttgtgaaccctgtagttgcattaatgtcaattatgtatattcctgcaaaatcttgacaaacgttgttatgaatggtttctccaatctaggatccttatggtattggacgacatggtttagtccttttctcatttcatgatcgcgttctcgatctatcttcgcggagcattgttctttaaggaatttgctcccaaatgttggatccaacggggacatctctgagcagttatcggggaggactctcccgtacccttgctatttgtcttagtgtgggtactaactacttggcttccttattttgtagcttccacgatgaccgaggaggattttcttacggagcatatattagacgatgaggacacagaacaagtccagaacgtggaagatccagtgctagaagaggagaatccattgcattgggagatggaccatattgacaataaattccaaaactatcaggtcctagttagctatgagaagtggccttcacagcatcccttgtatgttatagaatagactatatttgaaggacaaaactgcgacaaaattgcaagttcaagcatcgacgactttggcgcgtagagttggagccatgtcaaagctggagctcacttccctctaagaaacttgatactaagcagataattttaaaagacaataattaataatttttttaaaaaaaaaaaactaaatatagcataattttttttttgtcaaatttaacacaaaatttaaggggcaccattaaaattcaattttataaagatgtgacgaaaaatgcatgtgcaacatttttatagcactcgattagagatagagacgcttttagtgaagacataaaatctcaaattgcaatgagaaaacaaaattataaataactcaaattaaaagataaatcgtatattaaaagaagaaaatgagtaaaatccccatatcatccttctataataattctactgacttgctctcttgacctgaaatttcttaaacagtttcagattgtccattcattattgagtatttagtgggtagtggactcctcatatacgagtaaaatcttaatatgtaatcatgcaatgcaccagaatggatgaaaggacacagctcattgttcttaatatcacattacaaacaattggaaaataacaggagttccttttcatttttcaattaacaggctatggacctctttctttagtacattagaaacagaagaacattcatctttaagctaaatgatcgaacacttacaataatacggaactcccggtgcacataccatatttcttttaacccatggcatacttctgggtccagctcctagcagtcgtctcgtacttgctcctgtctgtcttgtacatgtgagcaatctcaggcaccagtggatcatcaggattcgggtctgttagcagcgagcagatcgaaagcagcacctgaacattaaaaaaagataatcacagatcgttaactctctacagcataaacagatcaatctgaaggagttatttatttatttcaaaatgcagataagaaactaaagtagttcatcgaaagaatgacttgagaggaaacatcaaaattatgatatttagtggtctaagtaacaaggtttaatgatacttggcaatcaaccagtcaccattctctccaaatcagacaaatttagaccagcggagaaattctataagacaggcagaatggccatcttctaaacctttatagatatataatatagagagacagagagagaaggccctgtattgattatatagtggttaaatagttgtaggtaaaagataatgcacctgtattccacacaaaaaacagtttgacttttgttctagattggaaattttaggtttataagacaaaaaccttcgagatggttagagctgggctccactgctccttcaagatgtcaaggcaaatgctaccattgctgtttatattcgggtggaatacctttgttctaaatgccacctgcagaagaccatcaatgtcagagagagagagagagtttaaccagaataacaattttaatgaaatagttcagactagcttagcatgctggaaaatgacccacaaaaacgttaacctcaataatatactctggagataggtattaggtattgaataaatttgataagtagtcaaataagtgtgcaagggcaatagaatgaagttaaaagcaatcatgcaaacacaaaatagaccagatataataatggccacatgcaaacacaaaatagaccagatataataatggccactgtcagttgcacctccactaaggtgatactgataagccccaggtcccactcctataagttaatctccacaatatagattattcttggagcaaatatacctcctgagcgagtgcgagattgcagtattccaataaagaaatgtatgaacaaagatatgtaatgaaaagtaacccaaaaaacatttcaaacttagaacaaaaatgaaaattcaatgtcgcaagatattaagaacttactgaaattagtatagacaagatagcaaataaaatggtaccttgggaggcttaaagggataatctggaggaaaatggatagtaaccaagaaaacacccccagcataaggactatctggaggtcccatgattgttgcctgccagtgaaacatatcttctgcaacaggacctgtaaatatttgcaaataaggcaat

SEQ ID NO: 29634 - DNA, 2457 bp, Cannabis sativa
ttaaatgacagtttacaactattggaaaaaaattactttaaatgacagtttataactgttggcaaaaatattatgtagattaaaaaaataaatttaagctagtttattatataattacaataatattataaataaatttaaaaaaaaaataataatacaaacaaaaattaaagaaattacaatcataaatataaatttaaattattatgtttacaatatttttcaatataaagtatatacaattttaagaattaatttacacacgtttatcgaattcaaacaattacactgaatagtaaataatttatatccaaataaataaactcaaactctaagaacaacggctacggctggttgaaatgctcgccagagctcctccactagtggcggtagttctcagtcagagtggatgcaagaaggatcgagccacatattcttgaagcccttaaggaggataaccccaaattgggttttcttcacaaagaaacgagacacacctacacaaattgggttttttactcaaccaaatatgaaacaaaacctacacaaataagaaaataattaattacatatatatatgtaatctaacaaatcatatagcaaagataaaatgaacaatgagaaacaaaattcaaatattatgtgtgtcctcgatcatcatcatcatcataccaataaattaaaaaaaaaaaaaaagattatttacctaaaattgagagtgggtcatcgatagaatatatatatatatataaaacatgaaaataaaaatataaccataatgaaaatctgaattgaaattttaaaacaattaggccaaatataactataatgagatctcaccgtggttgttactaatattcatacctggaggtgcccaaatcagacgagagtgatggtgagagggagaaaggagggatcgagtgggaggaaaggggtgggtttgggggtttctggggtggggatctacgtggtgaggtccatcgggacctggggtggccggagcacttccgtctagcgagcagagctgctcgagaaaagaggccagagagagaggataaaagaagaggcaggaggaagaagaagaggaaatagggtttagattagggttttcatatttttccttttatacccttaaatttatttaccaaaatatttacattaaacctggttatttattttctcaaaagaaattttgattatttattaattatactttatttcattttactcccaattaattaattaattattttagagatattttatttatctcaaaaacactttattttaataatttttattataaaatatatatttttaattatactaaattttttaaatatttttattttacttcacattcttaaaatatacctatcaaacaaaaataaattatatactaagttctatttatacccctctttttttttctttttatagctgaaacatatttttttttagttattttctttaattaaatataatttttttattaagaaaaaattaaaaagaaaaaaaatataagaattttattaactacaattttttataactaaattcacatgaattgtacaataatattttataatgttctatttatatcttttttttttttggtttaaatcgctgaaactttttttttattatttttaattaaatataaatttcttatataaagcaaaaaaaaagtatataaatttcttttactaaataaaatttttgtaactaaattcaaaataattctaagacctcaaataattatccaatagtattttagtccttatttttctttttcacaataatttttttcgaataactttcacaataaatttttaaatacaaataatttctaaaattatcctctaattaaaatatataaattctaaatttctcaatttataaatttattaagcaaaaaaaattctttttctattttttaaatctgaaactttttttttttggtaatttattttattaaatacaaacttattttactaagaaaaaaagtacaattttttttttagatctgaaacttttttttagtattttcttttattaaatacaattttttttattaaggaaaaaaatcttttctttaatctaaaaacttgtttttgtatactaaaaagaacatggaataataagtattcccaacactttataactattgggaatactaagtattcccaacagttataaagtgttgggaatatttagtattcccaacggttataaactgttgccattcgctgtttcttttaaaaaattccatttagtattgcccacggttctccaccgttggcattagtttttcccaacggtttctttgcttcggttctaaaccgttggaaaaaatatcctcttgccttttccaacagtttttataattgacccccttattaaccgttgggaaaagccaattttgtagtagtgcacgcatagaacttagaatttcac

SEQ ID NO: 29635 - DNA, 1319 bp, Cannabis sativa
cggcgcaaattgtagaggttgagggtctagagaatcggtcggcctacaggttggggtgagaggccgctcccttcgccacagagctcttcgaccaggttgtcgagagcgcctccaaactgcccacctgtagcagcgcggatgctttcgcgctggctcattccgcaaagtggcaagccattggggtaggtcttcaggatgcttgcttttttatttttccctgtccttcgtattggtgtttcaacctattgactgggctttatttcttaacaagcggccttgctggctgaaagggccaccgtggaggttggcgcgctggtgacagacttggagctggtcaggacgtcaaaccgtgacctgggcactgccaacgagaccctccgacaggagctcacggatgccaagttctagatcgagggcctgctataggccaatcaacagttggaggaggagagtgcccgctaagctcgcttcatctaaaacatgaaggttgttcatgacctttatacagagactgtggaatggatgtccagcgtaggtccttcctctccgtcaggtggtgcgcatccatgagcctccagccggccttttatttaatatgtttatttttttttcatttgtgtatgttccactccttaaccacactctttcaaccacggagacaattaactttgccctggtcacgggaggctttttaatagttgagtaggatatatattttcattgttcctttcttagagacctgttatgatacactgtttaggggctggttgcattttttgaaacatctggttccaacggccagtgtttcaacctttttctcttagcctttggttgtctcctagttggctcaggaactgtttttcatctggttgttccttttcgagagcagcgatgctttctggctcgcttcctggaaggttgcttattcggcactagccaggaaatggcctctctctgcaaaacaaggccttccactgtcccctttcgggtctagtcttctcataaagtcaagcttcgggagcattgtctgcgattgccttaagcattttcctttggtcttttttagcttctcattttgaccttttatgcaacttgctaggctaaactcctcgtggagcccgtggagatgtgtaagaagagactcaagtgtgtttcttcgattttgaaatttttttgcgaaatgggcttcttatctctgtgtttgctttcgagcttagcttctgagggaggaactcaagtgtattttccttcgaggagactttggttgagtatgtttgtaatgaccgctctagtaatatggattagaaaaggcaattagc

SEQ ID NO: 29636 - DNA, 3255 bp, Cannabis sativa
ttatttgtacgtacttaatggaactaattttatatgttaattaacacgcctaatagctttttctaataatcaggccgagccctataattactaattactgcttggttgcatcattaattaccaatacgatctagcattattcctattagctactaacacttagtcatattattatttagtgtattctctataaattattatattaaattatataaaattttctacttaattgtactaataataatattgatactttaaggcaagtggtgcacaacaccgctctaagcctatacacttttaaaatacaacaaatcattatacaaaaaaaatatcatcatgagtgagaataaaaatagtattctcacctaagaaaaatctaattatttatgataatttaaagattttttttaactttttgtttgcagcaaacacatagaacacagttacgaaaataagtcaaatatattatataatttgactcaaattttaaatatatgcattctttctcttacagttaaataaaatattatacctaggaatgcctttatcataaatttattatatatttttttaataaacggatatttgttaaggaatttaaaatggtcataattattcctaatttgaaagaactgattaagttactaacttattttgtatatgcccttaaaaatgaaaaaaacaaaaattgcaaaaaagataatatataatataatttaatataataatttttagtaaatatcactaatcaatcataaaatagtaatacttttaaaaaatattaaacactgatatctaatcataatgctaaaaaaaaagtctaataattagttaaaaggcaattagaagtgattggactggcttttgatgatattggctcatctatgtagaataatattattgcttattttctactattaatatgttgaaagaaggtaaaccttgttcaatcatgtacttgccattctaatcaaagcaaaaaagtccaataattaggttattatatataaatgtagatagtatatgtaatttgagtgcttcagtagaaagtgtgattttattataaggaaaatagaaagtgtgattggggttatcacacaccactaaaatgattagttatatagtttaattttttttagttgttatattattaaacaatttatttaagctttcaaaaatgaataggaaatactctttatatttaatatatgtatatacgtaagtaatttgtactataaatacttaagtgttaatttttggttataaataaatatctaaatttaattttctgtagaaataatacttaaattatatttctataacttagtacctaaccgtaaaatgtcaagtcactatccacatgtcattttcttcttgatatatttaaactatttttaaaaaaataaaataaaataaccgaaccaattagagattactacgtgacaatttacttaaaatatctacgtacctacagaagttttagaattataacttagatattattactgctaaaaattaaacttaggtatttatttacaatcaaaagttaaacttagatatttatgccgcaaattactctatctataggtgcactcttaatgggtattactcatgaattagtaaaattagaaaattttaagtttttatgcttaatttttctatctaattaaaaaaaatattttatttttacatcatatgggttgagttgttccgatgaaagaaaaattggaaaacaagtttttcaaccaaaaaaaaaaaaaaaataagaaaaaattaaattttacttaaatatttttatatgaacatatttttgatatagtgtaaaaaaatgtattctaatatatattatttaatcatctaaattaatatagaaatttaaatttctgttttatcaaaaataaaaaaatttataataatttggtgtgaattctatactaataaaacactaaattgaatgagattttacgttaaattcattccaaccacgctctaaaacttatctcatttatagcatattgtcttactatagtgtctcactattaatattagtgtgacactataaactacactaaatctttttctattaatttttaatctttaaataatatatttatacttaaattttttgtatatttattattaggtttatttataatttaataaaataatataataataaagaatatgattttagtatactttttagagttgtgattggaataaaaaaaaaaattaatgccaaatttttattatttttgtgttgatttaacattaaatttaacatttattattggagttgtcctaagagatgttcgtgtctaattactaaagctctatcaagtggtgttgccctaagagatattcttatcataagtctgttgttgactttcatgtgttttggctatcccacaatgctaatatggttgttcacgagttagcggtttaggctgcatcttacaatgttgctcgacgtcggtgctgtactgaaagggaaatagcatctcttttgttgctactacaaactttttctggttgtatgaagtctatcaaactatattaaaagaatagaaataaaaataaaaggttgtgaaagattttcataaatttagtcatatggaatatgttgtaaattgtgtggtaccaaaaagttaatgtttatactttatagttgagttgggatatgtaattagaaattgggtgtgatagcgtgtgaaacacattcattcatgaacaatttatgatttttttaaccttcccaatgagatgacacaccaaaccaaacactcattttcccctaatacacaacttcttcttcttcttcttcttatgggaaactagtaaattaccaccaccaaaaaaagtcaatcagttaaaaattgtgaaaagtaattactttctctgaaatttcgtccacaaataaaaaagaaactactcattaaattttcttaaaagtgaacttagaaaatgattctctctttgtaaatttcttctttttacaaaatcaaaccaaagtcagctttgttatcaccaaaaatagaatttaaagaaagttgaattttcttttcttttctccttacattccccaaaactccaccgaccttatatacaaattagattttacattttcccaagaaaaaattagaaagcgtggtctttgacattgttcgttttaagtattaaataataattaacaaactaaccgattaaaaaagagaaatgctaaagggcaccactggtgcctagcaccatcctacg

SEQ ID NO: 29637 - DNA, 2236 bp, Cannabis sativa
  modified_base (28)..(48): a, c, t, g, unknown or other
acagtaaaaaagtaaaaaatagcgcctnnnnnnnnnnnnnnnnnnnnntgacaaaagttagtataccatataaattttcctactaaaattcaatacatcttagtattgaggctaatttagcaccaaatgtgctaatgattaaaaaaccataatatttagaaaattttatgtttcaccccttaaaaacatatactaatgcactttttatttatttatttatttttttagaggaatgcactttttatttgttttggccttttacacaaaatttttaatccaatttattgtttataatcgtgtaagttataggtagcataggcatcctgtaaaattataaaaaatttaaaaataaaatattgtgccgaaaaaatgattcaaatagtctgttgtacgaatgacttgtttatttctgtattgtaaattattctaaatttcttaaaattttggaagatgtcttaaataattataatgtacatgaccataaaaaaaaattatactgatgaaacaatagaaaatgcatcagtatactcttcaatttagggatgtattgtaatagcacccaaaatattttatatatttatcatcaatgaaaataagaccatctcattggtcgaagtattttagagaaacatcaaggttgaggaagctacttgcaagttaaagtctaacatgaggacacaatatttagatttatttgtgttagattttgatgacgaaatcattttaacgaaaggataattataatgatctcgtaataaaacatggagatcaatgattaattagtaattattattaaattataaataatatattcaatattataaatcattcaaaatatttaatatgttataatttctcaattataaagattttattggattatgtatgtactatatatgctttgggtgtgatttaatattttatatttagtaacagtgaacattcgacggattaatcaaaacttcacattgatataaattagtattttaaaggtaatgaaaatttattatggatagttagaatttatgtttttatggaaattattatgataatgtccatttttcccttatgttagttttatgtaagtttttaagttcaatggtaggataataaattgccattttattttagatgagtattgagcttaatagaaagctttaaaacacttaaatgataattcacttctttctctttcgtagtgaggagtataaatgagttgggttggatttgatctagctatgatctaacttgatccagattatgtacggattcgccctgctccgccccactacatcaaatacttaaattggattagattcgaccgattttattcagatcaaatccgacccgacttattcggatcagatcggatcctacccgtttcttttaaagaattttaaatttatatctaaacttataattttatatctattttaattttgtattagtattatttaataaaatactatgtttggtattgacttgtattaataattgtgtaaagataatatatttccaataaactcgaccctaacaccaactatgggttgggtccaggtccgagtcttaagtccgggtctgagttagggtctgggttcgggtctcgagtctcgggtttgggtctgggtccccgtttcgggtccgagtctgggtccccgttcttagtctgagtttgagtttgggtccgggtccggtcctgggttcaggtttggatccccggcccaggttcgggtcttgggtcttggtttaggttcgggtctaggtccagggtttgggtctgtcccggtcttggtctaagtctcgggttcgagtttggatcctggtcctaagcctggatctggatatagggttcgggcccggggtcttaagtttgagtttggggtctaggtttgagtctgggtgaacaagaatcgctgcgtgtttgaaggctactctagatcgatttcttatattgtcaatgatgtaaaaaatactatagagtattaattgcaaataataggaagattacaatgagtaagagataggaaattacaaatgtaattagtcgagtgatttgttggagctgtctcgcttggagtttcggtggtttgtgttgtatagttagtgtttgtatttgctcgttcattcataatgaaatttattttctttttgataaaaaaatatatatatttaatataaaataaaaattaataaaatggagtataaaattaaaattaaaagaggaaaaaaaaaaaaa

SEQ ID NO: 29638 - DNA, 2507 bp, Cannabis sativa
tacaatttaaattaatatcttatatattattgtgtataatttaagcatgtcacaatcattacaatttttttttaaaaaaaaatctgttttaaaataaactaatcatgtaaggtgtgattagctattaaggatgtacataaattgatctaatctaataacaatcaatcgactcagtaaagttttttttcttggcaaattaattgacaaaatatttattaattaatttgtatttttcttagcaattatattaattttagcgtgtttaattcgtgcctataattgctcatttcttttatggaaagttcttttgtatttgtttgggaaatttttcttgcaagagaataaattttctttatggaaaattgcctatttttagaaacttgacatttccttttttaattgttaatttcggttttgtcacgcttttagcagatcaaataatctttatttggcatgtattgaagacaaaattatactcttgattattttcttttctggtcctgatttgatgcagcagagtctgattctgatgctgcaaataaaaaaaaattaaaatgttttgtgcagctgggaaatcgtgtttctggttgtctatagggttgttatgttctataaataggacctagagagcaaacgatttatctcttctaactttatttttcatattttcatctttgtgaagagacaatttcttttgtgaaaacctggagtgttaatctaggttttagtgtttgttttgttcttatactgttagtagaattggttgaaaaacttgtttgaacaaacttctggagaaggattttctaagtctcatttcgggaggaagtgagcatatatcttcaagagaagatttgtttaaaactttactttgagaggaagtaagcacacgtcaatagatgaagggagtttaatacttggtgtatttcagagattatattagcaatgtggattacaaagggtagcgataaattactagagggagtttaaatttatttaagtcaattgtttttgtaattttgatactttaccaattgatttcattctctgagcatgaccccgtagactaagattgtttgaaagaacactgaaaccacatataattctcttgtgttaagtttttaatttatgcactatttatttttggttctattttgattctacaaatctgtgttctattgtgacaggattccaatctattgctgcagatcgttactgttattttttaattactaaagtttagtaaatatattggcatttgtaaaaacatagttttttaattggtattagagtgggacactaaactcttagtgtggtcctttaacattttcttatatttttgtaatatgttccctttccagaaagaaattctattatttatccaccactcttcaataattctaactatccttattggaaggttagaatgaggacatttatcaagtctcaagatgagaaagcatgaagaataattctttcatgatggtcgcatcttgttatggtagattctgaaagtaattctaagttaaaaccaaaacttaaatgatctactgaagatgataagttatctgcttacaatagtaaagctttacatgttatattttaatagagtatgtaaatattttattaagcttatatcttcttgtgaatctactaaagatgcttggcaaattcttcaaatctaatttgaaggaacaactaatgttaaacaatctagattttataatgtttcatgttaacgcagattttcattgtaataaatattctacagaattttttttttttgacgtgatattctacagaatttaataataaataaacacaagatattttacatggttttgtagttaaaatttacatactccacgagtcttttttattcaggatatttatctagatacagagtagaattctcattaaatgtaaataatcattttcctttcagtttcctcagattctatccctatttataggtgtataagatgcaattatttttattgggatctattcatttacaactgttcataaaacatggatattctccacgttctatttttatgcacatgagataatatctaataactactctttatctttatccttaaacgattatgctgactaagaaagttgtttctcgctagaagtgagttacctttttcactatctttataggaaaagatgctaagtatagatttacttctcctagcaatgttcttcatattgtaatgatactagcgaggtgactactttgtcgtgtagaaagcgagatggatgaatgtagttatttcctccgtacacaaatatgtgggtcaaggagctgcaagctccttgatgtctcatcttgtacgctcttattatatactccgtttatcccaagatagatgtattgttttgtcaattatatctgctaatagttattattcttatctcgcatatgtttatgtggtcaacgagtttgaatatttctatcaactttaattaattgaaacgagttatttaaattgcattta

SEQ ID NO: 29639 - DNA, 1610 bp, Cannabis sativa
tctctctctctctctctcgtgaccctctttgaaccaaggaaaaaccaagtttaggctaccatattcaagcaattttgagcaaggattgaggagaaaccttaagccaaagtcaaaggtaagttttagatactttattccttgttgtttatgaagttttaagcttggttcttttttgtgatttttggaaattcgggggtttagttttatttgaggttgaattgtgttagagactattttaaatcttgaatttagttgtttatggcttatttttggaattagtagcaactgataaattattggtccaaaatcataaagttactttattttttttttttaaaaaagataaataaattattttatctttttccgttttcttttttcattcttagcctgacccttctcttctctctcccattcgtcttcatccttttacacctgaacctccatagccactagctccaactatcatttttgcctttcccagtcactgtcctacctcacttgaacctcgatctaaacaaccccattccatcaccccaaactacaggccatcgtcctcagcttctccctttctattcaacccaatgcttccctccattcaagcttttctttactcagttctgtttgagctagaccgccccaagatcacactgtcatcccctatgcttccctttcactcctcgtcctactcgctacccaaaaccacccccaccaaaaatccaccacccactctaatttgggagcgcaaaatctaaattttggaacattttgagaaaaataggtcttttaacgagaggtgtaaacaaagttgaaaggcaaaaaatagataaacctaaaaaattactgatgccgagttgtaacagccaagttatcagatatacaaccccaatcaactacagagacaagtttaatgtaaaagtccatctagaaatactattaacaaataaaatttttctattaaatgggtagacttgccttgcaacttcatctgagattctaattcaacacaaatatttaatcccttaaattctaaaatatgcctacaatagcccttaaatggactcttgcaaatttttactgtagtaccaatttcaccattatatgcatgttggaaagcatattttaccaggatcttacttttactactcaagtatgctagattaatctaatctagcaccctaacatggattctttaaaaaaaaaaaataaaagatttgagaaatccttaaagtgtgtaatgaccacatatttatgatatagattagtagggttattagcattaatcatttgcattttattgttatatgttaatagtttgtgttgtgggttctatttttaagaaataggcattaggattataatttttcaatttttgagattttattaaattctaggtgtattgtttatgctatatgtgaaaattaatatttttatgatttttgctcggtggtaatgaaaaatgtgacggatggccaatagagtcacatgagttagtttggaatatcaagttttaggtgggattttcaccggtttgttatcaaggaatagtggttcaatgctacggcaaccaaaattttgataaactttgtggtaattacactaaggtaaaa

SEQ ID NO: 29640 - DNA, 2014 bp, Cannabis sativa
  modified_base (40)..(41): a, c, t, g, unknown or other
ctctgcaccatcgccctcctctctcgtcgtcttcctcccnntctcgatctccctttcttctcgtcgctctcatccattgatctccacccaccccttctcttgtcggtctccttctactctccgtcgcatacgtcggactactaccaccttccgtcggtgtccctctcatctccatctcataagtcggaccacaaccacctcccgtccgtctccctctctctctttctctctctctgagctcggtataaatatatttatgtatatacatttttatttattatatatatttattttgttattgtataaatttaatgtattttaaagttagttgttattgtaataaaattaattaggtattttagtttaatttaggtaaaattataaaactaatgtaggaaaaaaatggaagaaaatacagatttttttctcttttttttacattctcggcggttttaaaccgtcaggaagtccacattagcgacagtttttaacagttgcctattttgcccattttacgacgatcgtataggcgacagttatagaaattgacgagagtactttaaacgactgtttaaaaacgtcgagaaaaactatttttgtagtagtgttgagattcttaatagtgtcctctagcttgactttttcagactttatctacttcttggcattattcagacctctaatctgcttggtcatatattcccactaagcaaacatctcttcatatgtattttttcttccattacagtcagctttagaagaagtggaaaccccatcatcctcagattcaacagaataatgactttgagccatgaaagccgctacctgtttatcctcatcagaacttttgcttgcaatagaatctttttttttcgtcactatcgctccaggtggcaataagggctttcttctttttgagagtgttggcacactcgacttgaatgtgtctgaaaccatcacattctctacactgaatgcccatgctctaattatcactgggttgctgactatgcctaaagtttccaacaggatttcatttgggaacattttccttacccccagaaaaaaaatttcttgtacttctttttcaagaattttgcatagtttctggttagcagatctacagtttcatctgagaagccaacagacacctctaggatagacttcttttcatctttctgaatgaacacaagtcagttgtcccctttttctttgtccacacccttcttctttttttctttcttccaccttgttaaggacatttcataattctgcaaggatccaatcagttcatcaatatctagttcctccatgtttttcatttcttcaattgaggttactttagacataaatcttagttttgcatttgagtaagtctttcccaaagcataagactcatttgatatgtcacacaatttagcatggaactcagccaccgtttcttcttcctccattgataaatcctcaaatgcttttgccaaagcacgaagacaggatttctttactgcattcgttccttcatttttacttcgcagtttttcccaagcctctttacatctcacagttcgcaatgaccttcaattgatttgtggacactgcattgaacagagcatgcatgacctttgaattaaaattggccctctccatctcatctagagtccataagctcataggttttggtttggtgacatcattatccatcaccgttgggcatgttaaatcatcttctatggccatccaaactctttcattcaccgccctaaaaaatgctcgcatattggttttccattatgggtaattgacaccttccaacgcaggggttcgttatgtggaccctccttctctaaacatctccattcctagacgaacaaaaaaaaaacaaaactaagatagagagcagtatactcccagagtcgtgtctggagagggggttagttccaactgggtgttgtaaaaaggaaagaaaatgcagaataatcaagaattgcagtaacaatgtgttgggttttatgcc

SEQ ID NO: 29641 - DNA, 1721 bp, Cannabis sativa
tctaggagtaactttgaattgagacatccccaaatagtgtccattgtaattgatgcatagagaagtagttgacaccttgactaaatcacaaaacaaaaataaatgatcccgtaattttttttattcaattatttcttagaggtcgacctaaatagcaaaatcgaattttttaaataattccttgttagacctaaccctcgtggtataacttagccggaacatatacaagtcattttcaaaaccctcaaactcttgactgacccaacattgctttaccattgcttgcacataagagcatccgtgagccaaggcccagcaaaacagtaaaataatacagtatgaacaattataataatcatatttcatacataacgcctctgtacgtataatactatgcctctgcactaaatatcacattattttatatgtaataatgccatcacatttattgcctataacataggcctacgtgttacgctcacatacctcatttacatttaaggtcttaatagagattatctcagttttagttaacgagtctaacctagttatttcttactctcataaatcttcacatgcattcacataattcattatcgcatacttaatcacacaatatacttagggtaataaccctaattcaccattttatatataatgaacaatcataaaacttatatctgcaccatttcataatatatctgttatcacttatttgggtctaatgttagatgatattcttagtctttgcaacaggctcaaagttgttagttttgctcattgtaagaaattttgtaatggtattactcatatattggccaaacttattttaacagcaagtagtagtatgatttggtggccacaaaatcctaattgtatcaggattgatagcgaatattatttttgaataaatcctcattcccatcattttaaagtatttgttgctcttgctattttggtgattgatcagactcttttcctaaaataaattaagtgtttctaaatattttttttagagtggttgggattttgtgaatatatacagcctaaattaataattgttatatattatatttgatataaatatttgctgcattagacgtcacattataacaattatttatactattatatatagtgtgttatattaatctttgcccgtgataattgactatataacaaatgccactctcttatcactcttttgttattggtaggggaaaggaattaaattaattcacatgtttggtttgatatagaaattattagagtaagctttgattaatgaaacgtttaatgaaattgatattcttccatagattggatggaataataacaattctgtttctgtttaatttatattgtgtaatgctatgcacatatttactatacataataatgtgtactagatatattagacaatttattattagggacattgataaaagttaaaatagtgaaggtgcgtaattacgataagttaagaagtttcttccatttaaaaaaatcattattaagaactagtaagaactacgccacatttaattgtgtagtttagattaattggatatcaaaatgtgtataatttggtagtgtttcaataatttttgttagagggagaaaaataaaaatttccattaatatgcagagataatagttcatgatatattactcaaaaagcagaatcaacaagataggcaaactgtacagtttacaaaaat

SEQ ID NO: 29642 - DNA, 2025 bp, Cannabis sativa
  modified_base (1962)..(1970): a, c, t, g, unknown or other
ttgaaaccatgcaaatgcgctttataattatatgcttcttcactaaatggcaatccctccaacaacactcctcaggtattgcttcttcaagtgatggttagccctacattatgtccacaaaccaagttagttcagcattcattaagaacatttaaatcattacactgacatttttccccactagctaccagcctaccacaatattcccaactatctaaagataagaaaattgaccaacaaagtacatcatatttaaaacagccaaaagatggaccgacttagtttccaaattatgactactaaagagtgatcctcttttagtttaaattgaatatttgacaagttcgtattcacattttataatttcttctaaatgttagttttggtttagagttttactcaccagtactggttgcgcagcacaaaggcatcggtggccaacttcttcccatcgtcattgcggttccaatggtaaagtgcgtgtgttcggttcatgatctccaacgttgaatgcccatagcttgcttctcggaatgcagaatagtttggttgtggatcaagaaatctacattttccacaaaatcatcagtcacaacaaatatgaaagaaaaaatgacgattgtattttcttatgtacattatagaaaaattaaaacttataactgtaattttatgaaatttagaacaattataaatatgtgaaaaaaaattctctatcaaacttgtaaaagacaactttctccatattttctctaaaaatgtttcttgttaaaatccaatgtcaataagcctattcctactcttttctacagcatgtagagatacttttaacaccataaatttccatgaatgaattacatagttggagcattaatgttttcaacatttgaagaatttataataatccaatttttttatatgacaatccacattattacacattttaaaaaaattatgaataatataagatatcgaaaacaaagtttaaaacagtcaattacagcatataaaaaaaataaacacacatgtaactaaatgcttgaatctaatttttagattattttaaattttccaaaaatgggtggaatgcttgttataagtacaatgtacatattcatatacgaaaatttgagttgtaatttctctaatgctaaaaataggaacaagagtggtgctctactgtagaattttcctatttatataatctaaatatcaaaaaaaaaaaaaaaaaaaggttttacctttcagcaagaccacctttgtttcctccatctccgactgttatgtaaactggagctgattcatctggtgcagggtaagcatcaccacttgtaacattgtaccttatattggaaattctatactgagaaataatgaagaaaaagacaggaaacagtcttagcaaaatgaataaaattgttatggaattaacctaagattgttatgttattattaacagataatagcaacataagaaattacatacatttagaaaaaaaaaaccctgttttctgtgtcttcacctactataaaaccatgttgctattatatcaaagtttgagttctctcttgtgacactagagaagacactagataaattttctttagagtatcttatgcttgaaagtttaagcaccattttggacctgtgtttcgtaaaagttactaattaaaccttctattttgttaaatgacaaaacggaccctatattttccaaattagtaaaattaggacctgagctcaattttcaataattttatttttaatgtaatcaactttaagacaatttatagcacgaacagatacagaaaatgtaaccagttttgtcaacatctctagatcagattataattaagttttattttgacaaaaaatcagttcaggatcctatttgtacaattttataacatacaaggtctattttgttatttaacaacatagagggtccaattggtaacttnnnnnnnnnacagggtccaaaatggtattaacccaaaatctaatgtaattaaaatctagttagg

SEQ ID NO: 29643 - DNA, 5257 bp, Cannabis sativa
  modified_base (2081)..(2085): a, c, t, g, unknown or other
ttttgtaaagttttggtccaaaaaaagtatatatgtaaattttcctaatttttttttttttttatggactatgaaattgggctattatatatatatagagtggtgtggggtcatttgaatttaaattttgtatagttataatatgattagaacactataaatagatttttcaattaataagaagattgtaaaatatcaaagtaatcaattttttttgaataaataatgatatcagtattcacgtcaaacaattaccacttaatttcctcggatttatttttcgtttttttttttttttgaaaagagatattttcttctattaattaataataagattgtaaaatattagtctattccagacaaacataagaacgattaaatatattaatcctaaaaaaaaatattaatcctaataaaaaaactaataatatgagacttttttttagtattcatccaatctaattcgtattatttttctaatagtgtatccgatccgtactaagtacaaattttattttttgaatccaatccaatccacacaatatagtttaaattcaatccgcaaaattgaataggttattttggactgattattttttaatattaaattatttaatatttatgaaaaaaaattacataactaacaataaaataaaacaaattatttttattttatgtgtccaacaacacattaaaataaataaaatagcaaataacaaatttaaagaaagaaaaaattgtatgtataaaaaaatatttaattttattgtaaattgtacatagaaaaaaaaattatatataaaaatatagaatatacatttgattcataaagttttgaaatataattgtattatatgtattagacttttaaaatactattttctttacattaaaatattatttgtatatttattttttttatatataaatatgtattagattggattatttacttttacatgtcaattaacatccaatccgcataagtgcggattttgaattttctattcaatccaatccgcacaagtgtggatatccgcacaagtggggatatccgtactttggggatttaattggatcatctattttatgaacatacctattttttttaaaaaaaaaacaagattaagttagtttaaattcaaataactcaattttgaaatttatttatatatttgtacaaatatgtaacttaaaaaaatcaaataacttaatttttgatatttatttatatatttgtataaatatctatgtaattgaaaagatcatgtatacaattgcaaagtatgtaattttttataattaaattttaatcacactcatttatccaattaccaatataaagaaggagaagaaaattgaaaaacctaatgtcacttcttcctctttctttatttttcgaaattcactaagtttctctctcaaaatattgttctgaaggtgtttaagtatcatcccactctatttaagatgatactcagtcctttgtggaagattgggatgaacacaatcgaaggaggagaagatccagatttagatcttgataatgctctgttttagacaggaatcaatggctagagatctgaatgaaatgagtcatattattccgctgccatcactgtaagattttcttagtcccttatgtgttaatttatcgtttttaagaattttatatttaggatgttaaataatagaattatactcaacatacatgttagcaaatctagatcttggtaaaatatgtttccaacattggtaaaattgtcgtttacccttctaattacttctttactctttagtaccatcaattcactagtagaagtaaaattgagatctcatctgaattggttcgcaactttccagtactagaactaatacataaggggagccaacattccatccgtaggagaattaggactccataattgtatatcatattcccagtcatccacattattaaattcttaaaacagaagttgtaagaattatcttttctaagaaactttaacgagtgaatcaaaaaactaataacataaacataagttcatgataggatttaagtcgatctactattgatcatnnnnntgatatgaattaggtctttatggtaaacgtcatgttaaataaagacaactttattcatatcggtccttatcatatataatctctattatatatagcaccttttcttttatgtcatgctacatttgtaatctgaaccaagatacttgcatcgaaaaccgggcatcagtgaaccgtactagcaactattaattatagattctatacatttatatgttgctgactattttattcataactaagtggtcttagttctctatacaattacaaggcacaacctcatatatgaataagaaatttttagatatttaatataaattatttaataatagatattaataatttaatattaaagcatatatcaaaagttcaactctttattaataattaaaaatgtctttacaggctttttagggcataaactctaacattttatccttaaaatacttaacttcttataaataatatttcagtaaactaatataaattctgaaataagagttcttccatttatatcatttagttaagttctatggaaacaatcgtttcacttctaaatagttatagaagctatagatttcattaacgctcacaatcattgcactaccgaattcctatgatgtaagtatgagctaatcctacgagtaagctgataacgaacaagtcaaagaacatgtatagtacaattaagctaaagcttaatcatctcagcattgatatcaattgacctaagataaactaaatgacattgacttagaaaagattatataacggtaagtttatcatatcttttccactgtcaatatcagtctagtctgatgtatagccaatacatctgatagaagtttactttgctaatgcactggaaaagatattccacttatctaaatgtaagcaaaccacatcgctgattatcacatctgcataaatccaaagcactgataaattgtgggagtaaatagtttgatgtatataatcatgattattttacattgtacaagcaccactataaatatgagtaactatatatttgagatttaataacatttatatattaaacgtataattataaaaataacatgcgaactaaaaaatataaaataatttttaaaattttattatttaataacttaaaattatattgaattaaattttgtttagaagataccactagaaggacttctccaatgatacactaaaatcctaagaatagtggagtttggacataaaattgttcaaatgtaacactaaatgctatcctatatatgtgggagtctatagtgttccactatttttagtgggacactacagactataccaatttttttttaaacattaaaataatatgtttatgactaaatttttatatttatatacatattatagtgtgagataatttcataaaataatataataataaagaatatattttttagtgtaatttttagttgtagttggaattgaaaaaaaatttagcgttgaaatagtatttttttagtgatgatttaatactaaatttgagtttccctattagagaggatggggaataagagggatagagaggattattaatctcttttgtattatttagtattaggtgtgagataggaaggagggagaaaaattgatcagtaaaattacaaaattgtccttttaaaaacaaaattttattattttttaagggtagttattgtattttgtaaaatgtattttgtctttttctacaattcttctaaatttggaaggattaaattttgaaggtttagagggagaatatcgtcctctttctctccttcttgccaaacaaataatttaatctctcattccatcactctccctccatctccttccacccttctccccctcctaccaagtgttaaagtaaaattatggattacgtacacttatcttttatgtatatactcgtaataaaatggtggatataggtataaagacaaaagtttccaattattctcttttgatgactctcattcttctttatttattcccatttatatatacaagaagagtaatagtattgattctttcctttaattttcttgcctcccaaatgtactataatgaaacaaaatgaacagtatcttgcaagcaagttctcctacaaataaacccttaacccatttaagaagcaacgaattattattcaaaaagaagattgacattaagtaattattataaaattaaaggggaatattttataacctgtaaagtgaactaaattacaagctaagctaaatatatgacctgaattacataacttttgtaaaaaatattaatatgaaattccaattaatataaaatatttatatagcataatttgtgctccacaagttcatattacaactacttaaatcttgtacaaagttttagcagaaaaaaaaaatcttatatcaaatatatactaatatttcagaccttatataaatacctattggactttatagctttttttttttaataaaatactatacatttagccctcatattttacaaatcgattcacaatggcctgtttaaacggtaaaacatttttttttctaatgattgttttctagatatagaatttagaggactattttgaaacaattatacataatttagaaagttaacatacaatatttatcagaataaaactctaaattactaaatagatattgcaagcatctatttgggtcaaaatacggtttttaaattaagtttagtggttattgactaatataactttgtatgagtgtaatctttctaattataataaaaactaaaaaaattaaaataagattatcaaaaattaaagggaaatttacaaaaatactggattttgacttactctttacaaaaatactgccacacggcaaaaataacttttatactgccttgagacttttttttttcttttatactgtaaacatcaaaaatgaaaaacgaggtcttctttttccacacccgcagacaaaactactacaacaacaccaacaggcagaaaacaaccattaaattcgtttagatgaagcaaaaacattaaaaccattaatattgggattgtcattattttttaatgttgtttttgggttgttccactattattttgtatgtttaacaaatattggttttaaattacacaagttaaactaatcactgaatatttatttgaggt

SEQ ID NO: 29644 - DNA, 1027 bp, Cannabis sativa
agaattgaataagggggccgaaatgttaaactaatttgctttgagctaaatgttatacatatggccactagggagtagagagtacataattattttttttaattttttttgtcatttatgggtctgccactaagtaggggtatgatgatgtagttttttgtttttttcagttcatatcaattttttgatatatttaattaaaagttttattagtttgtagtagcatgaactccgaaataaattattttctcatattttggtaagagtgaagcagtaaaaatgatgacatacataaggttagaagagataaattcctgaggaaaatgtaaatcaccttatataaggaataattattaaagggcaaagggtacaacccttatagaccataggtgaagttttagtatgaaggatccttgaaaaatatagactaggacatactcacccctttaggatcagcctaggcctagtacccctctagggaacaacttaggccaccctcaacaaggggtgttggctcccatcttatcctcgtacaactgtaataccatactactactacaaaataagcttttagaggtgatttttttccagcaaattaataaagttttaataaaaacacctacgaagtcggttattaattttaatttccataggtgataatttttttaattttaatgaaaaaccatacggagtcggttattttgtaataaccgactccgtaggtgactttttaatttttattgaaaaaaccttacggagtcgcttattttgtaataaccgactccgtaggtaattttttaattttaataaaaaaacatcatggcgtcggttattttataataaccgaccccatatgtctttataaaaccctctccaactaccatcttcctcaaaccctaaaataaccagcagccccccttcttcctctaaaaccaacgaaatccttgcccaaccacccctttcttccccccatttctttatttttcatctgtttttacctattttttttttaaatcttgcatttttc

SEQ ID NO: 29645 - DNA, 1833 bp, Cannabis sativa
aagaagtcttcggtaaaaaattataccactcgttggtagtatgcccaatatcactgtggtactcgcacatcttgttgggatccctcctatgcttgcctcccttgtacatcgaaggaggcttctgtaatgaatcgtattgcaagtagccttatagacattctcacgagtgtcgatcaagtttatatactacgtatattgggcatcatatgcttttcgtcctttttttagcttcactctggctatgactcttttctattctcttactctgcgaccggcttatgcttgattttgaaacttccatttgttgatttgtttgttatgttcaggaacgacgctgcatccaatttgtgtagctccaaaactgaaaaaaaaaaaaaatcacatgtgtgggctcgtaccttaaggcagcttatccgtagacgataggtgtttgtactgggtctcaagtggcacaatcaatggagctggaaggtgttgtgaaaaacctgaattactgacattatctaaggttgttggagcttgtgtgttagcatattctaaattaatgaaaccttgagctctggtcaagaaatcggacaaagtgttggacctctttctttgcatttctaaccaaagtagggatctaactgatatccctaaatgtagggtcaccaatttcatgtcatcattgattttggtcttcacgactgctccaatcatctgttcgacgtagttcttgacgctctattcaagttgttgattgatgttagtcaatgaactgacctccatgtaaaaatctttcgcatccacaaatttcttctgaaatatggattgtagatccttccagttttggatagagcgaatggcaacttattccaccagccctctatgaatttggacaaagttaaagagaagcacaaacacttccaatcatcacttgcttgcgtcacttgcatcaacttgctctacttgggcaagtgggccctgggatccatcttgccctcgtatgattctatttgtggcattctaaaattttttggcaactgagcctctataactcttcttacgcatggatctggatcctcatcttcctagttggatacaactccactttgttttcggaccaaacactacatgagttttgttagagcaactatttgatcctctaattttctagtgtgttcatctgggagctcacgttcatgaattctatcattaatgtagttccttaaatcgcctccacgaggccttactttctcacctttcgatttttcctgttttgcattccagcggtccttgaggtccatttttgacatgcatctttcgggtccaaattctccacaggaatgctatggttaacagaatctttaaggtggtttttccatcctcaaacgttaggctcttgtacctgagtacatggtccatcgtttcgcatgactttgccccacaaattgatcgatcggcctagccttaggccttgagcattcttttttatccactggggttggtcagttgctctcatgttgtcccttggaacattacatgtgggttttcttggagggtcgcccactaccccttttcctttattatttgttggaccgtatggtctaactccaaggtgattaaactttttagcaggagggttttcttcagggaggttagctttttcttgcaaatgtgcaagaacttctttcatttatcttgaaacctcttcttggtctggtaacctcttttgggtgtgtgcaagctattttttggtcgcactacttcagggtcttgttcataatactctccatattccttgttataatttttgtcatagtaatcttcgggatccccatcttggccttcttg

SEQ ID NO: 29646 - DNA, 2017 bp, Cannabis sativa
atagttactaaataaatttaacaacaaatactaattttaaaaatattaaattattaaattttgatccaatattgaataataaaagagaaattttaatatttatgcttaattgttggtgctttgaccactttcaaccaactgtgttttaacaggtcaacaaattggttaagtgtgtttcttaactttcataatagcttataaatacacaaactaatagctcgactcactcacaacttagagaacaacaatctcaactgaattaagttagaaaggtcttagtggagatagagtttttcagaggagaaagaaaagagagaaaacaggggtcacattgttagaggttatgctttcagcttgtatgtgtgtgtggagggctgtaaacagagattgtaatcttgaaattagtgtattggtgatcccacttgtatattctcctcctctatcttatcacaccgctatgaaataaaaattcattcattcattcaaagtattttattcattgattatttagttattgtcattatgttaataattgtttgagctctttgtgatggtgttcttgatgaggtttatccgcaacaggatcggtaggggagccacatggccattagtcaaaaacggctgatagtgatcccatatagagttttgtaaaatgcaaagcaaaagttttgaaagaaatgcttaatagagaataagctttagcttagttcaactgattgagattaacactttatttatagaggtagataattgattacaagagtttgaatcaagaagcgcctaactacttttagttatactaatactcactgaaaagttgtattaacaaaaaataatacatgctagttagttatactattaatagacaaataaatagatgacaaaatttctttttttttttgtacttgtattttaaatctcgttttctttaatccctttcctaaaagaaatccttccttttctttttttgtttggattggatcaactccttcgattgattgtatcttaaaataccaaattcgaatatctaaaaactttattttcattttatattgaaaaatcacatctgggttttcggtcataaaagcaaaaattcataattctttcctagattaaaacctaaactgatagtcttgtggtagttcaagctttacgtagctcaatggatattatttctttatttggtttaatcattaaagattgtaagaatttgcttgctactatgcgtaatgtttctgttttcttttgttaaacggtcagcgaactcagttgctcatgcttttgctagagcttctagttcttatcctgattgtgctttcaatttggggatgtcccaactgttttgctacctatgttggtagctgaagttcaagtttaataaaaataaatttcattaaaaaaataataataaataagatgttgtgacacatctaaagtagaaagtacatatcttggaaaatccaatgaggaattcttaaaaatgatagttagtaaaatgtcaagttcatgtatatttttttcttacaaagaaaataaagagatgaatattatgatgttagttagtgcattttcatttgaaagtgcttcatttgaatttggatgaaattaaattaatgctaatgtttattattattattattactgaaatgtcaaatgtttgctaatgtcaaatgattaagtcaaattttggggttgagtgtacaatactataaaaaatgtcaaagttattggctattatcgattccaacttaaaaataaaaacattttccgagaatgattaatcgattgaaaattattaaatttggagacgatccttaatatatatatatatttatcatgtttatgaaacatgggaaccgtacccaaatcaagagttgaatgtctctctctcgtcctaaataattataataataagggatattagcgactaaaccagctgaattttacggtttgtaacacttaaccacaaaaaccaaattttgggcgactaaactacctaaaccctggttccgttttg

SEQ ID NO: 29647 - DNA, 2735 bp, Cannabis sativa
ccaaggggtcattgtgcgggaagtggggaagtgggcatgaatagcatctgcttcagtaagagttatagtgggttcccctacccgtggtatttttggctttctcatctctacaaccagaactgtttccttttgttcgtgctgtaaggctcgagcatacttttcctgagctttgcctgagtctccagctggatgcgggccctcaataataacttgtaaatgcccatccaatggtggaggcattaatagattctgattatcgtcggtttgagcgaccttttgattctgatcagccttgacatatttttgcaaatgcaggttattttttctgatcaagaattcaatttcctacttcaggttattgcacaggttcttgtcatggccataatatgcttgagaacagcaaaacttagacgtatctctcttaattacgtccttcttcatgggagagggtttcttatacgggaccatagactgggttgttacgtaaattgtctctaggtcgtcagtcaggacagaaaaggcaacaaactttgagtcattttctctagggttatgttcggcattgccagtgaactttcccttctttccgtcacctttcctgccactgttattagacctcttcccatttggattcgaactgctaggatattgtggattttgagcagatgcccctaccgaggagatacgttgctggcctttcttatgtccgactgtgtccacacgccaaatagcctccttgagcttaataaatccatttgctcggtctagaaattctaccatggaccccacggggccaaaccttttgatatccttccatagttccccaagcagctcaatgccccccagtatggcagccagccatccttcctcaggggaccccttaacctttgtagcttctgtcatgaatctacttatgtaagctcttaggggttctcctgacacttattttacctcgaccaggtcttctaggtgcgagggcaattgacaggaggaggagaactgtgcgtggaattttgaagagaaagccttccacgaattaaaccttccttgaggtagcttgaagtaccattgttgggcaacctctacaagtgtagcagggaatattctacatcttacatcaccttgtactccatgcaggtccatttgcatctcaaaatatttaagatgtgataaggggtcctctttccccgtatacatcttccaagtcaatattttgaattttaagggtaactcaaggacttcaatttctggggagaagggtgatccacgtgttcgatccagctcgacatcagtgagttttgggccgataaggccatgtaccatgttttttagttgatctaattaaatggatgaactagttcagcctgttgaccgacctatgtcacatcaggatctcttggagctaggtcctggatgtggatgcctggttggatagctggttggatgtattgttcatccaagccccttattctattcaggtcagccttgaggttgtgtgcatcacccaatttgttaaataccaaggtactaggtggtctcggtgtctgatttgtttggccggtaggttggctagaattttcagtcttgatgaagttattaggtataactccacccaaaggacggttaggaaggatctggccatctaccgcttgggccataggttggacctgtggccagagattggacgactgatcattatgagcttgggcggtatgcccagtagcatactcttttagagaccgcgctcacagtgtgggagatactagagacgcggtagctggttgttgattagcgacttaataggccctccttattagcacggtggcttgcctcgtgcgatcatcgatggctgcttgttgagcctttaaagtttccatcttcttgtcccgccactttataaactggcatctttgctcgtcaaatgcaaggtttacagcagcacaaagatcctcctgatcatgatgcaaagcgttattatggccttgcatgagtccaagggctgtatggaggttttggatctcagtatcatcccccaccgtcctttgagcattagtggtggacgggtcttcagtgttatgagtggattgatcggctgtagaactggtattcccagtctcttgcacacctggtgtgatcccagctagaagggaagtcacaccatggcccactgtaggtggctgtgtactggcctgttcggggtttgtccttggtggtcctctcgtatttctaggagtttttacattaggatttgtcaccattgggtcaccctgatcaactaggcctctgcgagtttgcaccaccatcctgtatgcctgttaaaacttaagacaaacaaaaaacttgggtttttgctctcaatgaaagcactaaaatattgacttcgattttagccaacgactgtgagtcaattattaagcgattaagaatataattaaaatagagcaaaaataaataagtaataaagaacaccatattttaaagaggttcggccttgtaagtgtggtaatagcctactccccttagattgtattgacttgagacaaagaacaaagtgttttcctctctcaaagcaattctttcgatccttttcatactgaagcttagtcactatttatagggccttaatgcatgaggaaatgtttctcctttgcttacaatgtataaaataggaaagaatattcattacataattatgatacacaaaataggaaattggaacaggttgccatattcct

SEQ ID NO: 29648 - DNA, 1526 bp, Cannabis sativa
attttaggtataatattgaaaaaatctcataataataatattcaaaaattttatttaaaaattgaaaagtaaaacaaattttatttaaataactcaaaaaataaaatagtatacaattatccatatacatctacctgactatactatggtaagtaaccttaaaatgacaatttactcggggaaaaagaaaattttatttgcaccctcaaaatttataaatacatctcattttaataatttttattttacataaaatatatgtctttttttttttaaatcatatatatatagatattttttgagataaaaacatatatatcattaattatattaattttttttaaattttttttttcttctaatttatattcttacaaagtatatatttattaaattaaataaaaataaattatattttaaatattataacaaaaaataaaataaaatattttaagaaattttattagaaaaagataaaaattaaattatatatgatttaaaaatacataataaaaataaagttaaagtaaatattaaaattaatataaaataatgtgaaaaaaaaaattaagtgtaagttttaaaattattttaaacataattctttaaatattaagatgaatttattattatttctgaggtgtaaataaaatttataggagtgtgtgctttgataaactaatatagaaaaatataaacgacaattggatccaagagtcgtattagtttatctcaatagacacaaataacaccgtttcaactttttagtattcattttagtgaaaacatatagaactgattatttaaaccgagactttccccactttacaaaaggttgcatgtctgtagtttcttgttcacaaagttaaccactacacttagaccatccatcaaaggtatgctctctaaatagtttctatggtttcattttttttagttgttttttcttttgggagaaactatttagtttttacatttggaaatattagttggatgtactggtagaaaggttaaaaatagaaaaatagatattgtatgcttccaaaagaaggaaaaagagatattgtattgttaccttgtttaacagtacatatgataatttagcttcttgaatcgcaagtaattaacaaaatatgccaaacttgcaagtcatattcatcgaaacgtaatgttaaaaaacaaaactaatatttttctatatattgtcgttttctttcttcttattctcatatattctccatttcctaacagggttgaataaacttgtttcattattccacatatggaactctctcactttcttttcccaacacaatttataaaccgttactcattcatccttaatcctagacctttggtattggcaaaatccaaacattataaattcataacaaccagaaattcttgttcattgtaacgcaggagaatatgggacaaagtagtaggtctatgctatgcctattaatcatattgtctatgtcaacctcttccatgtcatggctttggtcatctccatcgtcttcctc

SEQ ID NO: 29649 - DNA, 1716 bp, Cannabis sativa
ataatatattaatatatcattcaccaacgggtagcattttataattgtaagattattccatatatacaatccgtatatactgtaagttccttcattatttcgtctcatcctatatatgtatatatgtttataatttacataaacacacatgccaagccatgattatatatatccatatatttttataatatgtatggccattgaaaaatttatgaaatgacgagacctcttttcatgctttactatgtagttgatatttgacttcacaattttctaatatctacacagtaaattttttcattattccattatcaagatatattattgtatataatataatacataaatatatacattacactattaaattgatgatacaaatacatatatttacatatttatatatacatatatttttttagcagttttttttacagcatatatatcttgatatatatataaaaaccttatgcctatgcccataaattagctatttgtggttccacttgaacatttacatcaaattgattttgggttttttaccaaaagcttttatatcagctaagtggaagtgactaatttgaataattaattattttgcattgataattcccaaacaagtattagctggatttattactttcctccaaattgaattcatactttataataattataacaacataaaaattattttggatttcttattcttccctttagttatataccacatatttgatttattttctgaagtctagtaaaccaaaagaaaatcttaaagattttcaataaatcggacagcataacgtcataaaaatttatattattctcttcgattatatatcacatatcgacttattttttaaagtctagtgaatcgaagagaaatatagaaatctacgatgaaatcgacacatgagaatattagtctcttcctttcccctttgattatatatcacattaacttattttctgaagtctagtaaatcaaaggagattggaatgactatttgctaataaacaaaaataaaaataattaagaagaaaaagaagtagatccatttatggatcttcacttactcttgtagagctcgaagaatgactttgaataatactttttttttctttcttttctcaaatttttttgttctgttttactcttacgtaaaagtggtggaggtggagaaaatatatctccttaatttactctcttttttgtaacttactcattccattattttattattattattttaattatcaaatatttcttttaagttttaactgaaagaaatattcatatactaaaataataataataattttattaataaaattattattattaatttttttcgttcaacaatgacctagagaaaaacttctaccattttttagttgaaaatttctttataacttccaaatagtggtagccaaaaccacttcatgaaaataaatttgaaaaaaaaaaaatttaaaaatttacacgaatgatattgtaattatgacgaatataggtatgaaaacaaatttgaaaaaaatatttcgacatgtatttttagacatagatattgattaagagattgtaataggagattggtagtagtaatcttatttttttttaaaaaaagtgtagtatatatatatatatacattttttaaaggggtattttagtaggttttatatctatttttgtatttaggagagtttttcaa

SEQ ID NO: 29650 - DNA, 1730 bp, Cannabis sativa
ttttttagtaaataattattgtaagaaaaaggcttttattttgaaactcgcccaaggcctctaaacggctagagacggccctggtgccaagaccatgtgactactcacaagaccaacagagattactgcttaaaactaaatgacagctaaagagaagaaatactaaagacagagatcctctggctagttgaaaatttgtctatttgtagttatatatcatactatagaagaatggaaaacgacttatttttatcgttttccattttttttttttatcttttatgttttaattttatttatatatatatttaaatgatttttgtacctgctttggcactcaatgtcatactgatgtggtacccaataattagttagcaattttttttttcttttgtgttttttttttttatattttttatgaatgatttttgtacttttatttgaaaatatttttcgtactattattgttacgtgacaccttaaggtgctcaataccatattgatgtgatacacaataattgattagtagttttctaaagtctttatttaattaaaacttgtgggaagtaatattgaattgcaccaataacagtatgctaccttttgtggtgtttggcactttaatgtgccccttaatatttttattattaatatgtacatatcttaattagtttcgattgtgtttttctttttcttttttagttttttatgaatgatttttgtaatattattttttagtaaataattttttgcactattattgctatgtgacaccttaagatactgaataccataccaatgtggttccaataattggttagcagttttctaaatcatttagtaaattaaagtttgtgagagatgatattaatatgcatcaataatggtatgctatcttttgtaatgcttgacacattaatgtgtctcttaatatttagtttaatatgtacacatttttattaacttccactgggatttttttattattattatatataagtttgcaagaacatttctaatgggatgaaaaattttatactatatttgacaaaataaaatttataatatatttgcatcaatttttagcattatgctccaatgcataattacaaaacttgatgtaaatttttttttttcatttttattatgaattatttttgtgccttttttttgtaaataattttttttgtactattattgttatgtgacaccttaaggtgttgtataccatacgaatgtggtacccaataattaattagcaattttctaaattatttattaaattaaaatttttgaggtgatattaaaatgcacagataccagtatggtaccttttgtggtgtttggcatcttaatgtgcctataaatattttcgttattaatatgcacatatctttatgaacttcgattagaattttaatatttttttaattatacataagtttacaagaacatcttcaatgaaagaggtaaaacatgtattatatttagcaaattcttttttttttaatctgaattctttttgtctaaaaaaatatcagttatatatgtatatatatataaatatctattttatataaaatgtggctatgtaacgaaattcttagtttaacgatactttttgcgtttctacgcagaaattttctttattaattttataattgttgaccgaggttttcggcaactattaatatataattataataaggagctgtaagaaagtgagatga

SEQ ID NO: 29651 - DNA, 1429 bp, Cannabis sativa
acaaggactcagcaagaaaagcaaattaataatcgttatagtattattcaaatattatcatttatacttagacaatgaaaattaaatagtcacacattacttataagatgaaatctaaatcacttcaggcatctgccacgaataacatcagtgtacagatatttagtaatacaaaatcatcatacaaaaaaataaaaaataatatttatttaataatacaaattatatatatatatgttacctcgtaagtaaatatcttcattatatcacatcacctaattaggcaagtcgatgctttaatctgataatcttatattatattacctaatttttgctccaaaatatataacatattgtagatctcgttgcaagctacaaaaaggtatatagaacatccaaaatgggtacttgagtaaaaagttatgaaacaaatacgatttatgatctcctaggaatctccaaaaattgtgaaacacgaaaatcccaaatattgcactcacagaaacacccccgaaacctatccaaatcattctaaacttcacaagacacatatataccatatatactatagtctcaatttatccaaaattaaaagcaagcccttaaatataaaacgccattaacatttagactaagctttaaaaagttccaaactcaatttctaactcaaaattacctcaaattaaaatagtaaacatcgaaactagtcccatagctaccaaaaagaaattctacgaagtcaaaatctccataaccactctaaatcacaaagccactatataaagccagtcatattcaacttaaaatgaaaccgatccttatcttaagctctctatcttcaataatttactatcctgttactaccaactattgaattactaggttttgggttgagattcaaaaaaattggatagtggaggtgagggtttcgttgcatctgtagaggattttgttcattcgttcttctgttatattttttaaaacttcatatatatataaactgataagattttgtttatacataataataataataacagtaataataataataatataataatataataatattaataaaaactttattatcaatagttatcttattatttcttagctactaagagatctctacttctagggaattcgatcaactccgagtacctaaaaatatcccggtttatctaaaatcaatttatctcaataatcacattaatatttctaacaaataccgttgcgacttttttggttccaattgggtctccaaggtcgccgaatctaaatttttttttatctcaccaataacttacattatatccacatatttcaaataaatctctgtaattatcaaatggcttttatttatccacttatgaaaaaaattacaatttatgctaattaggttagcacgatcataaccctactcatt

SEQ ID NO: 29652 - DNA, 1334 bp, Cannabis sativa
ataataataataataaaacttaaaaattatatttttgccattaacaattattaatgtttatatttcagacttctgtacatgatttttcagaattatatgatgtaaacatataatagcttacctagaatgatcccctgcgctcctctgtaatatgaacttgttaatgttctgaacctttcctgtccagctgcaaatacatttgttctttactcattatggcaaacacgttttttttgttactaaaataaacattacattttaatatatcatttaagaacaaaaatacaaattaaaatcacaatagggattacatgtttgcattgcatagctttacctatgtcatgatgaccacttattagttctaagttcagaactggggtctatgatgaaagtatataacagttaaaaaagcaagtgggcagctaattattttaggcaaatttccctttttttttttttttcagtttaattgatattattgatcatgattaaaggtaagtaaacacatagagaaaattaattacattaccagtgtcccaaattgttagtttcaacttcttcccatctactgtgagcagcttgatcttaaaatcaactcctacaaataaaatagaaaaaaaataagttaaacaaacaattagttttcaaattacacaaaacaatgttttaagcattctataatcgagaaaaataaatatataacaaagaatcttataatagatccaagactagctcaacaacatagtatcttataagtaactgtttatatataatggcataagccaaatctcattgattttataaaaaccgacaaaagtaaagttcaaaattccaatcaagagacaacccattacagcattaaaggttaagaaaagttagctcttaacattttcccaagaaaatcagaagggcaaagattgtgttagaccaatatataataaatatatgtatatatatatatataaatgtttataaaataaataccaatggtgggagctagattatctgatgtgttggagatgaagctaacaagaaggctgcttttcccaaccccagaatcaccgatcaacaagatcttaaacgacagatcgtagctatggctctgacctgaagaagagcccataatttatttttattttattttattttattttaggattggtaatgttttctttctcctttagcaaaagaaagaaaaatcttttctttctctatctctgactcctgtgatgagtaatccttttctgtagctgggcttctctctatctctgtctctaaaaagtatataagcgtggatgagagagaggaagtagaagaagaagaagagagagata

SEQ ID NO: 29653 - DNA, 1979 bp, Cannabis sativa
  modified_base (1924)..(1934): a, c, t, g, unknown or other
acctaggcactgagtacttcatttttgagctcccagtttgtcattttgatacttccaaggttcttgaacttgaggacgagatctcctaccctattttgaccattccgggttcaatggtcaaatcaaatttggtatttaagcaatcaaaactagcacaccaggttaattatcaacctgggcgctagacccatcaccaggtcaacctgggcactgggccctgtttccagggtctcaggattgtggttttctccccaagtttgcataaattttcattatttctgatgatggaaaaaatgcccgaaacacttttttgagaatttggttagaagtagcccaggttgacaatatgtcaaccttcccctaaaatagttgaatcttaatctttacaaaaaatagagaagatgctcaaaagattcttaaaaaaaatcattagaatcaggccaggttcacaaaatgtcaacttgggtgctaggccagccctaggtgtcaacctaggcactagaccttgcttctagcacccaagaaatgctttttcttcctcgaaagtacatatttctccattttttatgaatacaaagaaaatgcaaaagttggatcgttgatctaatacttaggcaccagatgctcaaaaatgaacttccttcaaatctaattttgatgcctcaaatatgtccttggtatgtctagttaatgccctaatgcaagttttgacccattttcactaagacgatgccagaaacggaaaccttggttgggaatgtcaacttgggccctatgaacattaatacaattcataaactaaatattactaaaataccacttcttctactacttcagccgcacagaatgaaataaagaacctcatgcacacaaccttcgatcgacaaacccaacaacccaacacaatcgaaataaaatgcaagtaaaaagagaatcaccattaatttcagcgactacacctgagaagatgattggaattaattaagatagggttgtttcaaattcatgaaaaaaagtgcaaaaaaaaatattacgaaactaaaatttaactataaatccagtttaattctcataaaactaatgtcctgacttcaattttcatatccatgaaatgcgaatctcaaaaagttgaaatggagttcctaaacaatccaactcaagtataatccaaaaaaaaattacatcaatactatacttaaatgtttatctcgatgtatttttgttgttttcgaaatttctaatggtgaatttgttcatattaaatcacgaatagacatatagatagagttacgtacatggaaacactgttctgatttttaatgtttcataacagttgcataaatattttgctaccagttgtttctccacacattactattaaggtacaaataattattgatcactgacaaaaaaaatcctgacaaatagtttcttatagatacacattcacatttaatatttctagttacaattaagttgctcgttagttgaataatagttttgctactacgatattatggtatcataaaaatagggctcagaattatcaaatacgcgacctgaatagataaaacatgattgttgtagtactcgattgtattaaatatgcagaactattcgttgttttgtggtattatgttagttggcacgcaacatatataattgttgcattacagtttcatcacaattgtcttaaaattgacttcttctttcccttctggccgtcaaagttaaatttcttttaggcaaagataccttcaacttcttcttaactagaggatgaccacctgtagccacagggagaagcaaaatcggagtcatcatagtcgatgactggacgtttcccttagccttattagcaactgatttatgatccatttttaaaaccttttttggcaatagagtgttggaaatattttaccannnnnnnnnnntactaacaagtatgtttcattagcatcctaatatgaattctaaaa

SEQ ID NO: 29654 - DNA, 2316 bp, Cannabis sativa
  modified_base (225)..(227): a, c, t, g, unknown or other
ttagtcatcttacaaggaaggacataattctaaataattttattttttaattgtagtgtacagtaaaatacaataaaaccaaacatacatttggaaagattgataactagaattcaaaattcttaaaaacaaccttctaaaattcctaaaatcaacttaataaagaaagaggaaaatagagttacgaaccaaaacatttaaaaaagaagaaaactcctatatctnnnttttttttttttttttggttctgaaaaacaactcctacatataaagtgaattaaaagtagagatttgacatttgctactgtttgcttcattgtaagtaaagaagtcgaagatatgtattattaaataaaataatatgcaaataaatatttaaatttaaatttttacggtaataatacttaaattattatttttttaaaaaattaatttaaatatattaataaaaaaaataatagtggataataacttgaatataatagttaattaagtattattatcataaaaaattaaatttaaatatttatttaaaaataattaaaaaaaattaattattgcttctcaagcagttaggaggcaccaatgaaatatgatttgcgacaaatgaaattaatttagtaaaatatatatatttatatataatataaagaaacctcacaacgaaatgaatcccaaaactctacaatataaaagataataaaaattattctaccggatttaaatatcaataataggtgagtacggtttactattttctcttcaaccaaacttagaacgaaacactcaaacacaatataggacagaaattagataacctttgctcattatgctaagattccaatattgttgtttctttagaaaatcacatataaaaatcattgtattgtatgtatcatagtttaagaattaatttgtattagtttagatttgaataagtggatatgataaataagagtttaatggttattatggtatggtaatagtgatgatgattagtttagttattgatttagtatatgagaatagtttagttttgaaaagagaattgtgtgtaaagaagcagtaagcttttattgatttagctttggctttttggtgttgtattacaatttagaactcttatgcctatttatagttgctgcctttcaagcatttgaagttaaaattattttctttagatttttctatggattttatccatacacttctacatatttttaagcatgtataattagaaaattttagattaaaattttcaaaaaaaatgcttttattctattctatttttcatatttagaaaattctaaaaatattttacaattatcttaaaaaaattaaagtaaagttttctataaatgtgtaaaaaaaaaaattagacttaattgagcattgtaaaaattgtaacaatttttaataatatcataatcatatagtaaatccatttgagtagttgaggagaatggcagtaaggtgtgatggtacggcagtggaggaggaggttttcttttttatattttatcagagcaattaaaaatcttattaactgcggcacagccgaaaagagatcaaaccagttaatcttcttcctaacacaacaattattgaaaaaaaaaaattaatgcaaaataaatagaaagtattctaattaaaataattaaagtttcctcttaataataattttgagtaagtctatagtatactcttttaaaatagtattttctagattttttatttatttcaatattgaaaataatttttttattttttttaattatgtatgaatagttatttaagatcatctatatattttaagaaatgttttaattatttataatactacaaataaaatttaaatattttattatatgtaaaattattttattttatacacgtgatcaataattatttaaactttatattatttatattatttaaatttttttaaatatttataaataatcttaaacaagtagattataaaaaaaaaaaaattaatttgtttagatactaaaaatgacaaaaattctaccaaaatattattgtagactaatgattttttttaaaacccttaaaaaaatttagataatagatgatgagttgacattttctggaagggactgcgcttgcaagttgggattatgttatcgagcatccatgtgcgcaaatgcacatatggtgacatgacacgtgggaattctctattttatataaccttttcattttattttattattatttttaagaaaacatgggaattattcattttaataactgggtagatatctttcaaaagggtaagacttctccaaaaaa

SEQ ID NO: 29655 - DNA, 2097 bp, Cannabis sativa
gacattcaaagctttcaacaaagaaaataaatttattgacttgttgattctcaacaaagttactttttaactttcatagagtttttctggattgctttggcaagggttttaccattaaaaggatttcgtctcaaccaactcttaaataaaggagtattaatactaggtaactgaagagtggagtagtccatatttttatatatagctcaatatttttacatttgatccatgtgggataatgttctctaatatcctttctttaatccatgtgggataatgactatttttgctcaccaattttgaatcaccttgtcacaaatcatgttatttgcttacttatttttgttcgaatctcaagcgtctttgcactatttggatctcgtgctgctagctaactatttggataggtgtagatcgaaagtccgataccatattgagaatcatggagttctattcagggccgaccctaaaatttagtgggccatagaaaaaaaattattttgggcccttatttcaaaataaatgtagtatttttcaaaatcagtaaaaaaaaaatgtgtaatttcaaaaggaaaatatttattttgggctcctgggctaggtgggccctaagcacaggcctagctcgcctatgcccagggcctggcctggttctatctcaaaactaatcggtattgagagtggagtagctcctatttttatatatgactccatacttttacatgtaatttatgtgagataatattttcatcacgaaattaaattgtactaacaataatataatatgatagttaaaaaggagaaaaacaaaaatttataatatttgcttctgattcatgattaggggaagctggaggtgtaaaatcttaccagcttctcaagtcaaaagcttttcatcagagttaaaaacagttacttgtacatgacacacgtgtgatattataacacgtggcggcacaagttttctcacacagcagagacagagagaaagagaagtgaaaattgtttgtattaagtcaaatgtgtagagagatcaaaagaaaagataaacaactttaacaaaaacaaaagcatattaaaagatattgagcatcatcagtacagattttatgtgatgatgctaactctcttctacttaaaacacaaaccattttattattattacattcacaaaacaaaaaactaactaaaacttataatcacacaaaaaaaaaaaaaacacataacaaaagaacagacaaacaaacaaaaaaaggtaatgattaaagaaatatagccgtgaaaagactcatcatgaatgagtccattgccgttttgtgacttgccggtttggtaaagctttaaaagccatagaaaccttttgctttgaaaattgaaagtgagttcttcttcttctttgacaccctgcaaaagctaaattggcctcaaaactcagacaaactgttgaaatctcgataggaaagtgaggcttgagctgagtgttctcctctttccatcttcaagtgctgtactgaaaaccccattaatggatttatttttcactttgaaaactgattccattcccatacctatcagattcaagaatcaaagatctgattcttgaatctgataggttggtttttggtatatacaaacacaccaatgggctcttgatacagctagtggagatattactctttggctcttgccctttatatagagagagatgatgatttttatcaataaagttttgtaatagagaattttcttttcttttgataagtcatcagttcattatctaatatgtatgactcatgaccctttatttgctttaaattttcaccaccaaaagttgtaagcaataaggcaaagagcaatagctccaaaaagatttgaacttggttatttactatcatacccttcacctaattttcaaagattttaaatttaagctattcaaatataatcatgaacaagaacaaattttgttttgttaatttgaatcataattcaattaaactagttctattggcttaagggtcttatgttagagtatacgaagtacatgatttttatttggaaaacttacaaaaatattagaatttgagttaactttta

SEQ ID NO: 29656 - DNA, 2105 bp, Cannabis sativa
  modified_base (28)..(43): a, c, t, g, unknown or other
taggatgttaatcaaacatacttgttannnnnnnnnnnnnnnngtaaaataatttccaacagaggttggtccccacaccttttgaacttgctcatggagttctttgttgtggcgtaaactttcagccaactagacatgcacaacctcattttcttggaatagtttatgcataggcatggatctgactggtggacgctccctagatggagatgaggaactttcacagtctttgacttgtccctcatcatctagcatgggtttcatgggaaggtcttcttggcatcgagaagtctcttctccatgtggttatgaagggacaaaggttccttcactaaggggttgattgacttctccccttgggacgttgacatcttcttcaaaattggttcttctagtactcaccattgttgtgagaatggtgatttgatggatttttcaaagaaaaaatagcaaaaaatttcggcgtaactctcaatgaaagcaccaaactattgacacagtttttcgtcaactgatctaagaagatcgtaaaatataaaaagactacactatatcaatttggctaaataaaatcgcaaaaaataaagaggaacactaggatttatagtagttcaccccgtgtcgcgatggtagtggggctacgtctactttgccttttattaattaatttcaacacacaagagttatgttctcaagagtgtgtggataatagtacaaataaataaatttttttaggtgaaataaatctatatatattgaagcttatgaataaaaggctcatgagagaccaaatacccataaacttgataataatggcgatggtaaagtttttgggaacattaaaccaatagaggcaagaatagagaatggtatattcttcttggtaaatgtgtacgccaatggtgatggaataatggaggcttggtgtcgtcagagtatgaagaacataaagaaaaagatgaagaaagaaaatttttcaagggatgaagtgataatgcggccatgtaagtcagaaaagcaagagttctagaaaagcaggggtccttaaaccctagcctatcaatatctatatatagtcctagggtttgttaatgatccctcacaagtcggggtatctcacttaacttctcgtatctcattctaaaataatgaataaaatatatgaataaataaaaatctaggaaaatatcccacattcattgggattgtcattgaattttgtaacttcttttttctctaaaaattgcctatgcgacattgtactccatcttggggaatagaaaaattggagaggagtgtccaagggatggaacatctcggctagggagagtagagggtcacaaattttgtggcatagctctcccaacaaccccttgtggtccccacttagcaaaaccaattaattttcgagtaaagtgtatgatcctgtcttgtaacccatttttgagccgataaattcagaattatgcaatgaacatgagacacacttagatcctccttgaaaagatatctccaatgcaagttgaaccaagttatttggataaaaattgagagagttagtcttgttttactgcaaggcagtaattacatttcaactcaaaatctgaccagtgccacgtcatcatgcccaaaaagtagcagtgtcagctgtgcatgttcttgcacaattcgaggtgtggtttgactttcttatatggtgaatcatattttgcaagttttggagtctccagactatctcgacgttcaaaatccttactagagaccattgccatcagtcggtgccaaaagatggcaatagtcggccagggcttgtgagaagcattagatggtgtttcttgcttattttagtcatatagatgctagaaaaatactttggtcacttcagttcttagtcaattgatgggagaaacctctaccattttttttaacaccttttgggccaaaaagatggcagtggttggctagggtgtttctacaccttttggtgacttttctcacttatttttgataccttaatgttaaaaatatactttggccaaagagattcctctccatttattgtggtcgaccactgccactctttggaccacaaagatggcagtggt

SEQ ID NO: 29657 - DNA, 4945 bp, Cannabis sativa
tcttgtcattgaaattctcaccagaattcaagatattatatcgtgacaaccgatgggtccttggaatctcaccgtttaaaaaaaggaaaaaaaatgttaatcgagtgtcgcaatcaaactccatgtatttgtattgccacgtgtctctgattactaaccccaatccccggcccaatcgattgtcacgatgggccaccccattttaccacgtgctcggccacccgcatagacccaacccaccgaagtcattatcgttagaggttagcgggcgaagaggcctcatccacagccacagccacagcattctctttcgcactattatttcttacactcactcactgactctctctctctctatacattttgtgcgataaaaacaggagactatgtttgtcctctctgcttcgccatccgcattctcctccgccattttcatttccgcgacttcttctagggtttcgtccgtcactctgtcttcttctaagctctttgcggcttcggtgagattcgctgggaagaggagctttgcttgtccttgttttttggccatggcagagcttgtgaaggacaaggaagcgtcgtcgtcgtcgtcgtcttccgccacctccgtgagcagcagcggtgtgtcggctgtggcgtctggctctacttcagagagtaaggagcctagctattctcgcgcgtttctcaatgctcgtacggaagaaggtaggcagtgtttgttttcgtttgtgacaaaatgcgcaagagaatgacaaaatgttcattttgttttactcggatcatgctttatgattgcttgattgactttgttttgtggcttcaatttgttttttattttatttttgtgatttgtgtggggttgggggaattcaatgtgaaagcaagtgtttgtatagattaaaaacaatgaaagcttcaagtaatttgaaaaagacgatggaaataaaggaattctgtttttgtcaatgctgtcctccgtgtcgaatagttcctttttgtagctcaaatgctccgtgtgtatctgggcctgaattatttgaggttcagacagagttcatcctaattagatattttttaatttcatgccagacgcattgcatccagattctaccttttcgtttatattggattgcttcagattgggtgcaggagaatatgattgggtcctggatttagagagagcttattctcacttttcttcgaacaacttagaattataagtcatataaatataattcaatcatataacataattggttgctaaaaaaagacaaagtgtgtaggtgggaagagaagaaaaggaggagtataagcaaacgatttgggatttatcagatataacaatagatgctttttgttttcgtgaagctgtgtgattccatttttatgttctcaattgtacaagaggttttctatttgctttcttcttcactgatattgatgtaattttaagattttatttactttcgaatatctaaattaggatatgtgattaaatagagttaagtgtttttgggttttcgtttgtagattgatatttatgaggtttcacagtattgaaataatttttagaatattcatttgttcatatcaactaggaaccttggtaatccactctacaaatcacattccactatgctcaaatgacggaattaataatctgcctaagacataagttacagttgcctagttattcactagtcataattaatatagtgaactcttcttattttctccaatgatctgttcagtccattttattgattcacacaaatatagagctactgagaccaagttgatgtgaatctcaagaccatgtgtacttcaaattattttatttgcatatgtcttcctggttatgcatattggtgcaattgaataatttcctgttaatctggaaactttctctggtgacttagacatcaatgtttgacacgtaacatgaaggatgacgtcacggagttgagtagatccgagtcatagaagtcgacctgtgaggggaccctatccctgcgcgcaggttgactccgggatcttcgggatggaagttctgacttcaatacttgaatccaacccactttctttcagtattatgtaccatgaagacatggagcaacctaatccaaggttcgggggctgaacttacacgaacctgcaacccgaaagccaacctgcgcacctagggtttccacgcaacactcaagttgacatccttaactagggtttcaatttctgagactgtcttagtgcaaagtagccaaaacttgcattgagacatcaactagacataccacggacatatgtgaagcattagaatcagattcaaagcaagttgatttttgagcactcagggccccgagcactcagcgcccaggttgatatctgtcaatttgggcaccttccaagtgtccgatcgaagattcgacttttgcattgaatctgcctaaatcaaaaatgagaaaataggtccttctggaggaaaaacaacaattcttgagcataaataacagggcccagcgcccaggttgatacctggggttggccttgtgcccaggttgacaatttgccaatctgagtctcaaaaaatggagttttttaggagttctttcacgtattatcctcgtttttagaaaatattgagattcaactattttcgaggaccaaacggaatttctgaaagggcaaaactgggttctagtgcccaggatgacattttgtcaacctgtgtcggaaatccaatttagttcaacaaaaactgctctgggcgtttttaccaactcggggagaaaactacaaactcgagtctctatttctatagcccagcgcccaggttgacaatcaatctgagacgttgccttcaattgctcaaatgccaaattcgatgtgactattgagtctgacatggtcaaaaacaggggaggagaccttgtcctcaagttcataaaccttggaagtatctaaaacaaaaatcccgaaggctcagtttaaagggcccagtggtttgctgggttctgcttatccaaatctgatgttgtttcggctgtccgtctagtttttcacaagtacaatgatccatgaagtcagaacaatcaaattcacaatttcaattttttttggcaaattgacactttgaaattagaagttttgagtcttccgttttctgcaaaataacaacatgtccgagaattggtgaccagcttcgccaaaacctataaatcgagtaagtgttgtcaaactatcacttaggcatctcaaaggacaccccttggacgtttctacaatcctgggatgttaacctcagcgctgggatgttaacttgggcaatgggacctgaattgcattgagtaaaacagccacaactccttaatttttatctgattgacgcaattcaacttgtgttttgaagctatttaaacactttatcaagtcatgtctcacaccccagacgtaattctgaagctattgtcgtcaaaatttacccccaaaggagttatgaaaataagttccaggtaactcacagcgggattcgccggacaccaaaatcggccattaccatagaagctaattttcatctttagattatcatcaacagtggaaaacaacttattagtatttttctcttatttttgtgggtttccttcacctataaaaggagagctcccttagctcatttttcacatttagaaaattatccacaaagtcagagcttctctctctagactttttctctatacagtttggagtttctgatacttagtctattgttgtaattgccatctcgtgagaaataaaactcggaagtaaacgtagtcctattactattgcgatataggggtgaactactataaattgctgtgtctgtcttattaattacttaacacattattcatttttggcaatctagcgagcgagtgtagtttagaagtctagtctagatttttgaatcaacatttccattcaatttctgtctccctttggaacactttcgctttttatatggaggagaatatggttgcaactgtagtaaatgcataacaaaaaatagaaataactcgtgaagttattctgaaatttgatcaacagtgatatatttatttcctgaaatacagatttatcaattaaaaaatattagttgcttctagacttctagtgattttcagcttacatgcagagatactggctggaatcaggaaagaagaagaagcaggaaggctgcctcctactgttgcttctgggatggaagaattatatcataattataaaaatgctgtaagtattgattctcaactcactctctagtttgacatgttgagatgtttatattattatcatgtaatttttcatatatataatggataattttttgtttttttgtcagatatatataattatgtattcgtgtatttgattttatttagcatgcatgatattatcaggtaagtgtaagagctaaccaaatttagttggagacagtcttttaatgtatgatgaagtgtattttggtgtattcatgatcgtcatattctcacctaatacttgctactaaggattgaacagccgcatttattcattttattttgctgagtgtagccaggatacaactattttccttctacacccacctactacacatgtcacctgaactcttaactcttcaagatagataactcttttagagtcttctaagaaattattctagggtgagatcaaatgttgttcattaagaatgtagtttggccttatgatgcatttatatatttaagatttctgtcattcataaattttctgtttcctatttcctttattcaaatggtttcatgttttagattttgcaaagtggaaatcccaaggcagatgagattgtattatcaaatatggctgctgcattggatcgcatattctttgaagtagaggtactactgcatactgagtgttctataga

SEQ ID NO: 29658 - DNA, 2024 bp, Cannabis sativa
agtcaacatgtggcaaattactaaacactcataaagaagtaccaatttacaacacttgtaattatttgggaattactttttatcggctgaaaaattaaaaggcaaaataatacatagttgatagtttggggagaacaatcgtacaatttcactactccacttcaatacaagaaaaactactcaaactcaaagcataatttttcgaaaggagtcgtagtagtaatataccattttttttttcattaattatgaagttacaccttataaatttgatagactcactccgcacatgaattgaatacaccatccaagaagattgagtgagtggatagtgaattcaaatccggctgttgaataaaacctagctaacttggtgccacttctgatcacacacacatatatattatatattatatatagagaggattttgagtatataatactagaaagtaataatataaattcttataacatattggtatgtatattaaggaaaatcagtaaggtgggagagctgggctaatgattggtgcagtagctgcaattagcctggcaggttggacgcccggtccttgggcaaccacaaaacctgagcttttgatctcagccattcctcgacgaccgtcatttccagcttgtgcttcacacagtttgggaagaaacacacctatatatcccataaatataattcaacaaattcatatataaatctttaataataataataaagacatataatgtactgaccttccccagcggcgagattgaagtaaaggtcaacaacgttgggacaagagttgtgacaagaaggagagcaaagttggttagtgaagcgagattcaaggagtgagtcggatgagattccaagggttttacggtcaagtccacaagctttgatgcagtggtcggtttcgattatgtccttcagtttgtctgcttctatatctgacgtacgacacgtgtacgcttcctcaccactccttttcacgtgcttctctaaaacgcaccgtttccccactgatgacactgcgaatgcgcatgtatcttgttctagctcctcgcatgttactcctcctacgttaaaacaccaaataaatgaataaataatgtattatttaattatgaagaaaaagaaaaagatgtgtttttattaattaattgaccaacctaaggtgccttgaaggcaaagagcaaaagtaagagcgatgattgagagggctttcaagaaaaatttggcagccattgtttgagttggaaatagctctctataaagttggtttttgtttaagggtggttagttttggaggaattaatgtggtacttatgggggatttcaagggttgggtttgaaccctttttatagttgtttttggaacactgtagaagaatatggaatatgaaaagctatatataacgaaggtaagaaattagttggaagttcaaaagttacaattctattaattcaaagtttgaaagtcactgtaacaactaacaagatgaatatgatttatgaaataggagtgagaatattattatcatgctatttagggtcgtggtggtgtgggacctcacgaaccacacatagaaggctttttatgactacaatacaagtataagtgttatattcaagtcaattaacaaattgtctgccgctatcaatggcggacatgcatatgcatgcctatatttatatatataggtcataaatattaatttaattttgtgattgattagattttttattttttttgttaaataataatttacattttatatatatttttttgacatgagattttatactttttaaaatagtatgttttaaaagaaatatattggcatctaaactacttgaattttaaatattttaataattaatcacgaaaaatggattttttaagggcaaaactacttaagctcccattatgttttgctctataccctccgtccaaaaattacagttaagtgccacagtggactgctcacgtgtacacacttaaacacgtggcaaatttttagtggtc

SEQ ID NO: 29659 - DNA, 1484 bp, Cannabis sativa
aatttatgtttgatcctttaaaagactaacttaatgattactctcgaggtacatataattttaatgatgtcatttaatcttacacaaaaaaatcctacaaacaaaatccaaaattttaccttcaatgaaatacactcaaaatacaaaaccacataatttgtttttaagtttaaatcttattattaaaatagtaaacattagactcgcccaataatccttaaatgaaaaatattgtgaaattagtaaaacaacaaacaattcttcataaagagtaaaaataaaactaaaacaaattaaaaatgaaaacttccatcttttgcatttatattgttatgatgttgtttaaggaaacattgataaagataagtcaataatcatcattagtacatatgacttatcaaaattgccagaataccattaatccaaagcaaagttctaaagagaataaagtgttctatagggaaattaaaaagaagctgtacacttatggccataatatatctaaaccccccccaaaatgaagaagaagaaaaacaacgagtcaatagttgtcataacccgaaaaaaggattcaacaccgagtgcattctggcctttcgaaaaccatagcttatgtcctctaaacctgaaatagacaatgcagttgagattgtgaattaccaaaaaatcgaatgatgaaagaaacaaaatgagatgtaaagcaaaactaaaatctatttgagcaaccgagagcagaactcaattccatgttattcttctccattatagtttcaagactaacaaatatgcatgcgaatcaaacttacaaaaaacttaaagatgctttgactattgttcgaaagaatcagcaacgatcatgatagaataagaatcctttttaaggggtgagtgtccattgtatgtcgatcaaacatttgtattctccccaaatgaagaaacattatcaaccattaatcattcaaaacgagtaacgaaagggggaacaccataatttttaaacatcatcgtcatttctactaggtattccgaatgtaattcatggtgttaataaaaacttcacagaaatatcgtctcattctttaatggtacttgcacacttttcacataaaaacactagacatgcctatcacacaatgcttttaaatttagaggaaccatcttaaatttaaatgaatttgattagaacatatggaaacacgcatcttacaaatcataagagaaaaatattccaaccaatgcaaaacaatttttttcagtagtgatggggaattaccttatcgggttgacttaacatgaacttcaataaggtcatcatcctccattcccaaagctgcaggagttgattctggacctactgtatcaccgtcaaaacgaaatgctagagtctgtcggtcaagcttaactttatcggcatataatttgaatagcctctcgaacttatcatcctacacatttgaagtacttaaattactcaataatataaa

SEQ ID NO: 29660 - DNA, 5208 bp, Cannabis sativa
  modified_base (5132)..(5138): a, c, t, g, unknown or other
aatgctctataatttattgttataatgatatctgaaaagagggtgagagagatacttaatgattgtttttagattggggtaaagagcatataatattatgtaagtgattataatgtaaattaattttgtgcttattataataagctttcaaaagatctaattagataatggtatatattctctctctctctcttttttttttttttttttttccaatgatgggacaagcccatttctctccactaaaatatgggcccctcataagcactgagcccatatactaatgggcccaaacatcattgccttttttgcctcaaactcaagaagtaataataggtgtgaaagtgaaaggtttaaaattttttggtggaaaattccaaacttaaatcacttcatgttttgcctttttccccttaattaactttctaaggttaggtttggtaaggtaactacctcttgaaggccaatatcaaatttggtctctttatttattttcataattaatttattattagatgttagatctaatctatatttagttggctagtcaataacctaacaaacaacttttaaacagatatttgtgaaagttttaacaaaatgggcatttgtcaaaaactttaaaattgacatatcactaacttgtatgtatattaatatatatctaccaaatgaacatgggagacccatcttcataattgggcaacatgcatgcttattttttttagtaaattattttataaaagttactaattagatatttttttattaaataataaattagattatatatattttaaaataatattaaatagtatcataaattctatttttgttaaagtaaaatttaataaggtgttataacacgattaagttttctgcatatgaatatgtcgaattgtttttaagttactttttgaaaaaaatcatcgaaaattgagttcaggattctatttatattatgttggaaaatatagtgtctaactgtctattttgtcatctaacaaaatagagagtctaattaataatttttgcaaaacacataatccaaaataatattacctatatataaatacatatatataagcatctacctataatgtattttaatattaaataaataaaattcaatattaattttaacctatgatttattaattaactcgatatcaatattttgagcactacttagatgtgatatactgttattaatgtaatttaatatacaatttcacatactttattttaataactatcataaaaaactgttaaagtaacgtcttattataatattagacaccactgatcaattttgaaaaatgttaataaaaattagtagtatctaacattattacaagatgttatattataattggtataattatatattaaattttacacattttaaagtaatagttattgtaaaatatgagtgaactcaataatagtgttactcatctattctcttaccctttaagatgccaaaacactttgttttgagtaattttatgatgcctttattttgatccaatcatataatacataggtggtaacacttgtttattattcttcttctatatatgtccaaacaactacaatgtagttctagaaccaaactgttgtatttgtatggtaggaaatttaaatagtgtttcaataataccaagttgaagatattatgttttctccaaaagaatttaatagtcatcacctttttttctttttatcactaaaatatagaaaaatgaatagtgcccaaaagctagcattttttttaggttaatactattttattattgattaaattttctattttattagataataaattagattctatatttttcaaaataatacaaagtaatacttttagcttaatttttaataatttatctttttaatataaccaacttgcagataatttctaccacaaataaatgcaacaaaagtaactaattttatgataacacatttttatcgaattattattaaattttattttaataaaaatttaattcattatttaataaataaatagtccgatcaataacttttaaaatctcataatctaaaataatatatattctaaaataataaatatgtatatatgtctaaattcttatatattcttctttttattgttggtgctttcaactttacatcattacacaacaagagattgagaaaagagcataaatatgtgatgcccacatggtatttttaatgttttatatttaaagaacagtttcaaagtaaccctattaatcctttttaatatttgcttaaatataatctaatttcaattatagtacataaacataggaaaaaaagagaactcttattacccttgattatacttcttttgtttaccaatatattattcttaattatagtgagatcagaatatatatatatatttagtgtgtaatctaaatgataatattattaattgggccacttaattaagcatggcagacactaattttggtctagagaaattgagaccaactttcacaatttattaatgcttttttttttttttatctacttttttttaagtgtttcatatagttatgttcaacaaggttacatcatgaccccatttatacatattatatatatataaatttatgtataatatatattcttggatttggggtatacttgctcttaattaaattaaaaagatgtttctattgttggtggatcatgaagaaagctctctttcacttttttatatcacaaagtgggcaactggtcatgagatcatatctcaatcttcaccactcaaaattagattctctataccttaacaaaatttatatattaaaaaattgttggtatttttaatcactatttataaatatcttttatacatagaaattttattttaatgtatcgtataaatttttaagaaattttgtataatttagaatctcaaaatcaagattgaaacaacttgttaaaagtattcttgttttgatatttatatcgggtgcaagaaactgtttgaattcttatttcaacattctaaaatatttgaatttttttaaaaaaaatttgtaaaactcctacaactatattatacactataatgtgaaaaaaaaaaataaaaaaaaaattgtaacttatccacactgaaaagtagctattaatattaattaaaattaagttattatactactatagtgctactcatattgaggcgtagtcttggatataggcattagagctaattgtatacatatcgctttaacaagtaatacttaggtaagtgagatctttcccacaaaaattaaagctaagtaccaataaattaaattcttatttctatttaacaatcgaataaataaattttaaaactatataaactaaataaaaataaataaaacaaacaaataagaagtttaacaataaatacgaaattagaaatatactttcaatttattttttattaattttaaaaatatcatatttctttctaaataaaaatctaaatttgtttttaaacaaatttaacatacatatatgcggcgattatgaaattttaatggttaatttaccaagatattatgaggttgataagaactaatatataaaagttttaattttaaataattaataaataaattgaaatgtatatgttaatgagtgatgtccatggagggatttgatgtttgaatctacatcacatataagaaagtcatttctcaccatttgaggtttatataatacctatatttatataaattatatttatttaatattgaaatagagaactagacatcaactttatatatttctctttatctaatcttgttcttgcaaatgcttgcttgcatttacaaaaagttggatcttggtgtcataatggagaatgactactctctttgtcaagttaaactaaaaaaagagagagagatcatcaaagctagtttcactttttctttgaaatatattaaaagatttttttaatcttgtgacagtcagtagtcctgtgatccgtaaagagaaataccaggtaagctgtgcaatctcacattgcatgtggaaggtcaagtgtgataattttgaaactgtgtaggtaagggactacatagttaaatatgacttaaatgattgattgttactatttatatcaacaagatgcatcttgttttctgatagtctatctcttgagaactccatagttctcaagaagcgtacgagtgaggacaaagcacactgtaaatactcgtattggtctatagagccagtcgtcaattcaaaaagcagatagagtgacctactcgaatataagagctatataaatccgtaaagaaaggcccaatagaaacttgaagcgaggacgttacaaatcctaaaccctaaaaattctcttttttaattttaacaattgtgatttaattttgaatctaattctaatttttttttttttttaactaaaattggacctaaggtattattatgctctattttacaaaacacaaaatctgaattgttatttgacaaaacagaatgattaattaataacttttgttatacaaagtttaaaaaagtatttacaaaatcaatatctaatgaaaaacatagttaaattaatgaagaactatagagatgatatgctgaaagaaaattaagccagaattcaattaaaaaaaaggaaaaaagaatcattcttcattgttgtttacataaaaaaaaaaattattgcaaatattccacaaaattaataactattaacacctaaaacttatcttcatcctctattaatttttgtgaaatatttgcaataatattcattttttcgcacttttaacatttatttttttagtaataataatacaaaaaattaatattttattataatttaataatacaaaaggttaatattttattataattaagtataatactcaaatcttttcatttgctgcaataaaatattaacttcttttattattacaaccaacaaaaagatttaggtattaaagaataaacaaattgaaaaaattaaatattattgccgaaatatttaaaaaaaaaactaccaaatattcctaggataggtggaatgaactaaactaaaatgtaagacaaatcaatcaaaaaaaggggtaagttgaaaaatnnnnnnntattcatcaattaattaaatttacctttaattttatatttatttgaaacatacctctttttatatgtatt

SEQ ID NO: 29661 - DNA, 1551 bp, Cannabis sativa
atctttcattgataacaaatcagactagatggaaatgggttttatatggaaatgggttttatttagggcataaaatcccaacagcaaggtgcatggaattcgctcgacacaaaaaatatacatattcaattttaaaataataatatgtacacaattattaaaatactttgtacacactaatgtgagtacttatctcatcaatctaattggttgaaactttttatcttaatattttttttagaatctacaatttccaacacttaagatacacaattaaaacacagtggcacaaattatggtattattaaaaattaattgtacatccacaattaattatggtaataatgtagagcattttgcaaatagagtttaacaaagtttttgcccagcccaagcacaaaaaaccaaaccctagtaccctatgagtaacacactcagaatgttcaagttccaatctgaaactctttctctttcatagagagtgaaacataggtttcaaacacgaaattaaacaatctcatacatagatccaagagtagatttacacacaaataaaatagagagattaatcaaacagagctagatcagagacacatgattaatcccaaagtttataacctcaaaaaaaagggctacgtctctgtcaagttcacctcagagtagcttgatctttcattatcacaataggtaaattgcaagctttctttatattcgaaccacaaaactttatagttgataatctttgtgttccattctttgattttctcacagatttttcttctcagtctcacactaactctctttatttttgttttacgtctctcgattacaatggagctcgaaagagcttctctctaatctctcgctctaagcttaactcacaaagaagaggaatgttgtagatagtctctttagctttgaatctggggtttttataagcttccagtagttcatagaactatagttagagtctttcatgattatgttatttgtaactgtaattagttacgagtttgttagtttttaagtcgtcgagcacaattataatacttttgttgtgatctgttgtaacaaactggagcttataagtggattaaatcttacaattttgatataaattgcacgacgagatggactacaaatctagggagcactacaaatttttctacttttagtcacaacaaaacttgtgaaaagttaaaaaattgtgtatgtagtgcttgctgctacgatgtattgcatatggatgaatagaaacaagtgcatcaatgataattgttcttatacgatttcacacatagtcaaagaaattcagagagtggttaaatatcaattaaacatcacaatacaaaacatgatactagtaattatagattgattactcgattgttggcttgagttgtgttattttgtttgctggtttggctcctactggagcattcttgtaactttgtttgttgattaatgagaatttctctcctttgatctaaaaaaagtaaaacatttccaattttttaattaggggtcattttaactaaatttaacgcaaaa

SEQ ID NO: 29662 - DNA, 1841 bp, Cannabis sativa
aatgaaatggaatagaataaaaagtaaacaatttttttatttcatttctctatttggttgcattttatggcacatttactatctattattcagaatcaaaataaattaatagagaaatataacagaataagtaaataataatcgaaaatagaatgaaaataattttgtttactttatcaggaaacgtaatctgaatgtttaaattaattaaattacccttttaatttaaagtatagtttgtggtagttatttttaaagatattttgaaaaaataaaattgtcattataatttaatattaaaaaataaaataaaaataaataaatgtcatttccctaaataacattctttagaaaattagtaaggaaaattttcctttttttttcttccttaattaattaagttcactatttcttaaatttaataaattaaataaataaatgtaagggaatgagtctcttactattgattctcattgcttaataataaatatgtcattaaagtattgtaatgtcattataataaacaatttttcttttttcatcattttggtaaaatgatcattctattttgaaatggtaagaaagactattctaatataagataaaaaatttttcaataattctttttatacattttatgtttgattttattttaatttctattcctaatatatattatcattctcatgtttttattccccaaccaaacacggccttacacttttcaggttcatacaaagaatcataacagaagaattgttatattatcttgtttaggccaactcgacttcataatactaaatatagtgtgattttacactataaacattccaaccaaacattataaattacactataaatgggtttgtctacagtcccaccaaatttaacggggacactgtagaccacactatatatatatttactttttaataattatataatacttaaaaaatgataaagaatataatatttggtattaaaatatttttattatattaataaaataatagaataataaaacatataatatttgatataatttttagtgttatggttggtattgaaagaaaaaaattagtgttgaaatagtagttttttagtattgatttaacactaaatttaagtttttcctttggagatattcttactaatgcttattatatttctcagtgttatattgttattattgtaattaagaatccaatattatataatttaaaaaattaattttaaaaaaatatctttaactaattgtacttgacaccaaataattaaaaaaaagaataaaaatgtgttaaaaaaataattgtaacatttaattcgcaagtgcatacatttattgtaagttgtacagaagtcatcatattgttttaggataatgtcaaaaaaaattaagtaaaaatagatttatttatttttttgaagatgtgacaatatttagtacaagtagttgagcaagtaacttcatgaagtaataaaagaagataagaataataggttgccatatcaatatattaatattattatggtgtaaaaattcaactacattactactaaagtacaaaacatataaatatagttctatagttatatgcacaaagaaaagtgtaccctttaatgtttcatgtgattggtacaaacaaatccatcctcatcttcactttcatttttcctttttaggttttttaaaatcttagttagggttttcttagctactaacaatcaataatggctaattaattttactttttttaataaattatctagaagaggtttgaatgttaattttttaattaaattaaaagatttatatgtattttaaactttcatagttgaaa

SEQ ID NO: 29663 - DNA, 1923 bp, Cannabis sativa
  modified_base (381)..(384): a, c, t, g, unknown or other
agagaaaaatatgggaattggaaggttgggagtgacttttgagtagcctgaagttgagattgaacctttttaatttgtcgagggaggaaaggcccaatcgatttttgccactgtgagaaagtgagagcgcaaacttccaattcccagaatagctatacgagaggtattccttattagtgttctataaaaaatttctattaaattatagaagcattaattcacaattatattgacatcggtcaaagcatattatttagaattattggtcaaagtttgaataataattgattttgttaaaagaatgatcatcgttttacctacttttgtattactagctagttttgaattttcagtggttctctaataataataataataatnnnnataataataataataataagtggtcgctgtgtttgtgaacaggatcaatgttactataaattcaaacctaattaattattaatcttaccatatgttataactagaaatattatgaataagttcaatttttttttttttcattctttctctctcttttttttaaaggttatttcttttctttcttatagatgaataagttcaatgttatactatcaattaataataagagaattattctatgtatcatttttaatttttttttttatttacggcttaaatttctttagcaatttgagttattccattaattgttacatagattactaaactatataaaaaaaaaactttgtaaatgtaaagaattttttttttaatggaacctcactatataaaaaaaaactttgtaaatataaagaaacttttttttttttaaatgaaacctcttaataatatatatttattatgtacaaatgcgcgttgtaaggttttccaggtggaacagagcaaagtaaagaatctatggtaccgttgacctgacaataaaaatttatataaaatattgcatatacatatatatattaattagatccaagtacgatgcttttccactaaacaaatttaatcattacctgtttaatatttagccgacaataatttaaaataaaaccaggataattatcctgttaatcatccaacttaatgaaaaacaatgggtctacaaagaacaaaactccaatcatattaattttcaataataatattatatatcaattggtgagatctacatctatgtagagcaaaattataaacaactcctccatcataatattaatgattgcactataataaaggtgaaactttgttcttattatgaagctaaccaatcatattattaattaattgacgcacacaacatacataataatatatatttctttttccactaataataaaaagccttgtggcaaatttacacggcaagtggtcaccatatccaagttcatgaaacttcaactagctagaacatacaaacttgtaatatttcaatacacaagacacacatatccatgatatacgctaaattacagttgcactaattaactcaaagggaaaagaaagaaaaagttgaaaggaaattaaagactagctataattatcgatacatatatagccaaggggagcaaggccatgtacattactttttaattattagtactacttagtacttactccctcaagcttccgacccttctggattttgagttgagaagtttcccggatggacttttttgcccttccctagagcagagccgccgcctccgccatgaccacgggtggcggctttgctgtcttggtgagtttctccttttcttgctctttcctcttccatcctcaacatcttttccttttggcgtttttgcatcacataaactcctgcgcagcttgctccaatagaagacatggtatgatggttatttagaaagaggtatatatatatatgtgtgaaaaattaaattagtagggtgaagagggttgtaa

SEQ ID NO: 29664 - DNA, 1031 bp, Cannabis sativa
atgtatctaaaaaataaagaattataccaaattgagatgagaaattaattaccttaaattgattatgcagtcactcctgttatattgattttttttttttttgtcaacaacaataaaaaatggctgagaaccactgaaccagtagtaggctttagaagaaagcaaatcacatctatatatactctatagttcttctccacaaagatcaatggcgatgcacgtggtcgcacgtgacacactttacttgaaatgttaggcatggcaataatcaatcaaccacaataatagatgactttgtaatgagtatgttattcatcatatacgccatcaaattaagaattttagatatacatataagataataataatcaaagatttaatggagggagtgaaaggaaagcactgccatttccccccattaacacaatctatggtaacaaacacaacaaagataacattaaattactgtactccaactccaaacagtggcagcttagctatctactctggtcagcttctgaaacaaacattgttttgttttaccttttttttttttttttttcattttttgtttttgtttttacctcattggtttttttacctgactaaactactgcctgcctcttttcatgctgcaagatgggcatttgtattgcttgatgctctcggccttagcaggtgtaatcttcacacatttcccgtggaaccacttctcgcatatgtcgcagccgatccaaaactcgtctgcgttgtagtttccaccacaactaccgcagagggtttcgctgtgctcgtcttcatcctcctcgaaactttcatctgctagcttcggattgcttttcacttgaccatcattggatctctgttgcacacacacatattagaaacagattaccgaaaaatctccaaggaaattgctagtgaaattatcaaaattttaaacttgagaattttttgttttaacaataaatatgagagaaagaaatcaaaataaacagttctaaaccattgagagaaatgttttgttccaa

SEQ ID NO: 29665 - DNA, 1259 bp, Cannabis sativa
atgcaaacataaatcacttcaaaattcttagattgataattaatcagattgtaaaggattttatttagggcacaagacccaacagaaactccttgttgcaaggaatgctgagacgtctcgttacaaggcatgctgtctcattgaggcctatgccgagtcgtcttgttgagaagcatgtcgagacatcaatagtgcagagaccatgaagttttaggtcctacgcgtgtcaagtacaactcatttatgtgaagttaattggagttcggagtcggtctttgtccacagtcttaacaaagctccgttaattgggtgctttcacccgactaatcttaaagtttagacccatcaattttgaaactaacactaataaacaaacttgtgtttattcgaaaaaataaagtacataagtgtttaatttttaaaattatttataaacttttaataaataaattatttctgttatacatacatttataatatatattcaaaatttataaatatatttatatacatatattataatttcaatcttaataaacagtaatatataaaaatataaatattgactatttatatatttaactttatacactatttttttaaaaaataaattataagtaattttcatctaatttatttgtaaatatttataaaattattaaattataaatatttataaaattatgcaattatatttttcaattttttttatactacagtagatttaactcattataaacaaccttaaaaaaaacgcattaaaaacaaattctagatttaactcgtgaaggaaaaaaaaaattattccattgctaccctattcttcattcaattcattaaaaacaaaaaaagtgtgtagctgattgactagttataaatattacaataaataataaaaaaaaataagatgcttttaaactggagggtccaagttcttgtcttgttcatatacgtcgacccattcgttttcgtatggttattagatttgcacgttagtactctgtactcatataaaatgaaactgccttggacaccgagtaattatatatatataaaaaattactcaaaaaaaaaaaaaacagaaaaaaaagtatatatatatatgataatttttattcaaacatatacccataggcgtattcatttctttttttcttttgtactttgctcaatagatataaagatcaagaaaagcatgcaaatatataggactactgtaaagctagtttattattagcttcagtatttgcatttatata

SEQ ID NO: 29666 - DNA, 3253 bp, Cannabis sativa
tttgttttattattgtattgattgtgttttttattgtaagcctgggatgatttaatccaattgtttgaggtgttgtggagtcgagaccctgtttacagggagaaccccttgatgatactacatttcatatgactttaatggatttagctgaggctaagaaatattatattttgagttttaactatactcttatccttaataagtggtgggtataagagtctgaaaaactcataaattgtgtgttgtctatcagcttcatcttttgtatttctacgagaatggagttaaataacagcactacatgtgaaaacaagtacatgtttattggcttacagtttattttttgtgcgtgatatagggtcagttaaatttgtaagttttgctttgttagatttcagtgagattttatagtctatgatctgaatgtttcaatgaagtctgggaatgctactatccattcaataaatagattagacataaaatccatattagtaatgctactatgtgaaatttatgtacctataagtcgaagaattgaacaatgttttgccaatgccaatccgttcgacattgtaagattttcatttgaaactactcatttttgataaaaagcatgtacttagagagtatatgaaactaaaattggtcgacatattcattctcatgtaataaaacatcacaaaatacgagaatcagaattaagtaaaattctacatacctctctctaggggttgttcataaaaattgataaattaaaattgaatttggcgtaacatattggttggttataaaattataaaaattgaccataactgatcgattttcacccctctcatggtgataaaaagaaaatggaaacaactaaataaaataaaccactttcataatgacaaatataaaggatagtctaaattttgaagaaataccaataagaaacccaaactctagaaattacttgaatttagttgaacaaagatggattttgcgctaaggaaaaatgtttcattaacatgaattcagttgtagagaaaacattttgtctttctataataaaataaaagtgtgacaacaacttatgaccattctcaacatgaaatctagcttaatttaatactcaaaatctaagactaaacttgccgtggatatatacacacaagagataataatctcaataacattagcacctgcaataatctcaatctatttaagtgacacaattaaattatactcaaattggtcaaatataaaaataaaccaagtaatgtgcaaataagaacaaagatcagtatgagataataaggaattaaatagtaagattatgtttggtttggcattttagtgatggaatcactttacagttttaatgtttggtttaaattttaaaacattgtattgcctttacaatgtaaaatactgttccaataattgttcctgttacaaccaatcacttgttctaagcatatatgatcttgtagaagttgttgatgaatttaaaggagtaaaagtttggtgagcttcgagtaaaaacaattccaaaactcaaatggtttctttctactaagtttttgatgagaggagatactacattctcacttcccataaaaagcatagagagctcattgttggggctaaccttaatcatgttcttaagacaattaaagtgagtcaattagagaataaatgagtatgaaattttataccaaacttacatatttagctatgacaatatatatacaagcaacaaaggaacctaaatgtgaaaatagagaataagaattaatagcaagttttgaggaaatactaattataagtccaaaccatagaaatcacttttgttgaaaaaattcccaagtcaatgtagctactgctgctcctcctcaacaccaaaccttcctccaattatcccacctgggtctttctcttgttgttcttgacggaattattggcaaataacatgtccttttttcattctcaattaaatgatactcggctaacggtcccaacctcaaaggtagtttctattggaggcgatcttagagtaggagcaagagcaaagagagcctttgttcattggagtcggagaaaactaacgctctcaactgtaacagagaaaaactattatttattttaagaaagataaagaaataaaaaagaatcggttgtaactggtacacctactcaaatgacaatttataaaatatttgattatttagaaaaaatctaaaccattgatctagattcaacagaaaaccaatggtctctaataaatgaacaggtccatcccattttttattttgatcggcctgagaactggaaccaaacacggccccgaattcgaacccgatcccgaatccagacccagacctcagcatagccctggacccgaactcgaaccctacaacgaccctcaacctggacacaaacctagcccgaacctcgaacccgaccctggccctggacccgagactcagacccagacttggacccaaaccccgaaccaggactcggtataggaccccaatcctggggcacgactctgtatctagacccgacttaaataaaattaacaattgaaaatgaaatttcgagaatcgatttttatattctgtttttaaaattgaaaaacaaaaagtagttattgaacacatttttattttttaaaataaaaattttacttttatttttatgattaaaaaaatttaaaattttaaaaaaaaaaaaaataagtgggatttagtctaagccttatacatgtctttttttttttaagctaacaaagtagtaagaacgtaaaacataacgtttagtatttaatccgtaaaataaaataatataatacagattaaatactaaatgtatttaaatatataaaattgaaagtatattatatttatgcaacatattatcttaaaaataagggtaacttacaaaaatactggattttaactcaatctttacagaaatactaccacatggcaaaaataatttttatactgtcttgggacttttttttttctcttatattgtaaacacccaaaataaaaatgaggtctctatcttctacacccgcggacaaaaccaccacagaaacaccagaataaccgaaaaacaataattaaatttgctgaggtgaagcagaaacattaaaactgttaatattagggctgtcatgatttttctaatgttgtttttgggttattccgctattgtttcgtatgtttaacaaatattggttttaaattacacaggttaa

SEQ ID NO: 29667 - DNA, 2313 bp, Cannabis sativa
tctttcataaccacaaccaataaacattaccaaatcaccattaccataccacaaatataaagaaaaaaaaaatcaaaacatcacaaatctgataaaaccaaaacaaacccaaaaaatattcaaaaacaaacctatagtttaagatgctcacagatacatcaacaattaaattgttaaaaaaataaaaaagagaaaagagagaatgggacatgagtagagatagaaattgaacgggggaaatgtaattctcacctctattcccgctacctatttatgaccccatccccgtctaacaaccagcaaattcgggataggagaatactcatcggttatggagaactcatcgagtatccattaagacaaaatagaaagaaaaaaattaaataattgaaaaaacttttaaatttttaatacatcaatattctcaaaaatatttattatgccttcataatctatagaaaataaaaacaaatttgcctcaaagttaaagaaaaaaaaaacagcataacctaataaaagataaaaaataaatttgtctcaaagtttgaaaagaaaaaaaaaatcataacccaagcataatatcatagtctcatacctctcaattctcccaacaaattaaaaagtaaacaaagataaaactaagaaacgagaagaaaatattttcacacttgtaatccacaataatcaccactttaagcatatgatataaaattttgattatcaatgataaatatatactatatatatacgttaagaataaaaatgaaattatataatgatatatatactatatatacgttaagaataaaaatgaaactatatatatcagggttggatatggtgcggatagtattatctccattctcgtcccatccccagtttgggtattgaaattgtcccacaccatcgtcacattaactaccaagacagggaattcccacccccattaggggtgggtccttgcagttacccatccccgcggtcatgggtggacccacatgtaggcgaggcgggacattcaacccccctaaaaaaaagttgggaaaaaatgtatatgcaatttagttagttacaatatatatatttataataaaaaataatatttataaacataatattagctttagtataatggttaaacaacattacatgtagggtagaggttaatggttcgattcccataaagagtgttattttacttttgccccttttgcccatgccttacaaaaaaaaattgcaccccctcactttaaatcttgggttcgccactgcccgcggtatacatttctatctctaaacatgagagaggaaggaagaccccaaatcgtccaacatacctacccaaatcttcagggacgctgtatacttgaatcctccaagaagacaacatttgaaggcgtaattcgcctcttggtggttttgggacctcttagttccttcgtgacatatatatatatttatatatatatagagagagagatcagtcggagttcatgtgagaatgggacagagagcagtagccttctgggttcgtgcagaggaatggttgtctggtcatctgggtttctttggagtcgtgcaagagaggaggaacaagggaaagagaaggtggtcatatgggttttgctgggggtggcatgggtgagtgagaggagaaagaggtataagaaactattgacgacgaccatggtcgaagcagacgagagacaaggagaagaaaagagaaagggaagtttttttttagggaaattaggattttctttagactgggagaaggagtaaattaggttttgtttttctcgttgttttattttaattcatttatttatacatttaaaatttatttttttttttcccaaattttataatttttttaatttaaaatgatttttcaaataatatttataatatgtgttgaccttagattttgttaaccgatagacttgtcgtatttatcactgatgatagtatgtgtacacaataagaacaagaaagtaaaaaatacacaatatttttatagaagttcggcccccttaattaaagagtagtgatttatttccctttttgattgtactaataccagggataatagcactcagatcacaagggtttggttgtatttacaacactatgttatatagcttatttacaacactatgttatagcttatttacaacgggaaatttgaaattgtatgcataatagggactaaaattggtccactaatttaaaactatataaaatttgtaaaatgggataatttttattaaaacctaattttgccccctcattctaaactctctctctctctct

SEQ ID NO: 29668 - DNA, 2417 bp, Cannabis sativa
ctatgtatgatcacctctatgaatcctcgccctgtaaccgttggtatagaacaggagaatttaaggcgttggatctcatcatgctcggcggttgtgctagttgtgttgtccaccaactcattacaaaattcttgaaccagatacttcccatctaatgcacacattaacctgtcactcagtagaattcatcaactgcagaccagggccggctcaagggtgggacagcgggcgctcaagcccaaaaaaccctttaacaaaaaggttccaaatgttagaagaacttgataaatacctcatgctggggtgaaataagttgaagcctttcacttcgaattgagctctttcggacaatgcaactgcaaccggtttgatgcttgaaattctacaatttttatagcttttctgaggtaagaaagtgtctaagacaatttgacctgcatgaccattaatatagtaaaaaaaaaatgaagacatgaacaacattatgagtcaaatctagctataaatatggagaaagaagaggaaggagacaccattgtgcataaaagctacatgattttgcacccttgaatacacccaaccagttctccagaaaggatcattggatgcagctagtagcctcttcaaacaagatccaagatcacattgtaactgataaaacgaaaaaactagtttcacttaagatcaaacaagttttcagtagagtacaacaatgatatcagagattcataatcagcattcaagtgttgtacctcctcccaagtcatttgctctagatggagatatattgtaaggatgacacagcctggtcttatgtaactttcgatatcagtaggaaaatgagataaccagttgaggatctaaacaaacaatatgaaatatcaaactctaacttcagttgcacaagaaagataccaaagcaaaagttatgtacctgtgcccgcaaaaggaaaggaagatcttcaggctctttcccaaagagtttgaaaacaattcgattagttcgactctggaaataaaaggaagaaacttctgatgataacaaaaatgaactcaaaggaacattgaacaacaaatcttcatgaaagttaagcacctgagcctctccactagaactagaattcgagttctgtctcgggtaggatgatagaggattattaagagaaacagtatctgaagttagtggcagatgtgaatcatcatacacaatattcaagtcaatattgttaagtttgatagatttggctgaaaatgtttgcatattgccatcatttgaatgtactccacaaactttcttgagtgtcatatctgatacagacttcaaaggagttccaagaatgatgggctcatcattaaccttagaggctgaaccaaaaagggtatctgaaataattctcattggcttttgtgaggccacaacagaagtgcctgcattaattaagccttgggaattttgcagcaccgtcgacatgtacctccttccatcgactgaactcgaaatgttggccaaattcttcaacagacaagacaaaacatcttgatcccttgtttgatcagagctgtttgctgcaaatcacacaaggacatatctgtatagtcaaacaagccactacagcttagaacatgagatgactcaagagacaaagagaactaacaatgcatattggagagtatccttaacaaacttaacaacagataattagtgttcttttcatcatgaagtgtggaatcaggatgtgtcttcctcctcctcctcctgttattatggccagccaaacgccgacgacaactcctcttcccttgatcaaactcttgaagaagatgaaacctgcataaaaaaataagtatctatttccatctatcaaaagaccaaacatcaaaatttactaactataacactaaacaaaaagtaaaacctgctgcattgttgacaaaaccgctgcatagtattcgaaacaagtgctttagttgctttggaatgcatatcacagactttatgccttctgttataatccttggctgtggtgagatcaactgaacaatcttccactttacacatgacacttttactactactagtctccactgtcttcagcttcttcacctctgactcctctgatatgctaagctttaacttgagtgaaacatttgattcttcttcatgaacaagtagagcccttttatttttggacaagtgagctgaggaagggaatgagttcaatgatggggtggcattgaaaagatcaccatcccatctccaatcatttaaatcccattccaaactccccttgccaccaattttagcttccattttttttctcagacctcacttagtaactgaagaaacataatattaaaacaccccaattgcaagaaactgaagaaaatataatatagataaggattagggacccccc

SEQ ID NO: 29669 - DNA, 2542 bp, Cannabis sativa
aaaatagagggaaaatatctattttaaggagcattttagtcatttgtattttactaatctaatatgtacatatcaacttgttttatcaaattgaagggtttaagctctcctatataaagagccttaacaaaaccctaggctctaagtcataaagtgcaagtaagaaaccctagctcttagtctaacctctctctctctcacacgcccaccattgctcttctcaacttgagattttccaactttgattcctacattgtaaccttaggagagctacttcaaatcccacctatagtgatctgaagagtattatctacctatattaatataactagaaggggagtaggtcattacccgctaactaagggggccaaacctctataaatcttgtgttcatttactttttagttctaattatgtaacacatgacaagcattggtattaattttgactccactgtcggttggccatttcttaggtcaacaagttggtgctttttcattaagagcgagtcgaactcatgtaatctgatcaaacaccatggttaacacgagaaaaactttggctacaacatcaacctcatcaggtctccttcaagacccgatggcgagtgtttaggttctagccacgactagaatccccatgaacagaatagatgtagccactccttccatctcggcgagcaccacaaatcttgccactaaaggtggtgaggtcgacacaaacatcctggtggatctaaacaatcggcccctacctctgagggaagaccctccactagaaccttccactgaaggaaggacccatgtggtgcagcccataagaaaaattggacctcatccccagtaccatgctggagaaacagggccaggaattgacgagccaaccattagcgagccacgtgtagacttggaaaaagactcgagttagccaggcttagagaggtcgtctgccaagttggcccaactgaagaaccacacgttgttggctgtgatgtattcacataataaagacgcaaatttctcagatggatggatgaccaagaatacatcctccaatcctaccaagcagagctagacaaccggaatagagaaggcgcgaccttataaggcggttcaatgaaagaactacatggagaggccaggatctcatcagagatcctctccaagggagactagttgatagatcagggagggtctatcaatagatcatccaactaggtattgttcaaggactgacctcagtacaaggtgaactgatgagaacattaattgcaagctcgtcaattgaagcttttaaccacttggaaggtcgtctctagcacgacttccatcaccatttgtgccacgagaccctgacgcttcaagatgtatgtaacaccctaacaattagacacgctacgacaaccgataatgaaaccctaatcccgctaattcgcgattactataagggtaagagcgaaaaatttaaactttaactgaaagagagtagaaatataacttgtattaattttaaactttacaaacaatccaaaaagacaacatgtttcgggatcccacaaaccgttttgtaaaatattacaagttaatctacatgccgacctaagtggcaaaattcgagatttcagaatacattcactggtagacccaacccttgggccatccttcccaaaggtcactcgaccatacttctcgagggttactcagccatctctcggccatacccctcagagagtcactgagtcaagtatcaaggaaagtctgtcgaacaattgttggcatgcccatcactcagtaatttggcatgcacttcatgcatgccactcaacatactacttccacaacaacataactataaatagtgatgttttcctaagtaagggaaataaaggtaacaagagtacgatcacaaggacaaggcgtgtatgtgagatatgtacaaccacgccctcttcaagttataaaggagagaaggtacaagtactggaggaaccacacctgcaagtgctgacgtcccgaccaagagtatacacatccactaccctacaatccaggaccacctaacatcagactaaggtacaaggattgaggcctccacttacaaccttcagctcatgaatgtcatcttgtcccttgagaccacaattgtacccaaggccatttgagccaataaatatccttttctcagatgtgagagaggattggaaaattattgcaacacttgactccaggaaatacaagtattcctctaccaccattattgctctaaacatttctttaagtttttgaattttcatatattcattttaaattatgtgttatgttttaattttttgccttaagttagttaacgagttctcaccgtcaacaacgattactttattttcttattcgaaagatacgaatcctgggaatggtcatgtaaataaagctctgctattgtgggatttggcaataaattgttgtgataaagagctggacatccgggctcgtttattacctttccagaagcactatcatggtgttatagggaagggggaggtaag

SEQ ID NO: 29670 - DNA, 2478 bp, Cannabis sativa
  modified_base (2435)..(2439): a, c, t, g, unknown or other
aaaaaaaaaaaaaaatattagatctcacataatatatttaatttgttggagtatatgatgtgctataatttggtgtgatttttaccatacaaaatatttggaaaaattattcatgtttacctccactagtctttcttaactttttcattcaaccatcatcttcctaaatcacatcattaatcaattttccaaaacacaaaagaaaaaaaaaattcagaaagcataattagcagtataaatcgtcgagaatagcttattacttagccaaatttattttttattctatgtccgatttggaaattttctgatgattcacaggtgttttagtggttaacttgatttatatgcatgagcaaaaaattaaaaatacatttcttatttattctattataaataatatgtataatattttgaaatacttagacatgtctccgttgtcgtccagcggttaggatatctggctttcacccaggagacccgggttcgattcccggcaacggaatttttatcctttaccaatttaatcttttctccattcatctccttctccaggttactcttaactcttttctactttagaaaattcaaaggtccagatcacgttgttctcagtcgttttatcaatcagcggcggtgggttctcaatctcttctctctttcacacccaacaaaattattaattataaccaccgttgatctgttaaatcataattttgatgttagtagatacttatactagctttcttccattttcatgtctgttaaaacttataattctcataaatttgattttttttttttgcttttgccccaataggattagtatgcgagtatgtgaagtgatgttactaaattttttatccgaggataaattcttgtatagtggccgatgaagatactcagtctccccatgttcaggtatgcttgatttatttattttcaattagagctatatacaatttatcgaagacatctttatgcaagaaaaagactaattatggaataaactataacacaaatcagttgttttctaagaaaacatataaaaccatagaaaacaaacaaaatatacaagtttcatcacaattacaaccactcaagctataataaattctaacaagacaactcaaaaaaaaaaaaaaaaaaaaaaactttctagctaggatgggaattctcttcatggctggtttgtttggccaagggcgggaagaaacaacagcccggcctctcgccgagctcgcgacgttctatctcagctttcctgaggcgatgaagacaaggaactattgcaacaaagcaaatgaaaatagagaaaatggcaaagacaataagcatcattatctggccatggaaagcgtatcgcttatcccgcaagaagggaagctgcaactccccctgttgcggcagctggggtggcatggcagcagcatcaggtgccaaccacatcggctgtgcctcaaaattcatatctaccttacctttgccacacacagacagttcatgtaaatgaaaaaacagcacaagtgttttgactttaatttttattttctatgtggtggtttaattctcacactcatgacagcctggcctaaaagcttctgttttagcttttacttttaggagcattgctattaataggtactagtggtgcctatcaccttcttaatatatcgcgttgcgattggctagcgatactctctaaaagttactatattaaactctacgagacctgatacttagttggaccaataaccatattgaaacttaaaaaagtgctacacactactagtaccctttatttctttatttttaggcatatagtcctcgttttgtattgtttctcttggtattagaatttttgaaacaaagtaaagtaccatttatgatgattgattgattggtataacagagctttaaaattaaaagacaaactcatattatttatacatggttagtttttttttaacaccaatacaaaatcgacaacggaaaataatttagagctttaataaggttcacatatatattgttgtatgtttctagttttgaaattattatatttgtaatgtatatgactagtgattgacgttacatgtttgtataattgtacaaaaatgaaatgtggacatgtatggagcattagtgatcaatactctgcttggtctttctacactcttggctttatctattatttatttattattattatttggccaagaggatgtagatgattttccaatttttattttcacatctaaaaataattgactttattaaatgtaaacataaatataaatcaatttttttgttgacaaagttatgtaaatcacgatatccactagacataattaatggggaaaaaaaatgccccaaaaaattaggttgaaatgtagaaaaaaaaaaaaagatgattagtaattttttcccctgaactnnnnnatgtactaaatcatgtcttctgaacttttttggccgtta

SEQ ID NO: 29671 - DNA, 3400 bp, Cannabis sativa
  modified_base (474)..(480): a, c, t, g, unknown or other
atggatggcatgccaaaaatggtaccccccgtccaggtctcaaaattctccacgtgtcacctagacagctgccacatcaccctgtataaaatttgggataatatttacctcccaagcctgcgtgggaactttctgttggtatgtggacttgctagacccttgtactaggtgaatggggtgacaattactcgaagtacgaggtaggtaaatagagttgtcccttcatgtttttaagtatttaatgtttcacctcaaaagatgtgccttgagtcgcgtgttgaaagttcgacagcctagtgtgtactgattgcaccttttttgggagaaaataaaaaaaattgaattgttgaaataccaaaataccctctcaaaaacctacaagaaggggttttggatttcatttctctcttttatccattttgaaactcagagactttagagaaaaaaaatcatctatctctctctctctctctnnnnnnntctctctctctctctcaactctagatttctttgaagcttcaaggaattttaggatcatttttgaactcctgctcaaattacttggtgatattcaacagtgagtgagttcctaaactctttatgcactctctttaatttcttgcatttcactttagaattgccgctatgaatcttctgggtttatgaactgttctttattttagaggttaggactataatttgattttgaatacatgcgtgcggactataatcttttatttcctcacaaattgcactattttttgttaaaaaacattcaaacacaccctgcttggtgtttccggagaattctgggttcatctcgtgctcttcaaactaggattctcgtcattaggacaaaatttccttccctcaatctttaaatctgattggtcagatcatctaagttatttcttttcatgacctttcgtgaccctggtcagttcttacctccatttctctcttttgtagatgaaatcaggtgacttttggggaggtaaacatcgagtaaacgtcgacttacttcaattactccatgagaacaagtctagagtctgtgcaacctctttatcattggtgagactttaacgtcaagatttgacgagtgggaagtaacaagttaggattcagaacctctaaaacccaccgtgcaacaccatcactaccctgactgtattggtggtgaaaagacagatgattcatttggaaattgaatcgagggttaaggtgatatctggctacctcttggacatataaggtttgtgtaggggttctggatgctttgcaagtaggtgatccaaaaatttcaaggaaagtcatcatggaagtggagatcgtggttaacatcacacattatccttcatctaaaggctactcaagactaggaaagtggtgcagactaagaaaatttacaggaaagtttcatctgaagacccacatcttgcttgacaaatggtgtttgttcatgctccttacgagggctctactaagtaagtaactgctaaagtgcatgctagtgatgccaaggtacaagaagtagaagaccatggtgaggcccgcccagttcaagctgattgggaggaaaaggtcgctgctcttgcacaattttaagggttcgatgaatataatgagtccgggcagcccattactgtatgttgggatttactgattgagaagatccattatgttactaaggagtataaggaatcttgctcgtctgcataccaagaaaggctttagccaatgtgaatttttcctccatccaccctcacactaaaaaggcttacaaacttggacaagaaaacgctcatcgagaatgtgactgcctttctctcgtttgatagccaacttgttgatgaccctgggatggtctttgcgtgtggtccgaaccacaggcccaacagggggctcttttaccccttcattcgtacttccaaaagctggcaaattataacatgattagcctgacgcaattcacgtcgaaggggatcaagtacatggttgcgctgttcgttctatacgcgcatagaaatgggggatgccttcacctcatgataaaaattgattctttcacttgaagtctaacccgggcacgatcgctcaggttatttctattttccccaagttgactattcctagttgaccgacacgatggacaaagatatctccaagatatgtaggttcatccaagattattatagtatgcgagggatgaaggccaaccacctgtcttttcagcgagccaaaacttatgaccaacctcctttcacacttggcttgaggataagggaccaagccattctgtaaataccgaacaaggcacaaaacttctctttgctggctacctaggagaagttcctacgatatgggttatgttcatcatgggagactgaagaacaagggtcggtagccgaggtactagttcctgtgcaaccaacatctaagcaaaagaagaagaagaatagggcaaacatgaagcatgattcgactgaggttcccattgttattagggaagctgccgacgaggttacatgtaacgtcgtaacataaggaacaccacatactaagactaaacataggctaattccgttaatccgggatgtattagagccaagtgcggaaattaaattttaaaatatagaataaaataataacttgtaataattaaacgttatgataaatccaaaaagagtacatttgattttgggatcccgtaaaacattttcaaaatattacaagtcattaatacacgccgacctacgcgataaaagtggagatttacaacaagtttcttagtaaacccaaccctcgcggtctaacttggcctgaacatgtacaatacactgcaaaagctctcaatctcatgactgcttaactaccgacttaccctttcctgcacaatagagcacctgtgagccaatgtccatcaagacagtataaacaaaaatatggataagaattataatcactcaagtgcttatgccactgcatctattgtctatttaacatagacctacatattacactcacacgtctatttacaataaggccttagaatgatttatcacggttttgaataccaagtctaacctagttatgccttaaccgcataactctttatatcaacatatttaatgcattattgcattcacattcacatacattctagagtaataacactagaccataaaataactaaacttagagtaataatcttagtctcggtttcccgtgtaaatatacaaaaaaacatacatgagtgtcactacgctaatctctatgtgataactcaatatcttatctggtaacctaagtatgtggagattctgaattctcgggtgttcctgagcaagttccggtaattttagtcacacattcccgagatttcataaataaggttaat

SEQ ID NO: 29672 - DNA, 2742 bp, Cannabis sativa
tggattattgacactttggaggagattcaacagaaatcaggggcacaaagagtcaatcttaaacgatcattccgtaatagtgttgcaagctgcctcatggaatgctatgccaataacaaaggttctttcctgaaaatctctgtgctgaaggaaaacaaacttaagatgattattgtgcctgaagaagagggtgcgaagggctggttagagctaaagaattgtctcagtggggttgtaaagaggcaggtgacagtatcaaacgaccggagtagcagtctcagagaagagcagaaggcgtgggagcctacaatcattcaatcttggactcagcagaaagcagagacaaacaatggaagaacattgaatcagcgatcgtgggcgaatgtagtgaaggagccgtggaaaacaacgaccaaacagaactttcaagtggagaatgctaaggcaaaaaagtttgtatctgctaaagaggttggccgcaggaaaggagatattgagtggagggaattattcccagccatcaatcctagctttaaaccaaaaaatccttatccagagaagagatttcaccaaccaaagttttatgaatacatgagatcgagggcgcaaatcagaaattgggagctggccacaatccttttccgagacaacagccatgcatcctggagtgtcatattctataacctctctagggagttagggagaaaattggtggttagtcaattatttgatgacagatgtatagtttggtgtaaggacaagatggatagagatgaattaatcaaaactcaaaatatgagtgttccaggggcacaaactgtagtgtcttttcgtccatggagttgggagtcacaaaaggaaaatattaaagtggagtgtagggactcctggattggaatacaaggtttgcctctgaacctttggcatatgaaaatgttcagaaaaattggtgattgttgtggtggtctcttggatgtggataaagacacggctgaagcaagcatgctctcgcatatgagacttcagttgaggggtgatgatactggttttgtaccagaatctgtggtcttagagcacgaaggtaaacgggtggaattgaaaatgttcaaacttaatgatttaagttataggtttcatggatattttggtacttgttggtatcaagattttgatcacaacaaggtgtttggggatggtaatgagcctgcggtagaaggaaaaaatggagtaaatggagtggaggtagttgaaaaggttggagatggtagggatgaagaagaaatattggcagtggctggcagtgttgagaatcatggtggagccgagcctcctgttcaccaagaggctgagaactggttcatgaacgaagatgagatcgatagagaatctgcaacaactttttcagaaaaaataggggagtcggcatcggagaactcagtagctccggggatcatggtggccggtgctcattcagggaagattttaatgggcagaaacgattttgtgactatcgagactgattttcatgcgcagattaatggtgtggaggcggttggtattttcaaaaagaaatcacaagaatctatgggaatgataactattcatagtatttttaggaggctggtgagggacctagaagggccacgtgttaggttgtccttcatacctagtacttttattaatttaaagtacatgtggcagctatatgaagatgatatctttattaaaatgggccaggatagtattgtacctgaggtgggccgaatatatgctggggagaggcccaagattaattatttggagggggtagggccaaaggaaggcttgggacagattgttagtgggccggttggtgtggctgcccctttattgggattggaggtgttgagcagtgacatgggtcacccaaattacagacatttgggcccatatacaattttactggataaaagggcagttcgggtgcccttagcagatcaatcaaaagctgccttgaatgagctaaatgtaatttttgaaggcattctcaagaaagttagaccgaagagaagagaggattttaaaaatacaactattaatttatgggaagacttcatggctacaggaagacttatttcaaactcagtattacaagcatcagaaaaagttttacttggggaggaaattattagcaaaaaaatgctgaaagtatacattagcaaaagaaaattcatttcttctggcagcgttgatgtaatggagcagataggtggggaagatcaccttgaggagttggacaaggatgaagacccaagtgtggaagcaattaacaaattcagctcagaagatgacaattcggaagaggaagatggttcttgtactgaagaggaagacgaagaagaagaagtagaagaagaagaagcggaagaaaatgaagatattttatgtcatatcaaggagctttggcaagaggatgatagatttaaaggtgattcagagcctcatgagctagttactgagcaagcaagaatggaaatggccgatccagacgagagagataatttgttgttttctgaatcggagctagttgaatccatggcagaactgggcatgaatctaatacttaaagaaaaggaagagaatcaaaagaatcagtgttccaaaggtggaaggaagagcaatagagagcttaaaaatttgacctttaacataaattatgagaaaggtcagaaatcagaggggcttccaaaaagatcaatatga

SEQ ID NO: 29673 - DNA, 1156 bp, Cannabis sativa
gtcgagaagttacttaaatttatgttaaaggttacaactatatatggtgaattgcatgaaaattttgggagagttgtctctaatttcaaaatcgtgattgtgaagataacaatgagagtttagaaccgatcgatgcaaagtgactaaaatatagtgaagcgtctgttataaactgatgcaaaaattcttcaccagtcaattatgtcgtgttgaccaacacaaaaaattcagtttgtagatattaatgggttattattaactatatatatataaatatatagcatatatttatttattcaaattaagtatatacatatgtttgaatgattcatgatcagcaaaatgtacacctatatatccttttatatgtatatagtaaaaaaaagcaaattaaggcatatctattagaatcctcaaccaaacaacgtcctttaaatttgattctattatttgtatacatatatagctttttgaacgatatgatcatgactggtcaatatatatatatgcacgtacatacgtaaataaaataaaattacatttatatatgttgttagtggggaaggaatttatacgatctttcaacaaatatataacctaataattccaatttttgcaaatatgcatcgtccaactccaacaactatttttctttttccgaaaaagaaacttcatatatatatactttatatagaatatatatattccaccatgtacgtaattctattcattattaattagtagtatatataactggtgatcattttgtaaaaataaaaattatgagatatatatgcatgcatagtactgaaaaatgtacaaaattcaaagatttacattatttgttgtaccctatcatcaatatatataattttataaataagtacaaaaggtaataatatatagaagaattaatctataatattacaaacatatatgtatatctatcaacaaattaataaaatatgatcatgatctaatatatgaagaggatagtatcaattatatgaaaattattaaaatgtattattagtgtctaatatttttatcagtatcatgtaatgaagtatcaaattttatataataaaaaaatatatatatatatatcatataaaacgtgacttataaaaaatagtagtagacataatattaatgc

SEQ ID NO: 29674 - DNA, 1703 bp, Cannabis sativa
cgaccatagaactcaccgcttattcgctcgtagtggtggtggtgcttaatctcaagttttggagaaccactgctgacctcgaaatttttcaaggaactattcgaagaaccctcagaagatgaactagttgtctggactagatgatggtcttcatagagaagactgagtaagtcttcttcaatctggttgtcacctccccaaaggtcgcgcgagttcatctgtgtaaaaaaggtagaggaaggtgaacaactggacaaaatgaaaagacttagacaagacatgggtcaactaaacttaagggtattagctagacaaccctaatgtacaaagccattaatcaacaaagtacaagattcaagtgtaaaaaattaaacaaacattgagtttaggccaccaattggtcgagatagactctacctaagacttgccatacagagttcctaaaggaatcaagtactagataagagtggaatgggctcaagaagccatacaaagtccttacaaagactaagtatggacaataaaccggccaacctaatgacactaaaccacataccatgaaccgaccaagtatggggttcaaagtaatgaaccggctagggtcgtaaactaaaatcatgaaccagcaagggtcacgaacagaccctgtgtgccggccagaggctcctgagaatcaaaagttctattttcaaaaattgtaacaatgttcttcatgttcttcgtgactcgaagagccaagaatccaaatggagttcaaaatccaatcttttttatcaagaagtcatacattatgcatcataaagctataaagtggattataatgtaaaaaagactacattacaatgtgagaattaaagatttcaaaaagcttgaaaaaacttaaagtcatcaataacagattcaagaaaataatgagaaattgagattttaagacttacccattgatgaagatcgttgtagatgctcagggaatggtcagactgtcgaaagaaattgaaaagcttaagaatttaaggggcttaaagtatcgggtttgaggaggaagatgataaggcttttttctctttttcttacaaagagttcgaaggagagagatatagtgtgaggatgaagtgaaatgaaaatgaaggaaaattgaaccttatataggttctgaaacatttttcccccaaaaaacttaatgggtggttatttctccataaaaataaccatgcaaagtcaaagaagaccaacaattcaaaaataggaaagtgtgcagccaaaacttaaatccccataatgatcataaagatgagtcatctgaagagtcaaatatctaactaggcatatctgcccagttaaggctagagttgaaaagtccttatctatacagatgttcacacaaggacttggggaaaatgtcatcccaatttttgcccacttgacacggcacgtccacataggcaaagctaaggccatgtagaatacaacttatcaatgggtgaacaaagtcaccttgcacgacatgccaattgtcaagggttccaagcagtcaaataagatcaagcaagcaggaaatggacaacaagggaacactggccgaaccacaccctagtcgaccaatgaggtttcatgtgccagccagaccttaagaatagggctggctggccaatgttaggttatttttagtattgattttagattaagtttagtatatttttaat

SEQ ID NO: 29675 - DNA, 1872 bp, Cannabis sativa
gagttcatatttcttgtagccttggtatgctcatggaattgctgaatccatattgcgcactgctaacctttcggttccacttaaagtaagcttcctcttttttttttagcttttcgtcactgcaattttcgccaaaaccttccttgcactaattattatttatttatttttatatatgttgtatcatttcaaagttattctgattataaataatttgttaatattatctttcagtcatactaaataaacagtaaatgcatagtgtttaatttgaccctgcagtttttcaatgtgaactcagatatatgaaattggcggtggatctggaacttgtgctaagggaataatggattacataatgttgaatgcaccacctagaatttacaacaatatgacatacatgtatgtttcttaactttctcttcatgtaccatttttttgttcaattttgatatgcttgagctgacagcagtgaaagaccttacaagattatgtgaacaaattatctcgatactacttgtactgcattttttaactttcaaccattcagtgactttgtgcggtgtctgttttctgtcgttgtgaagacgaaaccagattgtttgtcggtacttaatagatgttatgtgtagtatacatttcgataacaactttcaacattctatttttgttggatattttaaattaacataaccattccatatttaacgtaacacaaaaacgaaacaagtttccttctttacaaaatgtcttaatttttttttaatatatattctggcactgatataaaagcaattatatcttgaatgtcgtagctcagtagaaattagtccctctcttgcggaaaaacaaagagaaactgttggagaagttcgaagtcacttatcaaagtttcgagtagagtgtcgcgatgctgctgataagagtggatggggtatgtatggggcatttttatcagcttcatttcattataacaaatgcccatgaatagcaaaattgaattactttccacacatagtcctctctgttgcacttttcgtaagattattgaaagcggtttagcttttagaagtttataactatgattagttttcttctctaatttgatatgcgggcttattttgtctcaacatttcaaaatttaataggagaagtggagcaacaacaatgttgggtgataatgcttgaggtacactcttgtcttttaaatcaatttactaattgccactaattgttttgttttatattagagcaatgcaagaatctaagcttggagaaaattctttcttttaggagtaatggtgtatcatgctaatatcccataatcaagattatgattttttttttgtttgtaggtacttgataatcttcctcatgatctaatctatgcgaaagatcaagtttcgccttggatggaagtatgggtagaaaagcaaaaggaaaggtaggaaagcatccttgaataacttttctgactttgtttcatttgtaaaattaattgaatatggtgtataatttccatatcagtatttgtagcaaaatttcattaatctgctcttatttgatttgatttgattctgaaagctaatataatatggtggatttgattgaacagtgaatatttatattaggctaattaggatttttgcccatcgaattttgacatatatcgaatcgtgctcccgaactttttagactgttaaaaattctcctcgaactattgagattgttagaatcaaggacttatgtccaattccgttcaattttactgatgtggtgattgtccatgtaccaaatcgtgtcccttgaactttcattcacgtcaggcgtatgctagtaaaattggatggaaatccttaaacccaacaattt

SEQ ID NO: 29676 - DNA, 2917 bp, Cannabis sativa
  modified_base (162)..(166): a, c, t, g, unknown or other
cttatacagtatttttgaaaaaattttgccccacagtaaaaaagtataaaagttagaaattttagtatgtggtgtaaataatctttatttaattagggtcaaattcctctccttttgggccttgtgtgatagttaagggtcaatagaagtgggtacgacatnnnnnacccagccctccctcacatgaataatcccaaatgtgaaggccatttgccttagttgaacaattgtataggttttttttttttttgtgataaaatagcaacttcattaatttagcatttagaatacaaaatatcaagcatagctgctgctgcattggacacagaaatgctacgaccagaaaaggatcgtgaaatcctagcaacaacatgtgctaggtggtttgctgatcgttttacaaaatgaattttgactaaaaggcatagatagcagaagtgagtgacaatcctgaaccaggttcccaaagatggagcaaaaggaagagtgactgcgaatggcttggatagagactaaagtgtttgattcaagttcaacatgttgctatccttggtttttggcctaccttagagcttctttaattcccatgatctctgcaacttcaggggcaaagacactgttattacagtaagctttagcttcaatgagagatcctgaattgttcctggcaacaaaccatatccgtgcttattgtcactagcaaaaatagcagcatcaacattaatcttaattgtatttgtatccaatttagtccaaagctcaactccatcatcaccattaccagagtagatgtaagatagagatgtgttatcatgaacttttagccaatgatcaagagctatacgggctcatgttacgacatttgcaatagtgggcactttgtccttccatacaatagaatttcttactttccacaaagaccaacataccttagttaaagaacatacacgatcatcatcaaggcaattgaaaatactgtttaaccagctagcaaaagagagatcaagtgatacccaagctggaagacccatgttattccaacaagagaaagaaaaactactggaaaggatgatgtgattacaaacaggacagagcaagggaacatcaacgtgttttgtcctgagattgacggaggttggaaggatcccacaagcagcacgctagaggaagtttctaaatttggttcggatcttcagttgccataatttctaccaaaagcctaagttattacttccaattcttggatcatagaagcctggagaatgcggtatgtacttttgacaaagaagtgactagatctgctttcattggaccaagactaaaaattggatgatgtcgataagcttaatggaatgctaagaattaaattggcatctcgttcattgaacatatctcggacaaactcaatatcccacattctttcatcaaccgaaaaaagagaactgacggtttggccaacaagacccacatgagaaaaagttacatagggaatagtgacaccagggagccaaggatggtgcaaaatattgactgaagagcctattccaatagtccgtctacctcccaagtggaccaaggcttgggcacttcatatgcttcgccaaacaaagataggatttcgtcccaaattagccgaaagaaaatcatcatggggaaaatatcgagctttataaatcatagaaaccaaagattctggatgacatagaaacctccagccttgctttgcaagcatatccaaattaaaacaggagatgaaagcctaacccgccttcattctttggacgagagagatggtcctagttcatccaaataatcccattgcctttgctactcgtgcttttctaccaaaaatgagccatcaacttttcaatttcatcacaagtagtggaatgaggaacacactcatagcataagcgggaagagattgaacaacagttttgagaagaatttctttgccaacaccagataacagcttactcgtccaactgtttctgttaatcactttgttcttgagaaaacctagaatagcagttttgtttctcccaatgacatagggagacccaaatagaacagaacaaatattgttacgaaggcgttactaataatcataggttaattacactagtttaacctaataaaatatattagcaacacaattaattttcaaaatacatgaaatttatttttcatcatattattttaaaattaattttaaaaacacacacttagtttaatgatattaattcaagataaactatatgtatttttatgtatttaattaaatagaagaagttataactaattatatttttttagatacttaattatttgaattttcatagaaaatatatttaagttaaaaattaattttttaaattatttttagatcaacttaaattagaatattttgaaattaataattaagtatttttttaggaacttagttactcagatattgtttaaaaatatttttaagttgaaaatttattaattttagatcaatttaaatatggatatttaagttaaaaaccacgataatacgcctaaactagtagggtgttacaccctacctcctcctaagtcgttaaattttgtccaaaagacgatcataagctctcaagtcctgagctctaattattttctcatatcttagatatcactctcacctatactatcaaatgactaaataattattattattgtatttaacttttaaaactgagtccaatgacatataatataactatatttaaagtttaaagttttgaagcctcacctaagcgttgcactttaactatcggtggcggtaaaaattggtgtatcagaaacgtcgccgaaaataaggatagcatatatcaaaatgactacctcaaacgagtagatcacacccatgacaaccatttgtcaaaacagtaca

SEQ ID NO: 29677 - DNA, 3480 bp, Cannabis sativa
taatttgataaaatctctgtaattaataaattacacttaattattcatttaatcacatatttaataaaatatgtccaaattaatataatcataatttctagaatattacattaatgatctgagaatatttagggttatttctataatctgccatcacttaaagaaagaaaactaataaattaaattaataattgggtaactgaaatgacaggattcatattcttaacctttcatccatagtcaaacacattaaaaattatttcttttattttcttttattttttctatcaattattctccaacattattttggatcaaccaaatagaaacataaatctaattaagtagtagtcaattttaattttccgtagttcgaccttacctgtgtgagtaaatacttgcaatagatacgtacacttgcgtaatttataatttttagtaacaaccctcatcgtcagtgactagtttgaatattcaaaacccgcaagaagctcaatgatggttacaaacccacaaaaatagcatgatatctccatgaaaatcggatttcaactacctccaaaaataaaggagaggattaagatagctctgcattggtcgtgtctcttgaagcgagaagcaccgacctttttccccatataattaggggttagacattacgtgggaaagggatccgaaaaaaagtcaaacacttagagagcagaaactctgccatttttattccttgcactcaagagcttgttcttgactttgcaacttcggttaataagacacaaggggagtaggctattatcgatatctggggccaaacctctttaaatatcggtatcattatttacatttattattaaaattttggtttaaatctcatttattacaactcgatgttggttggctaaaaatccagtcaatatatatctatcttttataaaatttggctatgtaataaaatttttggtttaatgatattttttaattttttacgttaattttaacagaatattccttattaattttataatactattatatggaggatgtttcaatgattacatcaaatatgtaataattatggttacatttatttttagtcattggattactatttaatggttgtgattaattagtttagaaattaaaataaataaataacttgtaacttgacagtaacctgatactttattttcgtataaaatcttaattaaaattaaattactaataattattaatttattttttgcaatttaatactaaataagaatcttttagaaattaatttgtttcacttaaattattgaattatttgtaataaaacttttaataattcaaaattattacacccataactttaattaataaaaaatagtaagaatgacctctaattaaatgtaattctacactcaatattattataaatactttaagtgctaaataagtgtgtcgtaattagtttaagtgatttaattttttaaaaaaaaaataaaaaataaaatataataacaattataaaatgaaagataatttttttaccgcactcaacacaactgtacttcattccaccatctgtcatgtagttttattttcttagagaggcaaagctgctttattcttccttctttgcagttttatatatattgtatatgtatcaattgatcggagtgaaataataaaaaaagaaaaaattgtaaatgtttgaaaattattaatccttatttgatcttgaatatagattattgaaaggttggaaagttattaatgttatcagttattgatttggattacatattattaaaaaagtttaaaaattaataattgttattagttattgatcttgaatatgtattattgaaaatttgaaagttattaattgttattggttataaatcttgaatgttcttgataaacttagcaagaaggggtagaagtttaatttttataaaataataaaattttattatatatattataattaaatggattaactgttaaaaaaaatataatagagacttaaatatgaaaataaaattattgatataaatttataaaaagggtcttattaaatatttaaattaaagattaattattttaataaaatagttaattattagttatttaattctaaataagaaatttttatatgttggtaacctgctattacaagtcaacaaaaatattgtaagcattattgttacaataaaaatgtaaccattaagtagtcacctgttgccccggatttttcccaaaatacgtggtcacagctacgtatgacacgtgaaccaaaaggacacctcacccgagaatcagctgagtcgtatacagacgaacgagtgtagttcggagagtgagcccccggagaagtacaaaaagcatgttcatcctctccgggagctagagatatgataaagcatctccaagaggaggaggaggacatattcgaacaatcacctcgcatataatgcaacatggggaaagcgtctaggaacgcccataagaggacatgtcagacaacgtaagcctcacttactgtgattacacgataatcaaaggagttagtgacggctccattatgaagaatcacatcaatcaaggaaggataaagatcaatctcacctaatccctaagatacctacaatgtaggttatgcatgccctattttgtatcttttgggaacttgtgctcctacattgctggcactcaaagacaagttatcccttttgaaccatccttatcaatctctataaatactcatgagaaaaatgggaaggggatcgatcgaagagagagaaagagagagaaaaactcactaagaacattctctgtataagaactctcattaataacaacgactcgtggactacggctcattaatgcccgaaccacgtaaaaatcatctgcattaattattccaaaagctttcatcattatctcatttaattggttgtcgaaaacctcggtcaacatcacccatatatatttaaaaataaaaattatgtagatattttatatatatattttttaattttcttatatatatttaaaaataaaaattatatagatattttatttaaagactttttaatttaaattaaaaatacttaaaatattgtagataattttaactatatttgtaactaaaattgatttaattttgaattaaaataaaaagaaaaattatgtaaatattttatataaaaaatattaatttaaatttaaaatacttaaaatattgtaaatatttttaacactatattaatttaagtttgaattaaaataattaactatatttttaactttattagtttaagtttgaattaaaataaaagacaactccgcttaagcgactacacaattattcatcacgatatttttaaagattaaaatctcaaatcttattttaaaaattaaaaaatatatatatatattacctaattaaaaaaaattaaatatatatatatatttatatctattgtatataaagtg

SEQ ID NO: 29678 - DNA, 5293 bp, Cannabis sativa
ttattttcaatccttagtattaattttcaataaatattataaatattacttaatttaagttggtttaaaattaaataaataattaattttgaactcaaaattaattttatatatatacttgattaaatttgaaattcaatgtatgtaaaatatattttgaaattactcattaaaataaaataaaataaatttcaaaaaaatattctaatttatattgatctaaaattaattaaataattttcaacataaatataatttttctatttaattaaatctcttaacaaaaatatctaatatttaagtatcttgaacaaatcaacttaaatattaattttcaatttaatcaatacatttagaaaaattttaaaagtctacttaaaaaataactattgttaacgcagatttttgttaacaattttgagcctatttttgtaataaagttaacataggaattaaaagaaatttaagaaaactaatagaaataaaaatcacacgaggcttttatgtggtttgtagttaactctgcatagtccatgagactatcttatttagatatttctaggtacaaaattagggtttttagagtcagttaactccttttttctttaagatttttctctccctttttttcgtataatatgcccctatttatagtaatataggttcgcagttaattacatttgaattcgaatcccataacaatattcctcgaagttgtgggctttaaatacgctccattttagtacgtgtaaatatcattagaaaatcacccagctatgatttaaaccatctttaaggcagtcaatgctgacatggataggaactccctttcagaggtatcatgttggaagtatgttgccttgtatatagatgacttgattcattcatataccttccagcaatggcatgagcaccagcgtactgagcaaacttaagaactactttttgactataaggccttgtaaactggacaatcatgtccttcaagttattacactttattattattacgtatattatacgctaagtgttctaataaccaatttacctggttaattcctctttacctacaccaaggtagatgcctcgctatgcgttatttatagctccttcggtattatgccttccaagacaagatgatttctcatcaatacatgaattgatagtttgtatatccttctcttgcttaatactatacattcaacgagttacaaatatactctattaattatgcatttaatgagttattccattttggatttaatgatataattaccattatatttgttgatacatattctgtgaaattgacacgtgtgacctttttaattatagccgaattttgggtataacaatttccccttaaaatgtccttttcaatgaaaagtgctttttaaataattaccgtgggtatttccgtcataatccaatttgaaaatatacatgcttttgaatttgtcgattttatggttttgaggcacatcatttgcattacttaacaatcttttccacttctttcccatttctactcgttggatcttctaccccttaatcctacggtaattgagttcaaagtataaaacgacaaaggagctatttttccaccatttttcccttttcaaaaagttcaatcttttctaagaaatttccatcctgattttctgaaactttgcatgccctcattgtcgttgacatactttctacaaatttcctcaaattcaatctccaatctcaggcgtccccagatttcattctgtcgttcgtctcgaacccaaatacagagttctcccctacacaggcgtagttctttaacaagtaagtatctattctcttccttattggtatatttttagtcgtaactaattgcacaattgtttctcttttgctgggttctggtaaaaaatttatttttttggttaactttttgggtttagaaggagttaaaacttagctttaccatatttataagtttctcgctttaacaaatttcctccaagaattgggattgctctttctataaaaatattccaattttattttgaaatttgttctccagaattcttagaaatagagtgtcctaagaaattggcccttccattcaaaactaaaacacggaaacctcaatctttacttgaaggaaatgatgcaaagattagggaccatataataaaaaccaaccaagacgaagttgctagtccccataggaaatttttgcaagagatatccgagggtaaacattgttttttagcgagacgcagcctagcctgaacctccctttttatcttcaattcctctcccgaaaccaatatttttacgcaaagtcactgttgttttttccccaagtcaccttgaatttgatatcatatcttctaagcctcgtaaatcaaagacctttaacgatcctaatgtcacattcgaggttgaactcatcgaatccaagattaggtctatgtaggcttatgtcgggggcatacttaagtccttccatatcaagcagagaaagggctgtatggtaaggtccgttgctctttgggaattcaattttttcctcctcaaagggtaatttgtgacgagtgcagtggacctaacactagcaattcctcgggcattgttgcttggaggctcaaacaaatcaaggctagggcagtccttccactaagggattacatcaaggaattctgcaaccatctcgaagtttccccctttctgttgaaccccatttcgtataggattctcgcaagtttgaaggtcatatacaacattttaggatgggagtgccccactcctttgcagatagtatatttttactcaattaaggagcttcttacaaggaagcgggctgcaagaggcttttactacctcgacacccacacgaatgattgtaggatcatcgtaaggttgccaaagaagacttcttctagatgacgggcctctctccaataaatacaaccgtcgttcgcatcattcgtaagtaccacttctttttaaatcttaactttgaattgtcttgattttttttttatttttgaggtcgtttattaagcttttgtctgtttacagcagttcctcggagaccagttttggccattgagatggcaaggaagacttcttactaaacaagaagaaccttaggataatcgatcttcttgcctcagatgaatattctgactataaagtacccaagtattcttcgtggcataaggtcccagttttagccgatgaagagagcgaggattacgtggctcgtgcatattatctctagagagtagcccctcaagaagctaaagaaggatcctcctgaggtaatcaatgtggatggtcacccatagtgcttagggctgagcgtaacactctagtgtcattccttgatagtcaatataacttttacacttggaatccctttctcatagatcacataacacatagattcgacagttggtaccctaggtttcatgtacaacttagttgtagtagttcatattatggaatagctgagtaatatgagaccaacatggacagggcaagccatctcgattcgagttgggatttatctccactaaatcctactgatattttcgagatcccagggtctactgagtttagttattattgtagtccttcctcatcatcttttgataactatggtaactttctttaagtgggagtttatcccccatattctccttatttatttttgtttaagtgctaacgtacttcctttgccccgcagacatggatctcaacttggagaatatattaaagagtcctcctttagtcgataacaaatctaagaacagagctgcccaagtcggtgatgcatcaggttctatcaaggaacccaaaaggaccaacaccaaagccaacaagaagaaatcatctggccaacttactatcaaaccagccaagtctcccgagaaggaggtgccagcagtgatgagttccaatgaactacccactaagtcagtgcaccaagtgaagttctctggttctcatctagagatggttcttctcaaaccctcctatcccctgcctctcgaggtcagggcaaaaggttcgcaaatctgctccctgtacgccactaatggttggcatcatttccaaatcatcgggtttggcgactgggagcttgtcacgtgaggcagctcagatgatctcgctaagaggaggtctgaactcatgcatcaggtaagtctctttttctccatattattctcataatgatatttttttttactcctcttgattttcatccttcttggaggcattttttctctcctttgctactcaccataggtcgtcttagtggattgagatgctcgagaatgagcttcgccagactagggagtatagggatactttagccaaaaagtggaataactctgaggctgaggtttctcgcacaaaggaagaggctgaaaagcattgtctggccgaccaaaacaagatcaaggagcttgaggattctatccaatccatccaggccgaccatgacaaaaaactcaaagagctggaggctgaaaccaaggatagggtcaatagcatcaccaggagaaccatttatcagacctggtcggccaagcctgatatggacttcagctttttgggtgaaggagtcgatgccatgcttgccctatgcgacaaaactaggagagaagaacttggaaaggatgaagaggtcgaggtggaacaagaagatttatccaagtctcctaaaatgtaggcttagtttttaatcctctttttttttttttatttaagaaaatggccatatggccgagaaaatggtttgccccttgtggaattttttattgtaaagaaaaatttgcaatgttggatggccaactttgcttttactttatctttttatttatttcctcgcaactttatatttgaacttaatatatttgcttatttctgtttttgctcacaacttaaacaattgtaagtaagcatttctactaatcttgtttctccgtcgatatcgcttaagtagttaataatctgctatgcatgcgagcagttatcgtttgccatggattctattcgcgagcaatttgttagttctactttccataaatagtcataatctgctatatgcaaacttaaacatactttaaataaataattcatcttgtgaattactttgtacatttttgattgcttatatgaatagttaggccttctattcatatcctaggttaagtattatcttttcaaggcatcttggtgcctccttcataatacattcctataaaatgtgagtcgttatatattcagctttgcatgtagctta

SEQ ID NO: 29679 - DNA, 2584 bp, Cannabis sativa
aatactattgcaatggcatgcacaaactacttagaggagctccaataccaatgtttaggcattgtacgtttgacagaaataaagctatttcaaatagtggcttgatcagtggagtgaatttggaactattgctcctgcccagtatcatggtcttgaatatattttttttactttttttttttaaaaaaataaatacttattaacatattcaagtataaataataatatattagacaataatagtaaatttagagttatttaacattagagttaattttagaatgaaatttgctaaaatgatgtggatgagggcaggggcggacccacatgcccccctaaaagaaaaaatcgggaaaaaaatgtatatgtatgacaaataggttagagggtaaaggttcaaatcccactaactacactttatatttttctttttaaatttatttatgccctccctccttttacaataaaaaattacgccccctcactttaaattctgggtccgccactggatgaggaaattgaatgatgtgaaatactttggcaacttctagtgttgctagtattagtgatgctcttagcgtttacgatatacttagagctagatacatggataaacacaccagctcccatatccaatccagatttgtacaggcacgtctttctcctctttcccccttattatgttttttgtttgagaaatagaaactacacagtttggtcccattttgctgagaaaatgttcaccaatcacaaagctcataatcaaagccttggaaggcgcctattatttcatgtctacattcaggtaattaaatcattgatttctattattaaatcatgaataatatagaagctttatttacatgtaacttgtacaatattgtacactgtcagaacaaagattgaattggtcttccaaatccaatgattgatcctgtcattctcaatactcaatactaaaacttgagacctttgtgaacatggctagctaatagcctaataatttgttactaatggacaagcatgttacagggaaatctagtgttgaaggatttctttcattattggtatagaaattataaaaagatttctactgcaaatatttcaagtaacacccttgaaattccattctattgggctagcctacaataatagggacattgttgctatttctttggtagtgaagcttatagttcgccaaaacttagaagaagttgaggtgtaatgattggattcatagctgatagtagagagtagtgttagaccattgatctccaattgaaaaatgtgctaaattaattaacacatacaagtaaaaaaaataaaacttgtacggacatataagtaaatattatatctatagcacaaattttaaattgttaattcgaaaactttctttagtgatgtggacatcaatatttgacatgtggcaagaaagataacatctcagagttgagtagtcccgaatcatagcggtcgacctgggagaggtccctagccctgcgcccaggttgactctgggaactccgaaatggatgttcaaattctaataagtcgtttctaactcactatctttcagtattctataccatgaagacttggagcaaccaagactaggaccgggagctgaaaatacacaaatcaacacctcaaaaatcaacctgggcacctaaggtttcacccagcacccagattgacaaccctaactaggatttcaattatgggaccatcttagggcaaatgggtcaaatttttcattgggacatgagctaaacataccacaaacatatttgaggcaacaaaatcagattcaaagaacttttaattttgagcacctggaacacccaatgcctgacacctagcattcgtcaaccagcgccacttccaagtatcagataaaaaatttgactcgtgcatctttttcgtcttcataaaagctgagaaattaagtacttttggagaaaaaacaacccatcctgggtgctaacttaagggaccaacgccactttgacacctgaccctggcctagtgcccaggttgacattttgtcaacctgggccaatttcgaagaatttttttgaaaagtctttcgggcatattctccgttttcatcaaaaatttagattcaactatttataaggaccaaacataatttccaggtagcttaaaactgggtccagcgcccacgttgacatattgtcaacttgggctttttctaattagtttttttagcattttttcgtcattagaaagaacgaagatacaagtaaactcgagaggaaaatcacaatcacatggtcatcaaaactgagcccagcgcccacgttgacaatcaacatggtatgctggtttcaatcattcaaatgttaattttgcttcgagcattctctccgaaatggtcaaaaatattataggagatctcgtcctcaagttctagaaatttggaagtatcaaaacgacatctcaaaagctctgaaataagcacccagctcctaggtagacaaatgtgttagacttttatttgggcttacattaaattttattggttttattaaaacttgggttgattggatagttctttgct

SEQ ID NO: 29680 - DNA, 2077 bp, Cannabis sativa
aaattttatcagaagatttaattaagtatctagaggtataaattaatcaagtgggaaaaaaattgggctcaaaaatctgattgatgcctaatgatagttattataattctagtaatgatcatgtggttctatcctatgatgtgatgtagggtagttaggttgtctcctcatactctttacgatagatttttgtatatatttttgcctgcagaaatgctgcaattcccatttcttctgcaagtagcgaagatagaagttctagagctgatatcgctgcatcttttcaggttgccatatgtatgtttatactgtattatttcgccaagctttcatgaaaaaatcaagattgcattcgtcctttcactttttctcttctttgtctataattgatattgttttgatgcagcgagttgctgtgctacatttagaggaaagatgtcaacgagctattgaatgggctttaaagattgaaccttccattaaacatttggtagtgtgatatgcaattttgtgtttttttgtcttctgtaattttaaaattttatttttccttgagcagattgatgatttcatttttttactctgtttctgtaggtagtttctgggggtgttgcatctaaccagtatgtgcgggctcagcttgatcaggttgttaaaaaaaataacttgcaccttgtgtgccctcctcccagcctttgcaccgacaatggtaattccttttatgcacgttttgacttcacctgtgaatgagatgaccatgagggtttttaccattttacttggatgctttcaaatgaactgaaaagaaaggactaaccaaactttatatgggaacttcatggtgtcctgttattcctcacccttccccataatcatcagttaccagtgaacatgttttttccttttataaaattatgtagaaggcaaaagttcaaacttctatctcaagtatattggttttctattcttttgctttgtttcatccaatttaaaacaaaccaatttgagatttgccatatacatgcatatgtagtactcacccatttctgtgttaaactggacaatgtttatttccctgtcgtaaaacttagtttctcaagtttgtaattgactaggtgtaatggtggcttggaccggcattgagcattttcgtgtgggaagatttgatccagcaccgcctgctgaagaacctgaagattttgtggtttgtttgatccttctagttttcaatgacttaatatttgtcagctttgtcatttgatatttgacaagccgtctcatcttgtgcatttttttgtaaatcagtatgatttgcggccacggtggcctcttggagaggaatatgctgaaggaaaaagtgaagctcgctctttgagaacggcccggatccatccgtctctcacatccattattcaagcatctctacaacagcagccatagtcttctctgcgacatctcctatatgctgagttgctattacacttaatatcagaaaaatcggctccaatccaatctgaacaattagctgaagttgctttgcaaatacattgccagattatagaattagaatttggcatcatggtaagagcaatttgagagaacaatgcccacagtgatacagacagataagacattgaagagtccaactcaagctactatacactaccactaccagagtcctcaaatcaattttctttaaccttgttaataataataataatacagcaacattttttattcgacagcttctgatcgtctcctccgcatctttggatttaaattagtggatagagaaatgatttgaaccacatcgatacgctacctaattttgatcaccaacttgtatccatttaagctttactctagtaaggtattgagtattgatgattgccattcgagagatcttcaatacataatagaaattttttttttattaattatatgtgcacacataatttacacatttgattgaaattaaagatagagtagaaaatactttgtggaatattagagcatgtttggtattgttttttgttttttgttttcaaaaaattgtttttagaaatgagaaaaaaaa

SEQ ID NO: 29681 - DNA, 3886 bp, Cannabis sativa
ttgcacaaggatatgggccgaaggtcacccatcgaagtaggctgtttcttcttcggaatcaaaacaatattcgtgtcatttaggccatcaggaatactgccatccgcaaagaattggaaaacttggttcacaacatcgctcttcactatttcccagtatttctggaagaaacctggggtcataccatcgggactaggagatttatcaggatgcatactaaacagagctcttctaacttcttcctccaaaatcggcctaagtaaagacaaattctgatccacggtaattgaagaagtaatctcctctaccacagttgagtaatcggccacatttgaagtaaataagttattgaaataatcaaccataacatttggcaactcatcctcccaagtaacccagtgacccacatcattcataagccgagttatagtattgtgtttctttctagaagtagctttagcatgaaagtacttactattacaatcaccttgcgacacagtggttcacgaagccaggcattctcaaaacggaattgacgaaatggcaccgtcacagaacgcaccgtcggttcaagaagcagcgggcagtgatctgaagcagatacttccagattatgtagctgagccatatgaaacctctagaaccaattagaacaaacaagagctcgataaagacgaatttcaacccatgaatcaatgcctctcccatgctcttaagtgtaaggatacccgattaactccacatcaacaagatcacagtcaaacaaagcttgattaaacccatccaccagcacctgcggatatctatttcctcctctttgatctgcatgactagtagtgttgtttaaatcaccaatgatacaccaaggaagggaatattttgactttaacgatctcaataaatcccatgttttatacctaacagctctattaggttctccataagccctgttaaacgctaaggaggagaagctacttccgagatctgaatatcaacgtaatgataagaatagataagcagttgcacatcgtcattattacgccaaagcatggccaccccaccactatgtcctctcgcatcaacaaaatacaatccatcaaaccccaccgcaacccgtaacctttccaacttgtccttacgacaaagagtctcacacaaaaacagaaaattgggtttcttttggataataagatccacaaggaattgataaacacgtgggttcccaagcccacgacaattccagctaatgatactcataatggacggtgtgcctggatctcagcacccaccaaaggcccatttttgagcccaaatcttgattaccttcagccacctcaacctccatactactattatccgtctcaactggatcataacacggcccaatagaatgttggcccaccacccgttggcccgattgcaatccatcccttgtgcgcctttttttagaatccaacagcatgatgtcatcattcagatcatcaatatcagtgttcccaccttgatcaacaccaacatgatatcccatattttccttcacaacattcggagaattaaattgaagatatttcccacccgaattgccacaggatcctccaacaacctcctcactcctgggctgctgatgtaacccaaagcagtcgccacaccaccattgaatctgccagcaaacatctcgtctatctcattcccatcacgtaaccactgagaaccctccaggttgtttctccgtcgtggttgagccctcatccaagcaccataaggctttatgatcatctcggttggtgtatcaaaaagcttgggaaaaaatttctcagagtcacctattacaccacagataaaacaaaatgtagggatatattcatatttgaattctgcccagaaaccatcctccaatgcagtccgacggagcttcctggaccttttcaaaggagtagtgatgtccaatgtaacccaacacgcatataatctctccacacattctgaaaattcttaggatcagccttaacatacgtaccaacaaagttacccaaattctccacaacacttacagacttaaaccccggttggagaccatggatttgcacccagatgtcgagcttgtttagcactacccttttcggagcatctcccattcttaacttgtgaaaaacaaactgaactttattaaacgtctaaggacttccctctaccacccttgctaaatcaatttcatggaaaaactgaaatagataacggttggtgtcaagctccttagcataaacccccttacttggctgccacaaagaggccataacatggcgcatagctttgaagtcaatggctcttccagtcaagaaccgacccacaatacataactcaacattcaaaacttgatcatcagggacaagaaagtcaatgcccaactccccatcatcctctcccttaagtgaaatattcgcatattgttcttccatctcctgatacaatgtactactagaagccatggcactttgtatttacttgccataaccctttaatgacacaacaccaactaacgaagccccaccaatgaatctgccccccacaacccagattgcacaaaacggaacccttgcatgcccgaagtcaaccagaccccaggcacaaactccgaccacccacacataacgaacccatacccctgccaaccaaatcgccacctgaaagaacccacacccagtcgcaccccaccccaatcgctccccagaaacccccaaaatcacaccagcaacccagtcgcaccccaagaaaacccaaaaaacccaaaaaccagaagtaaatcgaaaacttgcagaaaactagacgaaaaaaaaaatcaaaccagaatacaaaatcaaacacaaatcaaagacacacacaccatgtcacaatggacaagacattcacacaagaaaatgatgttggagaagacgcagcagatcgcccctgtacaactcaataaccgacgacgaaagcaacaccaatctcacgtgcaaacatcgaagctcctggacgttcacacaccttcctctccgtcgtcaaggcccttgaccattcaaacatcttcgtcagactactgggacgatattaagtctccgctgtcaagtcgctggtatgcgatattaggtttcactcctaggatgatattaggtctccactgtcaagtcgttggtatagatttttctaatgatattaaattttgtttctgttttttaaaaataaaattttaaaaacacaaattttatgtattaaaaaattaaaaacaaaaaaaagtactactaaacgtgcatgagtgttataatgacaaattatactaagttaaaatatgaaaaaaaaaaaaaaaattgtagttgctagaaatagtgaggtcatcgcttagccaatcctccatatataccagtccaattaatatctttaatataataatttaatttgctctatattataaatataaatgatggtgatatggttgagaacgaaatcaataatttgtggaaagtcattcatcgcttcgattccaaatttctttctctttctctttctctatctctatctctatctctatcagctctagaggtagtatatgagtatttatatattaatattgtgttacaatatgtaaaagtcactaaatgacaccaaaatattggattttgattcagcacgaaaggtttggatctatagctttaaccactcacacaagttgttccacttgaatttttcaaaaagaaaaatgtatataaatattttttcttcgaataaaatatgtacgaaattcttacattacattaataattatttattcatgcttattaaatttaggttaataattataattaggtgttgcaattttcatgcatataatatttatgtaagaattgaaaaa

SEQ ID NO: 29682 - DNA, 1531 bp, Cannabis sativa
agagagagagagagagttgaggtttgaaaatgagaggggtatttttgggtttaatgtaaagtggtcatatttttaaaaatttttaaattatcaagagattcacaaagcttatatctcttttttgcagaaaaaatccaaagtgagttggatcaaagatggggattcaaacacagccttctatcatgctagcctaagggataggaggtctcaaaatagaatcagttctattactaatgctagaggtgatagaattgacaaaccagaggagataactgagactttcttggaatactatacacaactgctaggatcaaaaatgttgacaaggaaaaaagtaaagcagacagtgattgcagaggggccagtggtgactaaggagcaagctgattgtttactagctgagtattctagagaagaaataaagcaagctatttttgacattactggatctaagagtcctgaccctgatgggtttggaagctatttcttccaagacaattgggagttgattgtgcctgagatatgtgaagctgttagatcctttctccaaacaggcaacctcctcaaggaaataaattcaacaatcatcactctcattcccaaagtcaagagtcctaatctggtgagtgacttcagaccaatttcatgttgtaatgtgctatataaggttgctaccaagttgatctgttctaggttaaagaacattctccctgttttagtattagttaaacaaggagggttcataaagggtagatatatagcacataatatcatgatttgtcaggacctaattcgaagctatggaaggaaggtagctaagccaaattgcatgatcaagttagatttgcaaaaggcatatgacacattggattgggatttcctagaggaaatgttgtatgctttgtagtttccaagaaaatttattgagttagtcatggtatgtgttaggactccaaggttctctcttatgttcaatggatctacacatggattctttgaagctaagagaggacttcgacagggagatcctatgtcaccactactgtttgttcttggaatggagtatctcaatagaataatgaagaaactaggaaagaaaaaatactttggatatcatgagagatgtgctgaactgggcttaaaccacttaagctttgctgatgacgtgttaatgttctgtagaggggattttaaaagtatctatctaaatgaaagctctcaaattgttctctgcaacatcagggttacagcctaacaatgcaaaatcaacaatctattgtagtggaatgagtgaaaaatgaaattaaaagggtgttagacatgtccagatttgcaagacatcatgatccattcaagtacttgggtgtgcccatctgtgctagaaggatttctacatcagattgcagtggtttagtgcagaaaatgactgctcggatcagagtttggagcaccaagcatttatcctttgctggttggttggtcttggtgaaatctgttttgatgtcaattcatattgttgggttttgtgccc

SEQ ID NO: 29683 - DNA, 3179 bp, Cannabis sativa
tatatttggcagtaactttataattaataaatatttcttcaaaaattaaaaagattttatatttttataataataataataatggtgatcatagttataataaggtaaagaaaattttataacattataggtttttaactttaattgctaatttttgggtcacgagacttggtgatatctatcagtttgatcagtatattaatcattaattttaacaaaatattttagccatttaattccttactatataattagatactatttatggccatttctggtcaagaaaccattctttcagtctgaaaacttctcttattttagaaaattcatgaaccaatcaatttatacaacttttcaatgtatatggacgagaaaatcactataacttttcttcttttccatgcaaattaatttactttaaaataataatatatattgggataccaaaattataaatataaacatatatttagctatagctacattaatagctaactaaattagatgataaaattagagtttcaaattccaataattgtttatttatgtatataataaatttctgattgatagtaacactacatgataatgtagctcatgtttactatatgcatataaaaacctgtagctatataaatatatagatacataaagattcggttatgatcatatgatcaatcaaactattacacatctatcatcgcagtgcagtatactatttagatatttcatatcgctattaatataattaaatatctaattttataaatcttatgttatttaatttaataagtacattatgtaacattagtaattatttacaaagtatcacctttagatagtgctaggcactaatgatgcattaattaataattttattgtttcatttctatttttacaaaccaaaatattataagacacaccttaaggtgtcaagcaagaacatgtgacatgctgatattgatgtatattttaatattaagtctcaaatattttaatttaaggagtcacatattatattttttttgactcttgctagagtttttttttctctcaaaaactgtttgagggttcttgaaggtttttctcgattcttctctgctaggattgccgacactgggttctatatgtgcctggttagagaggctgcttgttttcgccttagttagtactacaattttatgggtaggttttaggattgagagttctcttttcttcattttttggcgctaggtctggtttgggatttctcataagagttcgtcggtcttggttgatggcttggtggcggggcttcgatgactagggatttaggtgggcagaggagtcggtctatcgacactggttcattgggatctcgacagtatatctttagggggatttctgggttgtcacgacctgagccctaggccgtggtaaatatgtaacatccatactgggatggtcaaaggttacactttgacctttataggaaaatattacttataaatgatcttttaatttatatagcaaaatacatatttaaaaataatgaaatatctcctatatctacaaagtaaatattagtaacaaaatcaggacccatcattaatataaaagaataataatatttccactgttataagtcacagaatagataaatttaataagtaaataaacaccacaataatatttagcttccatcattttttttttatttttaactagtacatatgcatagctactttaagtcatccaacatccagatcatccaagcttaaatacaagatcgattttcaatgaaaaatttgataaataggataagactaaactaataacgacttttttcctcaacgatgccatcctaatccactagcttcaaactaagttcctagaatagaagaatatagatggtgaaattataaagtccagtaggaaaataactaatatcaaatgatcattggtttaaataaaaattcttgcatgattaacttttaaaaataaaatatctcatcaccattatcaaaatgtataaataaaatagagagaccacaaataatcacaaaactaagcttcaaatgcttatcacaccgtctcctatacccctaaatgacatcctaaactgggtagttgtgaaccaccaaaatgctggggcttatattcaactcacttcctgtacagattctaggtcttacacttataggtgagtgcaaacctgatttacctatgatgacacagagactagatcgtaaaacgacaatatgcacaagatatgataaatatgcacagcaagagtacatattccctttattttagaaaatggtaacataacatctataaattgatgaaacccaaaaaatcacaacctgcaagataatagtacaaaattatacttgacactttgtgcctccagaacagtctagaaaaacatgcaaattaaatttttaatttttcatacattttattaatcactaaaattagaatatgtcacatgttgtttatcataataaaatcaagtccagtattcaactttgagtccctataccttttccaagccgttaaactttgtctaaaaagacgatcctaagctcttaatcttaagtctcgagttccaatcgttttagtccaaccttagatatcactttcacatatggccatcaaatgactacacaattatcatcattgtattctacattcaaaactgagtctagtgaaatataacatactatatttaaagtttggagctccaaaaataagggtagtgtatatcaaaatgattacattgacgagtaaatcatactcataccaattatttgtcaaaagagtacaaaaaatcactgataagtcaccgaaaatgggtagagatacaaaaatattaccgaaaaaaatatcgagttggttagaatgatttagtgcagaatattgttctcctcagcgagctgaatctagtggtgaaaacgactcatcaaacggaacatccgggaaggtggcccaaaatccattcaaagtttgaacctccaaattttgacttacatttctggttaacaacggtgaaagggatggcgacactcgggagttgaggtcgtcggcccctggggatttgaatgtcccgacacgtggtttcagatggtgacatgggttgtcgccgttggtggtagttgtgggtttttctttggtatttgaagagagagagagagaga

SEQ ID NO: 29684 - DNA, 1816 bp, Cannabis sativa
ttgtaggcacgatttttgtcatgctagtggaccttttttcttgtagtggggactgctaagttggccatatcatatatttaaatatctaattaataacatgaaaaacagagaattagggtttgaatacatgaataataaaattagaaataaattatcatatatctctattaatgtaattaaatatattaaattttacataatttaatttaataattaattattataaaatatcactattaaccatttacaaaacatcacttgtagacataatattattaaacaccactaatacctaattataacactgaatcaatgtccatttagagatagaaagaaataggattataaattaaaatataattaatggtgtggtgaggtgagaatgagattttcaaatatggaaagacttgactttattatttgtataataaaacaaagaaacgtacgtgtttgaatagtagaccaccactcaactgatgcagctacagcatgcacatatatatatatcatatatactatatatatagtatatacgtgtgcatgtcaaactcaatcaaaaccctacatattatgcctaattaatccctatgtatatcataatctctactctaatctcttataatcattaattcattaaaattataattcagagaataatcaataataataagtaatttacggtataaatatctaactttaactctcagttaaaaataaatacttaaatttaatttttggaggtaataatacttaaattatatttctatcactctaactagatacttgaccgctaaatgttaaattattatctacatgtcatttttttattaatatatttaaactatttttaaaaaaaaaattgatgacttagaccaatcaaaaattgccacgtgacaacatatttaatatttaatatccaagtgcttacagaaattttaaattataatttaagtattattactgtcaaaaattaatcttaaatatttatttataactaaaaattaaattaaatatttatcccataaattactcatcatccgttctatactagttactattaatgtagggaaggaagagctatatatgataattagacatgtgttaataatataatgatctatctgtcaaaaagttggatgaattgtatatgttagaaaatttataaatgcatttagaacactatgagaaatttaatgatgtaaaaaatttatatgatgctcgaaataataaagatcggtagtataatactaacttactaagacaatatgtatttgtagagttagaaataaagtatggtaacaaaatcctagttgaatttggtctcctcatcaaaagcttcaattaacttgaaaaattcacacttctgtttcaactatagacttcacacagatgtgaagcatatattaatatatatatatttactacaagaaacaagccaatctcagcaggcccgggcccctgttattgttctatttcagtaggcgcaaaccgccgtgaatttgaataccgacattgagaaagggtcattctcgacaagctagactcgtcgagatatataagcaatcttggcgggccaacccctcaaaatatgtgagtaatctctcggagggctaggtacccctcgtgataggttatttttttattaaaaaaaattacagaaattaaaatttacttattgctgccaatattatatatacatttttattactttcatctaaactttagaccataataatacatcaaaaaaatagatattttaccgtaaatatataaaattctgttttcgtacaaaattgtgttttgtaattttttgtgt

SEQ ID NO: 29685 - DNA, 1975 bp, Cannabis sativa
  modified_base (1254)..(1264): a, c, t, g, unknown or other
aggaagtatttttgagtatggagcggcttgttagtccttactcgtcggatgtcacagcctcaagtttcgaagtaaagtcttcaatttcctccttcatttgagcagcatgtccctttccctttgtagagtctcggggtctggtatcatgaaagcgatgaggggagtttggtggaggagtcttgttggctctcttggtattgtccagtcgctatacattaagtggagggcccattggttggcgtccatgagtttgagtcctttcagactcttgctcgaagtttgcttccccctggggagcctcagcacctgttgtttgcttagtactttcacggttaccaagcatggtagtagtgttctgtgcattaagggtttctccttgattactaattcccacgtggctagttgcccaacgaggaatctcttttaccaactcggaaagacccctgcgggagggtagtctcgctactagagtgatagacttctctaatccgttgagataggttagctctctattgctcctactcaacttgttgcctttagatgttttgccaattttccacgaaccagctttaaaactgcttgtgttgtttgtcaacaaagtctcgtacttattgttgtagatcagccttagtttagctaagttgttcaacccgaggatcaacctcctcatggtcttttatttccacgtgggaatctccaggtggaatttgctcgtcagttctagtactaagagtatttggtggccttgggggacgagctatggagctggttcgggggcctccacttggcacctaagatgcaagagtagtctcagttctagcttcagtaactagtgttcccccagttgtctggccagttgctggggctcctttatcaacacttgaggagcgtgttgcaaccatcttgtaagagattttcttgagttgtggctctcaatgaaagcacttaaatattgactcagaaatatggacacaaacttccaagccacacatgctcgctatattggtaagaatgtaatatatgttaagtatagatagagagatataacaatttatagtagttcactccctgtgtcgctatagtaatgaagctacgtctacttcgagtttttattctcaatatatggattacagaaaaatggctaaatctatatgctctaatttctatagatagaaactagagagagatgctctgaccttatgactatttttatgaacttcaaaaatgagttagaggagctctccttttataggnnnnnnnnnnntattaaatgtgaataaaataatccaaaaaatatagaaaaatacatttaggataatttttttactgtagatcatgatctaacgacaaaaattagtatatgaggttaatcgtcaatttttagagttcgagttgcgacaacatgacccgctctgggtaagttgtagcttaaatttgtaactcccttgtggatgaaatttagagtcgatagctttagattttcgattgaagtgtgagacataacttgatagatcattgaaatagcttcaaaatgcaggttgaatcgtgttaatcgaattaatattgagtgagttatgaccactttactgaaggttgttttgggcccagcgttcaggttgacatcccagcgctcaggttgacatctatcgcccatgctgacatgtgatgtctacgtggatgttgggtgagtgagaaaacgtattagagatgtatttttgaatgcctaagtgatattttgacatcagttagtccatttatgtattttggcaaaactggtcactagttctcgaagatgttgctattctgcaaaaacaagagactcgaaattacccgattgtaaattacattgtcgaaaaagtgaaaatatgataaatttgactgttttgacttcatagatcttaattattatgaaaaattagatgaattgtcagaattagaattattttgatactaatttccactcaaaatactaaat

SEQ ID NO: 29686 - DNA, 6656 bp, Cannabis sativa
  modified_base (26)..(35): a, c, t, g, unknown or other
  modified_base (1592)..(1622): a, c, t, g, unknown or other
aataattacatcttaataaaatatannnnnnnnnntttataaatttatttacgtaaaattaataactttattccaaattataatacacatataaatattatatttattctaaaataattctattatgatataatattaattactgttacattaatatattttagtattttattattttttttctagtgtaactttatttagttataacctcttaattagaatataatttgtttggttccaagtgtatacttagatagaggttctactgtatataaaaatacgtacactactttgtagattagacgccataataaatattcaaaaagccataataaatatactcagttaaaatatcattttatctaacttacaaataagaagaaattacaaattttatgggtttttatacaatctttgtaataatatgcttttttttttttaaaaaaaaataaataaataattttaggaaaagttcaataaaaagtagaaaaaaaaaatatggaaaaaaacatgtaagggttacccttaagtaattagagaagtaaccagttaccttatattatattttgtacattttttaaactatttttcaaattttatacaaaaaaaaaatcacattttaaaaaacttgtatcttaaaaaccataaaaattacatattgcaaattttacaagttcttatacaatttgtgcaaaatatggttctttaaaaaaacaaagaattattttatggggaaaatttgatttttttttttaaactatgataaaaatatgtaagggtaatcttacctttagggtacccagagaagtaaattgtcacccaggtaccttatactattttctttattttttgtttaatttttccataaaatatttttttttttaaaaaaaacaatatttttgcgtacttgtactttaaaactcattgaaataaaaattggaatatttacacaaaatactattttttgtaaaatttttacatttttacgtttaaagattttttattttatatttttacagtgtttataaaataacatgaatataataagaaaatcacataaaagtaacagaaaaataacatccaaacaacgacaaaataacaacaaaaataacatacaaataacaaaaaaaaaaaccaacaataaattaacaagagtataacataagaaaacatcaaaagactatattttctgtaataaaaatcgtaaaaatatttaaaatttcgtacaacattatttttgtaatttttatatatttgtgagataatctcaaaaaaatttcctatttcatgtaatttccctcaatttgtattggcccattttcaacaattcatttcgccgaaaagcctgcgtgggtgtgcgtatgatttggtaaccaaaaccagccacacgatggcccaagaaagcaaaaactgggccaaatatcataagcgtccgggcttgaattgaaacaatgttaaaattaaaaagtgaaagattatttataaatgaatatgtacatcattacaaaaagaatatatatacattgctatgcatataaatgttatttattaaggcagtcatagctacttactactactattattattattannnnnnnnnnnnnnnnnnnnnnnnnnnnnnntattattattattattattcaatattattacaattttaacagcttggatattatagaaattttttacaatgcatcttataaaaggggtttatcgatgcaccctattgatctcagatttagctaaccgacatcgaaatcgaattcaatgctcatgattgccacgtgttatacaattagaacaataatgtaaatatgcacaaaattttatagaggtttggccctcttagttggtgggtaatgacctactctccttttagttgtattgataccgagagataatactacttagatcactatagtaatggatctgaagtagctctcttaaggttacaatgtaagaattagagttggcaaatctcaagtaagagaagagtagtgggcgtgtgtgtgagaaagagataagttatcagacttggagcttagggtttagacttaatgacttagggttttagggtttgactaaggctctttatacaggagagcttgcaccgttcaaatcccttagaaataggtaaaataagctattatttacatgttaaattaataaaatacaaatgactaaaagacccctcaaaaatagatattttccctctatttttgtgggctgttaaggcccaattcgtggtttggcttgttgtccacttatgaaagttgcacaccaaaatctcatcaagtgaaaggctggtcgggcatgtacctttagagtgcatgttggccgaccatgagatgttcagaagctggccgacctatgttggccatagggccggctaagggtggccgaccaacccccttgaggtgcttggttcgtcacttcgtcatctcgcttgagtactcaaatccctcgttggttgaaatgatgagtagttagcttgaccctcttgttggcgagctgtactgccacgtcaggtgggcaaaaattaggataacatttgcctccaagttcttgtgctgacgtctacgcgaatatggactttccagcttagttgggactgatgtaggccccccagactgctggttgtcgagatttggctgttctcgccactacatctttgtggcaagacttgtcctcttttaggtaggagaaggcatgtcctggttcttgaggaacctggttggacaatctgttggtagaccctccttgatctgtcgactagtcttcctttgaggagatttctgatgagatcttggcctctcccagcagttctctcattgaacttccttatcaggttgctagcttctctattacggcggtctagctctgcttggtgagatcgaaggatgtactcttggttatccatccacctcagaaatttgtgtctctattgtgtgaatgcatcgcagccaatagcgcgtggttctttaatttgatcaatttggtagacatcttctcttatctggccaattcgatgtcttctctcaagtctacatggggcataccaatggctgggtcatcaattcttggccccgtctctccaatataatagcggggaccatatcaagttacagtgcctaggggttgatccacgcgggttcttccctcaccaggaggcgccggtggagggtcttccttaggcagaataggttgattattcagacccacatgaacggttgtgtcgtcctggccaggttcgtggtgcctgccgaggtggcaagagtggccatatctgttggatttgtggagattctagttgtgactggaacatgcaccttaggattagcattcatggggtcttgaggaagacccgatgaggccaaaattgtggctagagtcctctttgtgttaaccacggcgtttgatcagacaaattaacatctcgctctcaatgaaagcactaaattgttgacctcaaatctggccaaccaacatcgaaattgaatttaattctgatgcttgccacgttacacaattagaacacaataaagtaaatagatacaaaattttatagaggtttgaccctcttagttagcgggtaatgacctactctccttttagttgcattaataccgagagataatactacttagatcactatagtaatgagatctaaagtagctctcttaaggttacaatgtaggaattagagttggcaaatctcaagtaagagaagagaaatgggtgataagttatcaaacttaaagcttaaggtttagactacttagggttttaagattagactaagactctttatataggagagctttcacccttcaaatccttttgaaatagttgaaataagctattattggcatgttaaattaataaaatacaaatgactaaaatgcctctcgaagatggatatttttttctctatatttgtgggctataatggcccaattcgtggtcagtcttactgtccacgtataaaacctgcacaccaaaatcctgttagaccaaaggttggtcagccatgcacctgttgagtgcatgttggccagcaatgagatgttcagaagctaaccgacctatgctggccatagggcggggaggccagggtggtcggccatcccctttgaggtagctggttcgtcactttgtcgtcccgcctgagtactcggacctctcgttggttgaagtgctgagtagatggtttggccctattgttggagagctgtactgctacttcaagtgggtaaaaatcggataacataccccttataatgttttgacatttgaaaaaaaaaatagtttactttttttttttttcatatttgtctatgttgtagttatttagaacattttgcaaaattttaagaaatttagaaaaagttaacacatcaaaaaataaggtttaaacaatctatttcacatgctataaaataaaaagagtcttgcgtctgtttaaatcctgtttttctcgtgttaaatttttctaaatcatttaaaaatttgtaacatatcttaaataactagaacgtagacgactatgaaaaaatcaaactaaaaaagtttctcaaatatcgaaatagttaagggtgcatcaaactctttgtaagtggctacatttgtagaagtttcccatattatatcttgttatttttgattctttaaagacccttaatatggcaaagaaaaaaagaaattatttattcaaccatgtcataatcttaatagaaagtggaggtcatgaatcacgataggaaggttataattgtttttccttttaaaaattcttgggtagctactctaggaagaagtgaagagaaagaccagccacagcacaccgctctatctcttgtcatttcaaccttaattaaagccattgtatgtatctagctaactaattaaacttgtgcctccaaagtttgctatctttctttgttatgtctttccctgcctgccactttgatttctactcgactttcccaacatgcatatacaattcttatccacaattatttcacattcatcattaagtatatatacatataattaaatcatgtaggcaaagtcgagtagaaagactcgtacattatcttcacctaaatggcttttggttttgagttttattttgaataaattaggtcattactattcatttagaattttaaataataataataataatgatgtaatttattcaaaataaaattcaactctaaagtagtgtttgattaggaaaaataaaaatataagaatatgaataagaataaaaataagaatatgtataaaatggaataatatttataatacataaaaaaattgataaaaaaatcattacattttttctcatgttacataggtctttttttctatttcaaaatgaaatagtcattatatttcaccaaaatcgtcgaaagggcattccattgaaatgatatttcaatattttaaaatgcaaccaaacaaaagaatagaatgaaaattatttcatttttatttcaataactccaatcaaacaccacctaaaagtcatttaggttatgatattgtataagtcttttccaaataaataaataaataaatagtctttaactataactttggatatatctttctagattagttctttcacaattgcccagaaagataaatttttcatcatcacttgacttttagttttaaaaataatcgctcatagttatacttacataataaatgtcacaaaattttacttcctacgacgtttatttaggtacaataaatcctttataaaacaaaccgtagtcaaagacatgtgagtgtctcttttctttacttaaaacttttttatatttagcatgagaattaagcttatatgttggtacttcatcaaaaaaaaaaaaaagcttatatgttggtagatgtaactgaagcataaacttaaatgaacaaaataaacaaagttcataagggaatataacatattaagttcaaataatgacaaatctcatatcaagatactaaatataccattaatattaaatttttggacaattatattaactgacggtactcttgttgtagcaattaaatattgacaataaatctggtcaaacaattagtctatttttgaattgtacatattgtttgtatgaaataactttataattgttacatatttatcaccacatgtatgtgtgcaattaaattaagtatcaacttttcttttggattgatcaatatttatatgaataacacacatatagacacactacaagaaaacctacttttactggcgcaaaaaatcctgtcgataaaagtaaactaaatgcgtcggcaaaattttgctggcgcaattatacaccggcaaaagaggtctgcgaagcttggtcggtaaaggagtttttaccggtgcacaggtaaaatgcgccagtaaaagcttgttttaccagcgaaaaattgcaccggcacagcttaaatgccgacataaacagatactcttatccgctttgaacctgctttgatatagtttagtcggcgcattaatgcaccggtaaaaggttcacccctaaacaagatgtattgaactcataattcattagagactttttatgaatgtcaactaagtatcgtaagtaaattgctcccgattgttcaatcatttgataaccaga

SEQ ID NO: 29687 - DNA, 1730 bp, Cannabis sativa
tatatatatatatttatagatttatataaataataaaaaaatgttatctgtattataattaagattattatatattggaacagtttttatggttagatcggtcgactgacagggatatgcatatggataacttgatatgtacaatacatataaataatttatatatatatggttttttaatcactacacatatattatattatcacttgcatatttgtgtaatttttgcatttgtgctcctagtataatttttgtatttatcaatttttttaatgcaaatcttttatatatatttaatatttttattttaactttaccccaaactgctaacaaaatttttgatgagtccacaactattaatttatatagtattatatgggtatggggttgcatccccttatccaaaataataataaataaaataatcacattaaaaaattcaatattttatttttatttaataataataataataaacctatataaattttttaaaagtgattacaaattttgtttaaattaaatataaatatttctgtaagacttaattagtttccgcacagtaaaatttttaggtccgtcactataaacagcgtatatataaatagagtacatggaggagcaattgtgtatggaaatatgaagagatgtgttgtattgttccctttgttttatgattaaattattgaatgtttcctttgcacacaacaaagtttgtctactcacacaaggtgtggttgaggttgcaaattaacatggtctcattcatatatataaatagtactgaataattatatgtatattatccatttattatatatacatatatatctcaatttacattttttttttcataaaaaaatctcataatattttatataggaaacaatgcaatactaccctacaacattaatcatgattaattaattaagtacttaatcccatgtcatgaaaaaatctattattatatgtatgtgcatgtattatgtacgtacgtagctttgcatgcatgcatagacgtattatttagtgcaaatattttaagacttgcttttgatacacactacccattaattataatattatattaatcatttaacatcttataatataatagatgtgaaattaattaaatagatcgattattatacatcttataatatatattatatgctctcctttcctctccaaacccatattataaacatatacgtacatcattaatttagaaatttaaggttgcgtttggtaatatttttacaattaattttatgtttttttaattagaaaaataaaaatattttccaaagctttgttttataaagctgttttaactttttaatattttaattgagaattaaaattttaaaaattttgaaaacaaaaatataaatttttctaactgtcttttttttcttaatcaatattttagacttcgagaggtactcaacttggatcttaggacccgcactctggcactagtactcccggactcagactacggccccgacttaaataaaatcaaaaaataaaaatgaaaatgaaaatcatagaatacatttttcttttctattttttttaaagaaaaactagtggttataagtacatttttattttttaaaataaaattttaaaaatacaaatttactttcatttttatgattaaaaaattaaaaaaacaaaaatattatcaaatgtcccttaaacaaataaatatttaagagtcaaat

SEQ ID NO: 29688 - DNA, 1332 bp, Cannabis sativa
ttttttttatcaaatttataaacatatccatttgtacatacacaaatacacaatataattaactatatcttatctttggcctattattaattggtcatgacaaaataagattagaaaggatgaccaaatgtatacacatatgaaaatccaatgttcaaaggccaataagtagatttcataatttatgtgtaaatatataatatatgtatgtgttgaaactctctatatgtgtatcatatatatatatatatatacatttatatagatattgacatattgatatatagagaggtccacgtaaccgtctaataagaagagcactttgggtgtgtagtgaaagtgaaaattataagagtattattattgagtattattagtactttaacactttttgtagatggtgttttattatttattagcaatattcttttaaaattatatgacacctgaaatttaattacactaataataatattataacagtaaaaaaaaagtactaggaaatggtatgttttagcatatttctcgaattataattataattaggtatacgtaccaagtggaataatgttgagcgtcaatggaagagtgagtagagattttctgccatacttgtctgacaagttccctatcaaaggtgtcatcaccatcattcccacccctatcatctgttatcatcactaatttattaattattatcatataatagaaatgttgtgttgaaataaataactgtcatatatggtacattatttttaaatattgtacctatatatacttttctataaatcatttatttgtttctaactagtgttaattataatcacatatgacaactttttacttaattggttcaaaattaaaatattagatttttttcttcctattttataatatttgatatacttataatattatctttgtaaatttttaaatagtttacagcactgaaaacaaaatttctcatattacttcagtttacagcacgtgtttgaaaaaaattcacatgtttatggcaatgtaaattatttgaaattttttaaaaatttacgaggatgatattagagcatctaatggtctactatttcaccaaattggtgtggaatcttcacacaatttcgctccaatggtataccaaattgtacaccaaattaatgtacaccaaattctacaccattaatagtgttggattttgaatctacaccaatttggtgttaaacttgtcttttgcattatatataacccttgttttaatttcttgtaaaaaataatcttacattttagttctcaaataaaaatttattacaaatataataattgatttaattaaaa

SEQ ID NO: 29689 - DNA, 2134 bp, Cannabis sativa
cccgaaactaattgtgtttgtttttttgtaggcaaacttgaggcttatagtgctgtctacacagtcggggttttcggccgatgcacaacccttctggaccctattttcgttgtagattatggcgtcggtttttttgaatgcgatgtcgtaaatactcttcgagatgatgttctctaccaccaccaacttcgcttgttcgatgatattgcagggcacatccgcgtaaagataatctaatgaacccctgtggcagaatttgttgttccacttgctgcggagcgccacaacgttgttgccgagttggacgggaaagaagagcgtctttgggtcattgtcagttttgtctgaagagtctgccctaattatgtcgccaaatgtatggtcaaccctccagaacccatcggtgaaaacgttcttaatgcggacatagccaccacaggcggtggccgtgatctcatttgctatcatttgatcgccgcaagagtccttgaggtcgaagtaaagattcttgttggcgtccactctgagatatttattgtcgtcgcacgggtgcttgaaggccataggggttgtgggaaatgtgacaagcgattcgcaatccaagactttgaacacatggcgatcctcatcgctgggagtgatcagcgctgcgcacaggccatgttttggctcggtcgcagtgctggagagggagaggtagcacccggtttcggggtggagaaattgaaagtattcttcatcatcctcaaattcagtggctttgataggcttgaacatggtactcgagcgtccatcatgttctattggatggacagcagtggcttcaatgtactgatcatcagactcagatatggtcaagaatttgtagttgtggcaggatcgtatgtgcactagttcaggatctttctttgctttctccagttcgaattttatgtaaggacttgcaatgtcctcacctataaaattcagggacgtttgagacagttggttttggctactattaattgtgcttttcaagtatttgccattcgatttagatttgataaccacaaaccttggcactattgacattattaatcagtattcaattattgatacttaatttagtaatgggatgaatcgaattgatataagaaagcatctatttatagtgacacaaaatattaattatgtgaacataaacgtacatctcataaaaaatacatatatatttatcgttaattaaacagtcatatgagtacgtaatcatatcgtgaacgtgtatactagtaggtgtattggttgttagtataattattatttttataagcaaaatctattaatcgactagaaattatacaatatagttccaaaaggcatcgacgacatattcaagaaaaatagtaaaaataaataaataaaaaggcatgagacgactttatactattattctttaatttcttgatttcaaaggaaatatgcatgatatgatctatgcatatatattggtgtgtttgaaaagtaaatgtgttattttaattaagtaaaattcaaagtaattataagattgggttggtttgttcaacaattcgaagtaaaaaaaaggtttggggaaatgtctattcagaagcccaagaactgttgtcttgagaggaaattagaaactatttttaaagtgcactacaatcctaaagtacggcttgtggattatgaggaataagcaacctgaattggtttacagaggaaaagagaagaagaactctgttttattgaatgttgaatatgtgtattacagatggaaaaatatagccgagttaaatacccaaaaacaatggtaaaatagttagcttaactaatcaagaattagttataactaatacagccaaaataaccacttaacaaccttaactaatctcctaatactaatagtccccttcaagatgaagtgtagatattagaaacactcatcttggatacaatagattaaaatgtgatgggagtagagctttggtgaagatgtcggcgatattttgttcggaggagacatgaagtaacttgagagagccttgttggatttttttccgaatgaagtggcagtttatctcaacgtgtttagtgcgttcatgatagactggattttcactaatgtgaatgg

SEQ ID NO: 29690 - DNA, 2481 bp, Cannabis sativa
tctcgtttcgaacatgggaaactctctcgaaaaataaagagtttcgagtctctcctttccgcagaacaacaacatctctaagaactggtgatcagctttgtcagaacacaaaaatagactaagtgatgtcaaaatatcacttaggcatctaatattacatcccttggatgtttatacacttacccagcgtccaaatgtcaacctaggtgctggatgtcaacctgggcactaggtcatgaactgtttcctaaaaaatagccataactcacttaatattgatctgattgatgtgattcaacttgaattgaagctatttcaatactctatcaagttatgtctaacacttaaaatcacaattctgaatctatcggcaataaatttcaccccaatggagttataagaataagttccgagtaacctgcatcgggtcatgctgggcttcaaaaaataactatcaccatcagaagctaattttcaccattggattatcatctacggtcaaaaacatctaatttgtatttttttctatttttgtgggtctccttcacctataaaaggagagctcccttagttcattttttatattcacaaaactacccacaaagtcaaaactcttctctctagtttctctatatagaaattggagcttctaaaacttagccttttctgtaataccatctcatgagaaataaaaactcgaagtagatgtagctttattattgtcacgatacagggagtgaactactaaaaatgtattgtgtctctcttataattacttaacaattgtttcattcttgccaatctaaagagcacgtgtgacttagaagtgtagtccagatttttgagtcaatattttggtgctttcattgagagtcacagctcaagaatgttactagcaagatggttgcaatacattttacaagtgttgacaaaggaatcccaacaacaagccaattaactaggggcgcgctagttgatggagttggaactagagctactcctacaccccaggtgctaggagcaggcctcggaaccagctcctaaactcttcctccaaggccaccgaatgctcccaagactggcactaactattagaccctacctggggagcctcacatggagattaatgaccctaaaaaggtcgctcctcgggtcgtccaacttagccaaattgtggttaacttacaacaatagctgcgagactctctcaataatcaacacaaatagtttcaacactggtttgtggaaaactagagaaacattgaaagccaacaagttgagcaagaacaatggagagctaacttgtctcaacagattagacaagcttatctctctaatcgcagaactactacccgcaaggatctttcttagttgatgagagacactccccttcgaccaactggtcatgtgggaactagtgctcaaggggaaacccttaacgctcagaatgccactaccaaacctagtaactgagaaggcactaagaaaacaccaagtgtggacacccccaaagggaaagtaccttcgagcaagagcccaaaaggactcatacttgtgggtgccaatcaatgggccctccacctgatgttgaacgacctaacaacaccaagagaaccaacatgaatcctccaccaagtccttctcagtgctctcatgacaccaggccccgagaccctacaagggaaaaaggacctgctacttaaactaacagaggtagtaggagacactactttaaaactagaggctacaagatccggtgggtaatgaccaatgaaccacttcatactcaaaaatacttctgatatgaaaggggtgaattgtgccgttacttttcccgtggccttgatggctcaccatatgagtttttccctcgagtgcatagagaggaattgaacttaagcaaccagttaaattctcttcacacttgtcatccctgagatgatccaaagttcattctgaaggcttcaccagtgtttccttcatgaccccgtggtcaggagacaacaacaagacccaagtcgactggagtacaagatcgacttggaagaccaagagacttgcatgacttcttaactaaaaagaggtcagtggaagcgagaacttctaaaggagaccctactcgagtaatagaagctcaactgggacgcaaaccaccacccatggggtcagtcgagcaaaatttaacatattggcatccttaatgaagggtatcatgactcctaagttgtctaaatttgaacttgacacaaagcaacacccaccactctctgaatgaatcaaggctcttcctatcctccaaagttcaagaacccttcttggcatcaatacaatgggaaggaagatctattatctcacatccactacttcaaagtatagactgatctacaaggtgtgagagacgatgtcaggtgcaacatcttccttgccacactaacaaacctagctcaatggtggtatcttaagctatcccctggatcaatc

SEQ ID NO: 29691 - DNA, 2011 bp, Cannabis sativa
tagaatctcgagttgcttagaaatataaatgagagacagagagagagacagagagcttttacagttacagatttgattgtggtcttagattcatttagttgctgcatatggtggttagttgtgttgaattatccttttgcaaataagatattgagcatcatggaagtccgtttctacttcacatcttttgtttcattaaaaggaaagcgattaggtgtgtagtagcattaaaatagtgaaacactgagaatttacttatcataaacctttcctacaaaaatctaatctcctaaagagaaaacaaaaatgaaaccagagtttggcttctttgatttctttaacgttatattatcatatggccatattgccctcgttgttttgtctcattctccatactaatgagctttgatgccaattctcgagagtaaagattgaaaacagttcacgacatcctatcctacatttttgtagtttagaggaaacaaagaagaataaatttggaaataactgattaagaaaagaactaaacacataaaattagcaatattattatgtaaacaatcaaaaaatggaaagtgtaataacttcatcccccctcaatatttagtcgcatggcaactttttcttccttgagttgacgcccaaaagataaattgtcttggttagggacctgcatgcgtttttttgtttctatgattctgtcatcaagcaaattataattttcttatttacttgtttgtatgattttaaatcattaaatgtactgtgtttttaacttttaattattaattcatttgtttttctatatttaggcttgccaagctcagctagaaactttagtatcagagctggaggaagagaatgcacagttgttgagagaagaggtatgaatctttcataatttgtggaatttagaatttctcgaggtttgatggatttgggcctttagtacttagaaggctattgcctaccagttagtatgtcattctctttttgttttcatcatcttttctttcttggttctttgcttcctctagttttacttttgttggtcttaagatagatttaagtgaatatgatgtatacaaattagttgctaagctgtgaacatcgaaaaacatgaaaatgaattttgttctaaaatttccttgaaattaatttgaatcaaattaatgatatttatgacttctaaagaacaaagataatgtgatacctgagggtgaaatgattgtcctattgcttgcctaatgaaatatcttacacttttgttgcccaaaggtgggaagaaaaatgtaataagtgcagaaatgtagaaaaatatacacttcagttattttttattactactggaaaaaacctttaaataggctaagtacaatcttagatattaaatacacttcaaccaacagctactaacacttcaactaatcctaataaatactgtgcatacaattcccacatgcccatcttgcacacttgttcatcgaagttttctttgataatccttctgttagcaaatcagtagcttgttctttgctagccacaaaaacaacacagttttttttcttcaatttttccttttatgaaatgacaattcacctctacatttttggttctacctgatgaactggattgtgtgctatattaataactaatttattgcactgtatagtatcaaaggacttgacttttgaagttttagttctttaagaactcgtttgatccacataagttcacatacttcttaagcaagagctctaacctcaatttcaacactacttgcaataggatattgcttcttgcttctccaagtaacaagctttccccataccttggtacaatatccaaatgtcaatcttctgtcctcaatggaacttgcccagcctgcatttgtatatgcttctatgcctctttctttactttttctaaacaacaaaccttttcccggtgtcttctttaggtgctgtaatattctgtaaattgcctttaggtgttcttctgaagggttgtg

SEQ ID NO: 29692 - DNA, 1993 bp, Cannabis sativa
aaatatgtatatgtacatattagtaaaatatattaaactaatattttgatactcgggatcccgacccttataatcattaaatatctaaattttgaaaatttagactttgtatattattagtatcattataaaatacgggcgttacaaaagtagagttagatagacatttatataatagagagaagatatatataatttgatcaacctcacagatatccctctttcaatgtttctctctcatcgattaagtgcttggtccttacgttgaggtatattattcttctatatcttctatatcttctttattatgcaattttgtttttattctaagtgtttatgtttggctggtgagaaaatgagaaggaaaactgtaaatcaaatctgttcttttttttttttggaggaggcgtgtctattgtgactcgtgagaagagatgtggaagtccaacctccctattatttttgaaaaacaaaaaataaatgtgattaaatttttatattatcgtatatttaaaaataaattaaattataaatacaaaaatgaaaactcccctaaaatatttagcgttatagataatgaaataagaagaaaataatttttattttatttttttatttacttacatatattaaagtattaaaatattattttaataaaataatctttctactcctttagtaattctatttttcagtgtcaattattctgttttaaaattgaaaaaaaaattatttcaatacataattaaaaaaatttaataattattttatgaaatgtttttatatattttaaattttattttatgttattcttatttttatattctctttcctttaaaaacagcaaattagtctaaaaataaaaataaataaataaataaaataaacagtaagggagttctctgtgagctgctgcagcagctacctcgacgacgtcccagccctgattggctcgcgcataccgcttcaatttcaatggccaaaattggcgaaagctcttcgtcttcgtgccaaaccacggatgctaagcccgtgatcgttagggttaagcgcaaagcatttcagtctccactagatgctttctgtgagtttttctttcaattagtaaataatttacaagttgtttgcttgtattttcatactattttttaaattggttgagtaatttagggcttgagattaatgagaggcccctgaagcgcgcactgttggattttgagaatctttcaatcactggttcagctggaaaaggtatttctttcttctattggagttgggatttaatgtcctacttttgtatgaacattcaagtttttatgtgttgttattcttttgcagtagaggaatttaagagtaagaaggttttggtacggcatctggagactgcgagcagcactgaggccaccattgatattgtacagttgtttgtggtcagtgtccaagtccaattgccattcttgtaaatttatgacatatgcatatagttttgggatttgtttaaatttagcataacaaggtatcattggcttaaattctttaggaatcagattctgctgatgcaactggatcgaaaacgaagggcgaggaacgaaaacacaatttaaagaaggagaatgtgagctctcttctttgttttcattcacttactgtggaagatgaagaagctagcttttctcattaaaatagatacttaagtagtgtatctaagaatttggtttccaattttacattacagatacaagatcagcttttgtctaaagccaggaaaacacaagaggtattttcaaaattatgaacttgtttcgcttcttattttcaatgtattctttggtttcccttgatagctaatgacatctgttctgtttgatctttgtatgctttgaaatagaactttattaattttgttgcttttctttcttactagttgttttctcaccaattgacaattgttttaaactttctacttctatgttgtttgtggaatttatttatt

SEQ ID NO: 29693 - DNA, 5724 bp, Cannabis sativa
  modified_base (32)..(35): a, c, t, g, unknown or other
tacagttcagggggcatttttaacgaccttannnnttcagggagtatgatttggtacatgtcaaagtttaagggacaaaaatcttaattaaattgtgtgaagcagggtattaactttcttttttttttttttctttttatgaagagaaccaggtattatcttactaggctttatcatcaatccattttatgatgaaataatacaccaccattattgatattctttcaagttttggaccttacaatcttatataaagattaaaaataagaaattttggactttatagagagtccattacatttttgacctccaactgttttggtctttttctttttcttctatagactatgacaatacaatatgaagataatgcaaaaacaaagacatatcatgaacaagcacactttaaacaatttgcaaatacagactttgtccatccttttccaaataaactccaattgtttttcaactcactataaagtagaggagggggagagccaccatataataataagaataaaaaggattatttgtccactctaaactatgattcttgtagggtttcaaaaggtttttctattgcaaaaattttctttgaactataaaagtcattacaaataacctcttccggttacattctacttaattctgtaaataatttgttaatgtagtattaacgtgacgttaatctgaccctcgtactgcacctataaatacttgcattcttagaattaatatttttacaaacctataaattataagaatatgtatatgtatttttagagttaatgtttgtatgtttattctcaatttcaagtagtttcaagttattaaatagctagactctcgtactgcacctacacctgcacctacacctgtaacacatgcatcgtcacataatcaaattatttttaaaagatatgtgcaactatttgtataatttagagaaaattttttacagcaaaaagaagttcatttatgaaaaaactctacaaagatttgttaggttatttttaataatctaatgtgtgggcttataaattaagccgatttatttgaattgacattttatattagactaaataaatgatctaattaaatgagcacaataaacatcttattctttttttttttttggtaattaagaaacttttattgcgaaccgaaactaaaacaaagtagtaaccacaaagggggctacatcccttaggcgacccttgatgtaggcgttggcacatctcgcccaacccgccagagcatcaacaaatctattctcagaccgaggaaagtgagagaaaattacaagttcaaaacacttactaagacatagacaggattcaaaaacagggtaagtgccccaggcaaacggcaggcaacctttattgagggccaaatttgtcaccttcaagtaattattaaggttggtatagactttgtaatgtgtaataattattaaggttggtctcatggaattaagtatgtcttctatcttattaattaatagagtaatcttgataatctaacatgaatttaaaatttatattttctaaatttaatttcttttaagatcatatttcaaaggaaaaaaaatttgaaaaataataatatagcttgagatgttgatgttacttgataaatctccatctcttattcattttcactaaaataaacacaagacaaaattattgaaataatccctttatatgcttttttattttttgagagggcttttatttatatgataggtaccttgaaatgcaatgacaaaacgaatcgcacatcattatcattaagataaggaatataatttcacaaatttaaataaagccaaaatataaaaggttggagacataccatttgagagaaacagagtgtttaaatggagaatgacaaattcttattaatccaattaaaatgctgaaagttacatgagccaggcaaagtgataaagtcggtttagggagtgaactaacaaactaacataacagaatcttaacagcttgtaaaactaacataagagctaattctaatagcaacatggtaactggtaagaattggccggagagtgatgtctttcgcaactcaaacgattgttgttaataatagatccttgtattatacctatacttatagaagcaaattattttaaaaaataaagtgataaaaattatatttcaactgaatttttttttatttatcctaataataatagatccttgaaatgcaatatgaaacgacaaaaagataataaaatttcaccaatctcacgtcataatataaaaggttaggaacaattcaatatggaaatccacttattttaattttataaaaattataaagaactattaactaattatgccttataacaagctcgcaagttaatggtaaacccaaacaggaaatcacctttggtatgttttgtccctaattagtcatcattagttgtagtatgtacgtatttaactctatgaattgttattaatagaaggtgggagactagtatacaaacaaaccccacaagttattcaaataagataagaaattaatacatatatatatttatataaaatatatgaaaaacactcagaacagagtacagattccatttaaacatctagaatataaggtctttgaattggaaagacaaagataactaaataatgatgaacaagataggtggtgagaattggcgagagagtgatgtctgtcacaactcaaacggctcaaggttccaaatgcaaattctcctttaattacatttaaagacattgggcacataaattgctctcgtgaactggttttatccagtttatatatttatatacagtatcatcatccgaaatcgttgttctcacctctagataatgcaacatttcagcaccaaccctttttgatcgatccttccctcgtcgttgcctgacaattaacacaagaaatataatcagattgatcaacacacatacgattctttcatatacattgttcagagctctccctctctttgataggaaaaaagaaaagagaattcaagaagatccgaatcacataaactagcaaacacatgattttcattgcatctagtccacagaactctgttacctacaatcttgtaaaaaacaagaactataatatgaagggcaagatgatgaagataagccatgtttttggtagcaacaaaagtttgatagtttgtaagtgttacaattccagttagattacggcaatgggctgtttaataacccatatttacaactcaatttaataatattagtccacctttcaacgaaaaaaaaaactattagtccacctttccaaaaccatcttcagatttctgttaatcaattccttagtcatatgttttcggggtgaaagaaaaaacttgcaaatttattttgaatatgccatgtaaccacagatttcacaaagatttacatgcatgcataatactatggctaagatataaagaataaaaatgccatgagaaaaaaaatcaaatatgctgtatggctactgttttcatcaagttctaagatacatgcttctaaagaacttatacgccatgaagagaaaaagaagaaatgctgaaacgaaccttcgggtggctgagctagcttacggttttgtggcgacatcatatctttcttcaactgtgtcaaaatgtcctccatagtgtactctctttgccaattagcaagcatcgggaaaagacttggttcaacctggttatttgtacatatatgagattaattgagaataccacaaggaaatatgtgcctgacggtatacaatatcacttaccatcccactttcttggttgacacaggtcatgtttatccgtgtttggaacctgactgttggtggagtatctggatattcctttccacagaatagtttcaattggtagattcttccttcatgcacagtctagcaagaagcatgattaggaaacaatgagtttctccttcagaaatgatattaaaaagtacagtggtgatgtgaatatcacaaaatcatatatagacaaacagaaagcaacaaattaattgcaatttgtctctgtattgatctctattgaataaaaaaaccgaatcctcaaaagaattagtaagaactaagaaccaactatgcattatctcttcacatttgtctgtcttcacaagagtcactttttcataatatctatccatgcaacaaagtctggttttaaacataagatgaaattcatcttcaatcttgaaaaagaaaaagaaaatctttctcaatctcatttagtcagtaaatacatataatatattttgctcctaacattattataacttctccagaaacctgattcaaatattgcacacaatcactctaatgttttactaagaatatgcctctctgttactgcaaaaggtaaactggtcaagagaaggaggagagggcaatccatggttaaacaggcatgaaatatgcaataaccaaaagaaacccagcaaaaccacaaatttcacataagaaatccaggggaaagaaaataaaagtgtaatttttggaacatacattagagggtccaataatagttccagtccatgactgcatgaatatatcatcagcatcatccattccgtaactaacagttccatctccaattcctttttcacctctctcaagctcttccaacaatctgaaatttctaggaactgcaaagaagcagaaatttcaagagatactaagattatgcatacaaatgttaataacaattatacttgagaagaaaataaaaaataagaacttatatttcttgcaagttatcttcctctgaagcctgctgtacaaatgaacaagctagcattccttcttttggataggaaagctaggcataccagatacaagatcacagcaaaatatatttatcaacataaggtaaaaataagaaagaacccttcacacacagcaccatgttcaacaattgttctcatcttgcgaactaacaaatctaagaaattcttaattaactcgtgaaaaagtgtggtcataaaagtcagattttgcatgagtatatacacctccttatggataaattgaaaccaaataacattatatacagaatgtttgctctaaagagttgttgtgaatggttttttctctctcaagctattatcatttctccacattatatacttggaataaacttaaaatgtatgcagtgggaattttagttggaatgtttagcattgtagaatggatgataacctaaatgatagtagttcaccaaatgaaatgagttaattaattgaagtagttaagaaacagagaataggaacaccaaaattttaaaagaaaattacaaggcaattcagcataacgtaaatataagcacattgtttaaagtggtaataaaattggacaaatctaaaataatgatagcaacaatggtatgatcctgcttatataaagggaaaatcttaatcagctgtataaattaaacaatatgaattgatgtgtcatacttcatttacaaaactttaattggatacaacagtctagcttctttctctaaactgctctagtactgcataataacttacattatttaaattaatgagcacagtgaacattgaagacttcacctaacacaatctattcatgacaaaccggtagtatttatcaactcagtgaaatatcctaaaacaattaagagtttatgcaaattacaaatcaggaattgaagattctcat

SEQ ID NO: 29694 - DNA, 2050 bp, Cannabis sativa
ctaacatatttagtgtatggcccaaccatactattatttagcaactttaatgcaaagtgatgaggtaggatctttattggtcttttgttttcaaaaagcggaattgttattgccacctttgttaaattcaccatgcaaaatctgacatcaaccaggttaattggaacagaaccaattatttaagtcacgcattgttgcttaaccttccagccatactattatttagcagctttaatgcaaagtgatgaggtaggatcttcattggtcttttgttttgaaaaagcagaacctttattgccacctttgttgaattcaccatgcaaaatctgacatcaaccaggttaattggaacagaaccaattatttgagtcatgcattgttgcttaacctttgtggttccaataggcatgccactagattttgttgaatttgtttgaatggactcgaaagagtttgacattacaatagcctttgatgcttgagcaactcctctcttaatagatttatcgtgtctcttctttatgtctttggtgacttttccttttaaagcctctgcagtttgatgagctttcacgaccttcatttctctaggaacatcaacttgagtatgggttcaaataaaatgtcatgagaaacccatctttcttctttttccccaatttggtgtgcgcatgtgcaagcttgtagaaaaatactgttatttttggtgtcactatttttcctgtaaaatagcacacctaattacaaaagtgtaattttttagttctcagcgtaattagagatgaaaatgagaatgggtcccaccgggcgtgctaaaaattatgttaagcaaaaattttataagtataatattaaaacaaatgcaaaatataatttcatatatgccaaattcatagcataaaattttattattttaagttcgacccatccaagattataagaataatctcttaattacaatcctttcatttaaaaggaaacaccttatgattcaaattacgatgatattagatataattgagataaattttggaaaaattaggaggaatttagaattacagctgaacttagtaaatttaattaattgagctgcctacatactttctttgtgaaggatcaagccacttgtagttcataatatgttatttttggaatttgaaaataagaattccagtatatgaccgttttcaggaattcttttctctttgaaaatttggaaaaattcctaagtatatgatcttttatggaattttaaaatttatgttttataccattttgcggtattgacgactgcacttagtcttagcaactaagttgcctacatatctcattttaggaatcaagtcaaacgtagttcaaaatcttcttgcatcatgtgattatgtaatttttagagatataaagttcattttggaagaaaactcattattaatctcacatgaataaatttagagattacttgaattacaattcaattttaaggagaattgtgaaataaaactcaaatttaatcaagactgtgtgtctttacaaaagtaaaatcttatattttagaattggttccaataatatttgagaaaatactctctcataaaacgagtacatcattcctttttctacctcttacgcattaattttatatttataacctttgcagtaacttatttatataattgatatattatacaaataatgtttgaaatgtggcaacaaggtggtttgagtgccaaaacaatttatcaacactttatatatgtatacattaatacataatatattgtttcacatatacactttttgggaaggagtgttctagtccccacatatatttatatatagaacactttttaataaatattatctataaatagttactaaataaatttaactataaatattaattttataatatatataggaaaaatatagtgtaaactcccttctttctacctcatgccatatgggagttaaattgaccaatcagaattaaaaaaagaaattgtacacctcatattagtgtactcccttacacccaattttttctttaaaa

SEQ ID NO: 29695 - DNA, 2208 bp, Cannabis sativa
  modified_base (516)..(519): a, c, t, g, unknown or other
ttttttcttcctttgaatttgttatttgttattttatttattttaatgtgttattggagacataaaataactataatttgttgctagtttatgtaaaaaaaaatatttctttcataaatattaaataatttaatattaaaaagtaactaatctaaaataatcgatccaatttaaccttttgcagattagattgaattagatttgagctattgtgcggattggattggatccaaaaaataaaatccgcacttagtgcagatcaaatgcactgagtagggtgttgatcatactactcatatcatacaaattgtctggactgcaccatactacaagtaatttgaaatgaattatttggatctggctagtaaaatcttaggttgtgtgaaggttgctaaagttctgctattaaactgctaggaaccacatgagctttggcaaccccttggcagtgaccgctggtgatgcactgatggtgctgctagtgctactactccatttattattattattattatnnnnattattattattattattatcgagaattaaatgaaaacaactagagataattaatgttttttttaaaatatagaattaagaataattagtatttttattatttgaatttttaacgatatgctttctacaatatatttattaaaaatttctcttaaagtataacagatacataattaaaaaattaattataataattttttacatcttaaattttgatcaatacaaaaaatttctcccttttattaaaaaaattaattttaaagattacaatgttttttaattctaaaaaacttattaaaaatctaataaaaatattaaacttaaaatattgttctcgtaaaatttagtttttataaaatattaaattttcatatatttttatatctaaataatttttttaataaaaataaataattttttaaatcaattagttagttttataattttattttttttaatattttaatcattcaaaatgatttttgttaagatttagtaaagaaaggttaaatcttttttaatttttattttgaggggtacgatttaatagttgttaaaatttaaggagtaatattgttaatttataaagatgcatcagtattttaacggaatactgagatggaacctaacagaaggactatatctctgtaaatgtaaaaatttaggaggaatttataacaagttgtatattttaaaaaataaaattagtattgtcaaaaatttaaaatgaaaaattattgattataaaataattaattaatgtttgttgcgtgacaatttaggagatattggtcaaaagatgagttggaaattttgtttttgtattttcggaaagagaaaataatgaatagagaagattggaaattttggcacgcttgtttatgagttgtgacaacaacactataaaagatgaatataaaaagagagagggcggtggtagaatggtgaggtggggtgggggtgggagtggggggtgattgtgccactttaaataaggtctccgtagaccaggcccagcgcaggggccttcagccctgtttgcctttgaaaattttgacaaatttcccatttttggttgtgaaagtgaaatttggccaacaaggtgggactactgctgattactttgatcggaccaaaaagccactagttgtgctgtacttttctttatttgaaaaaaaatattgttttgagttagtaatatggtatcacacattattttttgattttcctttgattgattcaattgtagaatttattcaattattaaaacttgaaggcttggtatatattatagtaaaggaaattatagcagatgattcaaaattataacactatctaagtaaatattttcgtttcaaaatttgtaaatgaataacttttttgcgctatttattatttatattatcttttatcacataaaaaattaatatttttttataaaaaattagaagcaaattacttaaagatcatgctatatatctacattagttttgttaaaaaaaaatattttaaaattatgttgatttcttttttaagtttttatcagttattgtggattgttggtatataaattttgttgtataatatatctatgttttattgtaaggtatattattattcttaaatgatatttattttttattttgccatgtataatagtggtatataattttattagcataatgaaaa

SEQ ID NO: 29696 - DNA, 2148 bp, Cannabis sativa
cagcttctggacaacacaaggctggccaacctgcatcctgcaggtgcatggccagctagcctttggcttggtaggattttgatgtgcaactctcattcgtggattgttagtcaagtaattaacgaaccgggcctttacaatccacaaaaatagagggaaaataatttttaaggggtgatttagtcatttatatttattaattaataatgtgaataatggttttatttacctatttctaaggatattaggcatgtaagctctactatataaagtgcattaacctatctctaaaaccctaagtccttaagcctccaagctccctaagctttccactctaagtctgaaaagcctaatcgtctcttctccctctcttctacatgtgtaagggctccccccctctctctctatcacacgtctccaaggttcgagatttgcctactgattcatacattgtaatattaagagagctacttcagatcccatcattatagtgatctgagtagtattatctttcggtatcaatacaaccaaaaggggatcaggttattacccgctaataaacctctataaaatcttgtgtctaaattactttattgttcttattgtgtaacatgtagaaaacatcaacattaaatacaactccactttcggttggccaaattttgaggttaaaagtttggtgctttcattgagagagagttgtcaatttatctgatcaaacgccatgattaacacaaggagaactctggttacaactttttcctcattgggtcttcctcaaaaccctgtgactacagatcttgatgttcgtgttccagtcacaactgtaatctccacgaatccgatggatgtggccaaccctaccatctcaacagacactacaaacctggccaacacaattggccaagttgacaccaccaatctggatggtctcaatggccaacctctgccacccaaggaggaccctccgctggtgcctggcactgaaggaatctggtccttgatattatgctagagagatgaggccaagaattggcgagccccatgtagactttggagaaattcttgagttagccagacttagagaggccgctgtcaagtcggtcaaattgaaaaaaccaagcattttttgctgcaatgtacttgtacaattgagacgcaaatttctgagatggatggatgaccaagagtacatcctctgatctcatcaggcagaattagactaccgcaacagagaagctagcaacctgataaggcagttcaatgaaagaactgtcagatcgaggaactatgacaaaccttacccaactagaaggaggataagccttgccatgcagatctagtggcaagaacatccagactttggcaaccattggtctgtggcccagccagggacctctagcacaataacaccctcaattgtccaacccatggtcgatcagcaccttagaagtgcacctctagtcggccaacagggcgaactcccgatccagagcatttgagatggagtaacccaaagggaaatctttaaccaattaggactaggaattgatggaaacacacaagataacaacaaattcaaggagttaacacaatcacctcaagcagttagatccaccagctagtcaaggaagaacgagcgaccaagccctacctagcacagggctggtcgatcatggacagctaccagactcagagctggatggccttgaacataccctctcccatggtatgggtagccaagcttttgccaatccaaggttgcaacttaatcaagaaaggccaatcaaccaggcccctacaataaaagattgctctatgcaagcacagttggaccaaatacgagacatgctcaagggcttggctaactcgaaaccatcagaccttgagctggataggttaaggggctcacctttctcagcatacatcaatgccttgccctggcccaaattcaagatgccaacctggaagatgtacatggggaaagaagatcccctagtacacctgaagtactttgagatccaaatagatctccaacaagtatctgagatgtgcgatgcaaaatttttccagcaactctggctaaaatatcccaacaatggtatttcacgttggccctaagacgatttaattcttaggaagaattct

SEQ ID NO: 29697 - DNA, 3843 bp, Cannabis sativa
ttttgtaaaagttaacccaaatttgagtatttttgtaagttttttttttttttaaaaaaaaagttaagaattcatgggaaaggtaaacttatataattatgaattaaactatggcacaaactaatttttacgcgaaaatatgggaaagcaaacatattaaattaattttttttaaggaaaaagccataaaatgtttttcttttgaaaaagtcatatttttgtacatatttataaaaaatcataaatcatgtaaatttttagattgtattcagaaggaaaaaaaaaataattcaagaataccttattttagatttaaagttacacattgtcacttaattataaagatggtgcaaaaagagtttctttagccttttctataacaatatcatggtccatagagtgattctataacaatatcctaacattttctgttgatttaccactaaatgatacaaaaatttacaaaaaaataaaaaaaaataaaaataaaaatacatcactatgattctaatagaaatcacattcttagtacatgtagactgctcaaggtggagtttggcgtacgtttttgagagggattcattttcttaatctctattcttctattcaacatttttctttggccatcagtgatactaattaatttcatctaatttcgagtttcagttgttgattctttattttttagatttacattttaatttaattttatacattttgtgttttaactagttagggcatctcacaaactagtctctttcccacgctctatcgcgactgcaggccaactacaggtaataatttggagtttgttaaatctgaaaatttggtacatcctttctaaaaatttttgctactttcggccaaatagagccaataagattaaacaaaaaggcactaaatgggtaagacgtcgtttaattacagacgttatcagagaatcattgggtttcatctcaaaaccaattgacaatgggaggagtagcccattcatcttatatattctattatctttcgacacattggcaacgtggaactctctaacagttatcactactaagagatttccatcgtatcaactcttatatgattcatgttgaagcatatactcaacaatgggtgcaaaggtgtgcgatttcaaaacggacttcttatttatcagatggaaaacatcactacacaacttattccaattcaatgaaaatatatttaatattgtgttttgtagagaacttcgaatcccaacaatctttagcacaagattttgagtctggtgtgtattatttcaccacctaaacatctcgagagtgaatcgtatatattccatatgaactatcaatacaagtaacacatccacaagcttaccaaataatatttcttaaccgtaataggattcagctggtctgcaaccattgaatccttgtgaagtacatactgaaccacattaaatgtccataaattagcaacagcaactccaaagaaatgagtaaatatcttcttctttgttgtttgttaaaatagtagtcatttgttttttttgagtaattcccctaatcacgtgttattgtacatatatagtttaggccacttgtatatctttattttactttagcaacaataaatgtagaatgacacataagctttcatgtactgttgtctataatctatgtatgtcatgactaaactaatacatggtgtatcaattcacaacattatcaatcctcatgaaaattgagaaagggaaaaaccaaagacaaattatgtaaatagatctgtagtaaatgttattaataatccgtatctaatggatctgcactagcaatttcaaaaaaaaaaaaaaaaaaacccaacaaagcatatactggacaagatttatgcaacaatgtcatatatgaatcaaattctctatccaatagtgtatcaaaaagtatcacttacataagtcaaaagtggcaaacagtatactattaaaaactgatgactgtcaatgaaagctgataaccaaatactaatcaaatattagccgctgtgaaggaaaatctgcaatatcaactttcttcttctttctttcactctcaagagccccatttatagtcttcctgttaaaaatcaaattattgttaggctatttctagcctaagttgatcgggtcactttttcgctctttgtttccacttttaggatgattttatgtttgtttctctctgtttcaggttcgtcgggtgtttaaagagaaaattcattaaagtagaatggacaaagtcgagaaaaaatgagagaaaattcaagttgaattttgcgaagctcatcgcaacgagcactgagggagtcgcgaccaattattgttgtcgcgataagcctagtttacagtcgcagcgagagagttttcaaaatgcgcgatttttgagcttcaacggttgccgcgactagaccatttgtggtagcggcaacaccttcggtgcaaattcacaagcggttttgtaatttcaagattttaagttgtaaccttgttctttttagaagggttatgaattttggagtccattatttagaaagttagacctagaaacaaaagaggaggacctctagagcgacttgtggcgatctaaacaattttctccatcagttcttttctctctcttttaagttttcttacgtcaatttttgtttcaagtttgattttggatttgattatagagtttatgaactaaactccctttttgggaagatgatgaatgtggattgattgtatatgctttgagttgttaattactactttttcttttttaattgtaaatttattcatatttgtggttaattacatgtttgagattgatcaccttagcaatgatttatgatctcaatacaaaattacaaaagtgagagttgagaatgctaaaattgaataaattttaattttgatgtgaaatgagagtatttacatggcatttgtgacatttaggttattgtttgatgcagattgtatgttactctatctcaaagatgcaatagataacatatgatttaggacctaaaagattaggttaatcttataatctaatattcacttaaagaaagcagaatagttgttagcattaacgatcgggtaattgaaacaacaagatttatttccttaatttgtcatcctttgattaaacacttttattgctttattttatttttcttgttattctttaattttttatcttgaacaaaattattgtctaccaaatagaaaataagtctattttaatggtattcagttcaatttcttgtgggttcaacctcacctgtgtgagtactacttgattatgtgtatttgcgtagctatttataattttcgtaacaagtttttggcatcaagactgaaaaattgtttaaaaattgatattacagaaattggactaaattctactttggtttcttccttacttcttgctaactattttgcctcaatttttcttattctatctcaggtgcttttggtttatgtgacgtcaaggaccaagtttaagagtgcctattgatcttgagattgagaagacctatagatagaatagaaagaacaagagggtagaaagagttgcattaagggttgagcaagaagaggtaatggccaataacgacaataatgagggtgtcgtggaagactaggaaaatggtcataatccacctgaccattgtctgagggactatgttcttcaaacattgaaatgttttcagtcttgtataagaccacccaccttagaagccaacaattttgagataaagccaaccatactccaagtggtacaatcttcagtccaatttggtggactgccatataaagaccccaatttgcac

SEQ ID NO: 29698 - DNA, 1269 bp, Cannabis sativa
aacaaatcaacattttatagacctacctaactgcttaatttcatatatgtatgcttcaaatgctaatcttataattaaacaatattcatttttgatgcaaaatttattcaaataagatgggtactttttcttatggtagtacaccctaaatcaagaaatgtaagcttaagttatttatatactttaaatgagaaaagattacctgaagaggcacacagaaaaaatttgtggccttgttcatatctgcggtcatatgattctcgggagccaagctttctcgggccttctctaagaaatgtgatacaggctcaagaaggtcaacctagtgtccgaaaacatatttgtgtttagtcagtagagaaaattattgacataaattcaatgatgcaattccagcaaaagaaaaaaatgatgcaattgcttacaaagaataaaataaaacataatatttaactaaagttaactgaacagcaaatgttttccataatttctattccttatactataacatattgaatttttagaagatcagttcaggactcaaaaggaaatgcttaggaaaatttccatatagttttcgaaatagaaaaactttcacgtagttataccattttgaaacctaccacttgaaaacatattcaacagagataaaaaggaaaccaaacgaggcaaacaactgaacctacctcattgaagtatcttattaaaagatttttggtgactctcccaactccagagccacaatctgcaatagtttaattttggtatttgtaagatatgagctgaggaaaacaaccaagtacacatacatttgactatgcctaatacaaaaagaaaaaaaattatccacaatgtggttatagaagaacaacactgatttttacaaagaaacaaatttaatacacaattgcataagcatctaaggaagttaacttgggccacttggttaatctttataagggcttttacattcttaatttgggaacaaaaaggaagttggtaactaagtctcttcacaatgatcaacgtgatacactaaacacattacattgtgtgaatatattctatgaattaaagctcattctacaacaagggtggcaacgtggatcacgacacgcgagtttgacatgaacacaacacgaaaattattgcaagtcgcgttcatgtcagtgttttgtctattttttgtgtcacagatcatgttcatgttgagccatctaaaataaatttaagaactctatatgacacaatgacaataaaaacattaag

SEQ ID NO: 29699 - DNA, 1170 bp, Cannabis sativa
catttctaaaaacaattttttaaaacaaaaaacagaaaacaataccaaacatgctctaatattcttatttttaaattttttaaattataaaaatgaaggcgaaaatttttatttttgaaaaacaaaaatatatttcctaacttttttgtttttgtttttaaaaataaaaaaaaacaaaaatatatttcgtattttttcttatttaagtgtggaaagaaaattaagatttgagaaagtgagccagagtcagaattacggtcagggtcctaatttggggtcgggttcgaaggccaagggcgaggtctgaatctgggtcaaggttttattattgaaggtaaaagcttaattgttttattaatgaaaaaaggaggtatttatacaagagaagctggtgaaaatcaacaactaactaacagcagagttagttataaatataactagctgtaacaaccgttataacaaactaatattatttaagaggtttaggtttaagttttggatttaattccaagtccatgccaagagcttagattccgcatccaatgtccagggttgaggtctaggtctggctccaaaagttgggatcagatccaaaatattagtgaaagaaaataaaaataaattataatttaggaaaagaaaactatttaacaaattttgaaactattttttttttggagacttttggacactctgaaaagggtcacactaatgcaatcccatttttactagttttcattggttgttaaatgaagctcattgtattatgatgtacactcccacagatgattgtatactatttgagatatttactaacaacaaggtacaaatttttctaaaggcctcgggcgagagcctcaattgctgacccaaatgatccactcattccaactatattcccaacaatcttgtttctgtagaatctgaacctcagtagacatgaaaccaagtaatacttatagactttattaagagagaggaatgttgcaccgggattcgcaccaggaggaaaacaaggctgaactagtgttctcttctcaccaggagggcggctccgcgttcggaacaagtgtcacaaaccaaagaaaaagggttcttcccatttaatctgattcaaaaaaatttattctaatttcaatttccacttccagtatatcacaatcaaattat

SEQ ID NO: 29700 - DNA, 3956 bp, Cannabis sativa
tcctgcacagtagagcacccgtgagccaagcccagcaagacagtataaataacaatatatatacacaataatcaaagattacttaattattgatgccacttcagctattgcctatttgacatagacctacatgttatgctcacatgtctatttatgtctatatagcatagatccacgtgttactctcacacatccatttacaataaggccttataatagtttatctcggttttaattactgagtgtaacctaattatgcttgagcgcataattctttatttcaacatatatagcatggcattgcatttaaaatcatttaatcactagagtaataaccctaggccatataactgctcactttagggtgataaccctaatcccagttcttcatctaatcataatcgtaatatcaaacatgagcgccaccgcgcttaactctacgtgctaactactgtcttacctgatataccaagtatgtggagattccaaacctccaggtgttcctgagcaagcgttggtaatcctagtcacaattcctgagatttcacaaatagggttaatccccaaattcaatttcacaaaatcgcacaataagcattttatttatagatagggatataaagctcaaaacgtgctttccaacgctataaagaatgtccaaaacggagtctcgagtcaaaagttatgaccaaaacaaaatcatgaaataggatggctctctgctaggttttggccgcagcgaccaaaaatccagccgcggccaatgggttcgaaaaccccagaaaaccaatttttaaggtctaaaaataccacttttccatagtttgaagtttgaacctcaaccaaaatatacccaaaaccattcataaactcaaattttgaatcaaaataaaccaaactaactttgataccaaactaaagcatcaaacctagcccaaatcaataccaaagatacacaaaaaggaaatatcatgaaacctcaccataatcaccaagttgaacaccaatcatcaaagcattcaaaccataatatttgcccaaaaaattaaatttaaaacgcagaattcaaacctcattttcaaccctaaaaaatcacacacaacattcaagttgcaatccatatggtctcaatagctcaaacacattaaaaattaccaatatcaccactaatttcgccaacatgcatcaaatctcaaataaaaatcaagaacatcaaacctaaactcaaagaatattaacatacctgaatttaatcataaacaaaaaggatcaagaagttttaccacaaatttctaagctccaagcacaaaaaatcacctaaattccttaacttttctccaatccaagccttaatttcaaaattgtataatactgaagatgatgataaagagagaggaagaggggtcggttagagagggcttagaaaattagaataataatttttcaatattctcaaaattacttttggttgaataatgcttaaatgttcaaaagaccaaaataccctcatagtcaaaataagcatatttatattggcaagggtaaacttgtcatttcatcacacacataataacacataatttgagatttctcacttatcatataaatgccaaaataaaatcccaaaatgtactttgggccccgaacccagttccgtccaaaatacctagttatgactatatcacgccgacttgtcaaaaaatacccgcaaatagacagaataaacatactatatgataatatagtccacaagcacgatatatcattaaaagtacaattttacccttctcgggccaaatttacaaaaatgccctggtataccaacggggtcttaaaatgtaattatcagtatagtttcacatattaaattatataataatatagtttcacattatttcatatttaaactagttagggttgctaatccgatttcttaaccttagggtattacataatcgtttacctatatatctttgtaaatattatttttaagttgagggttgtcttgcttccaatttttatatgacagcccaattatcatatggcatctcctaaatgtgatattagattgctatagtttttgccacaatactctcatttatcgttgatttggagaggaagtcttttttcttggtccatcaacttactgattgcgttcatctccgttctacctcgcttaggtatcaccttaggacactctacaatagggtttaaatttgaatttgagtctgaacctgagtttgccatatacctacatcattaacaaatataatcacatgatagctataacataacaactgcataaagaaacataatcatcacaagtaagttataacaaatagtaactacatcaactaacattatcacaagtaagttactaattagacactatttcttttctttttttagtaaaatttatcataattctactaaaattttggcagcataatagttgtaattggacgttcccaaaatttttaaacataccaaaattaacaaacaaaacaaataaaataacattaacaatacaaaaattatccatccatccgaccacagtacatgtattcacagaacctactttactatggttgaatatttaaaatattcaaaatgaactaacatgcacattattccacccatccgatcacagtacaatatatcgtagaatctatttcactacaaatgaatatttaagatattcaacctcccttaagcattgataattaattaataacaaaaggttagtgaatgtatatacctttagcaagctaaaatacgatcaacacccaattattcgaaaccttaaaaattagctcacaacctacaatataatgaaatacaacaaattaaaattttaattatataactacttactagtcatatcttttaagagtaactagttacaaatgagtaactagttagtaataaaaatagatgaatatgaatgaaaaaaagtaactagtagttagtaaaaaatataaaaacacataaataggaatgaaaaaaaataatttaaattcaataagtaaattataaaataaatatggtaaatatatggggttttttagaggtggttggcgaggggttcgtcgtgggtttaggttctataatgtcggttgagtttcgtgctgaagaagaagaagaagaagatgaagtggaagacgaagctttcagggtttcttatatagtcctatggcgtcagggcacacgtgtcattaaaggtatccacctatatcgtttgttattttctattaaccgacgctatagggtttaataatccttttagctttcccaacccacaaccgactctgtagggtatagtctatgtctatgcctacgagttttatacaataaccgtgtttaaatgtcaatttttaacaggcaggtatttttacaccctttagcttctttttttataaaaggagtgaaaaaagtagcctctaaaatggtgttttgtagtagtgtccatatttgtccactgtctttaatcatgtcattaagacttcttcttaattcatgattagaaatttattacttgttcaatctcattttacaagtatccctaagttttaatatttaaataattattatatttaatatatgtatctcatactatgaatatcttttcaattgtttgttaaatactttattaacatcctcaattttcataatgtattattaaatctacatttaataaatttatagataagtaattattcaccattaatatcactttattctcttaagaatatttgatgtcaaataattactatttcatcttatatattatattgtttgaatttagtcatatcattcaaatcttcgtataataattttaatatccacctcctaaagtaaatgattcaatcatcgcatttttaatagataccatatctgaatcaattttattttaataagagaaagttcctattaaaattaggagttttttcattttt

SEQ ID NO: 29701 - DNA, 2553 bp, Cannabis sativa
taacatgtcttctagtatctgaatcgtccttttagactggccatccgtttgagggtgaaaagctatactgaattttagctttgtacccatggccctttgaagactttcccaaaacttagatatgaacttcagatccctatccgaaataatatattttggagctccatggagacaaactatctccttcacatataactccacgtactgatccattgtataagttgtctttgttggcaaagtgtgctgttttgtgaaacgatccactatagccaaaaatgaatcatacattctcgtggtcctaggtaaactaatcacaaaatccattgtaacatcctctcatttccactcaagaagtgttaaaggttgcaataaccctgtcagtttctgatgtttagctttgatttgctagtaggtcaagcacttagacacataatccacgtctcttcattcccaccaccaatagtagggtttcaaaatcttgttacattttggtggtacttgggtgcaatgaataggaagtagtgtgagcttcatccaatacctctttcctaagttcatcactgctcggaacacaaaccttggccttgtaaagtaacacttcgttatttgagactgagaagtccttagtctgactagctaacacttcctctcggaagttgattaacttagaatcttctaattgcacacatctaattctttctagcatattgaaccaaagcattaaattataaagtctgtccaccacaaactcaataccaaccttaaccatgtctgttgctagctgaggagagatcatcatggtattgaaaacttgcgcgggaccttttctgctcaaagtttctgccaccacgttggctttcctaggatgatataaactctcacagtcataatcattaactaacttcaaccacaatctttgtatcatatttaaatctttctgagtaaagaagtacttgagactcttgtagtttgtatacatcttacatttttccttatacagataatgtcgctaaatttttagggcaaacacaatagcggcaagttctaaatcatgagttgggtaatattgctcatactccttcaactgacaagaaacataagcaataaccatcggtcagcttgcatcagaacgcacccctgaccctgtctggatgcatcacaatacaccaaaaatttctcttattttgatggaaaagctaacactggtgccaaaatcagtcgttgctttagttcttggaaactagtttcacacttgtcagaccatataaaccttttatcccttttggtcaattctgttaacgacatagaaatcttagaaaacccttctacaaaatgtcgacatccaatccaagaaacttctgacttcagaaactgtctttggtcttggcctactcttaactgatttaactttcctcgaatcgaccataattccatcccttccgacgatatgacctagggaaagacacttgtgatagccaaaatttgcacttcttgaatttagcatacatcttctgatctctaagtcattataaaatcttccaaaagtgttgttcatgttctgcttttgattgagtatataagaatgtcatcgataaatactatgacacagttttcgaagaaatccttgaacactctattcataagatccataaaggttggaggtgcttgcttaatgaattgctcatacaaaggctccatttgattacaattaataagttgttctgttggcaacactagagcataagcaactggcatttgttgaggatgcacaacaagaggaccctactaccttagcctctgaatttcttcatcttgttcatggattcgggcttgcatttctacaaacctttgctcctagtctttaggagcctatggcaggttaacattacctctgccacgagctcttcaatggtctctaccccagccacggggacgaagaggattctaacctccccgaccttctccagtctcagccaagttatcctaactccttgtgttttattgtccatttataagactagcctgcaaaaccataagtcaggtcggtcaaacaacgatcgaacttataatccgtataccgcatacatggaactttaggcaatgcattatctaactaacataatgcttacatgcttcctatcatgcttttttaatcatataatttactaaacaagtaaaggcttactaaagtgtgagttgagcttgtctctgatgatgattgtacatatcttgacaatctttgaaggacaacctggtggctctaataccgaattgtaacttcctacttgattaggcacgctacaattattttctaattactgtccacacctttgttaatcaaagattttataaaaaatgtgataaattaaattttaataaatacatatatttataaaaatttagaatcccgttaaaagtttacaactgtactcaaaatatattatttcataaaagtgtcacccatcgactacaaaatatgagcccatgtcgtctcaaaaaccaaacactgtaggcctaaccattttgatatatatacagtcacccgcaagctct

SEQ ID NO: 29702 - DNA, 1940 bp, Cannabis sativa
tataaaaatactctttaacaatttacaatagagaacttttgcatctataggctgtaatacatatatattgctctaatatgtacttatttcaacataaaaatatttttatttcttttatttttggatcttggacttatcatgaacttttaaatgaacctactagatgacattttaattttataacatatatcaagaggatataaaatctcaagtcgtagaaaatcgactttataaatgtacatataatatagtaattttcatttttttttattatgctcatgaatattttcttagggggaagaatcataaggttacattttaaaattaatcatttataagtgaagtagtctatatttttataatgactcaatattttactatttattttatgtgagagagtgtctcacaataatacaatttttttttttttttttgaataaaggcacaataatacaatttaatatataatactatatataattcgacaaatcagaggattccaggttaattattttagtgtacaacagtacaatataacaagtcaatttagaattatgaagcagtactagtaattccaataattaaacttttcaaatataaatttttttgttatgctagagtgtacaacagtacaagacaacaaagttaaaatacatttatgaaacactagaagttctagatctagtacgcatttccaataattaaagtattcaaaataaattgtctttcttttgaaagaaaaaattgcatattactcgagtttttttttcttctatatatttatcgatcacattacttcataacatatatcaaaatcatatatatttatacatatatttaccttcaatgagaattctacaatgccatatatatatgagaattatccataaatgaggcatttaatactttattttcattcgtgagatgtacattaatatcataggtctagtagcctaagatgaaaatttacattaaataaatgattgtgtaatctgacaacagtgaaaataagtaatgttttaatattgtttttttttttctacaattttttttttaagttggagaagattttgataataatgtttacataattttttttttcaaaaaaaaaaaaaccagagtttttgtcgtcttctcaattgtgtagtgtggcagtggtaaattgggttcaaatttctataaattgtggcaaaagagctttgttaaaaaaattcaaattttttgttgaagaaactcaggttaatgatcgtcattcgtgctttgtactggaacttggaagtgatgagtgatctaaacaaaggcaaatggaagagactaatttttttaaattgttacttgaatttctttgttggtctttagtttcattgaaattttgtaggttgtaaagtgagattgaagagtgtggaggtttcttaaaaaaaaaaaaggagatccaaagagtatgacacattaaaatctactgctgagtctcattatacaagaaagacaatgatgtggggccaagacatagaaaaagaaaccttaaaaataatggaaaatttaatttgttatgcttacatatactaatttttttttcctaaacttaataactaatatttgtagaatatgacagtttttatgatatttctaaaatacccctatttacacaattgaaccctttcattggagcccacatcggatataatcggacccatagaaccacccccatcggaccctcccattagaccctatatcggacccatcggaccccccatcggacctacgtctcctaccccgcaaactcatagtttcattcgaccctatcagactctattggacctacatcagatcccattggaccttttccaaaatcacagatttgagattctaaaatctaaatctatccctaaatctaacaaaatctatctttaacactaaaatcacaaacaaaatcaataaaa

SEQ ID NO: 29703 - DNA, 1727 bp, Cannabis sativa
agcaattcatctgggtgaagatttggagagaatttaccacgattccccagtgtgttctttgtttcaacatgaacgaatctacacaaactctttcaaggaaatgaattgtttgatttgcttaattagtatactaacattgattcaattttagtattagtcaattattttatcttatcttggtttccttcactatattactaaatcatttgccatgtcaactcatataaataccataccaaattacttgtctcttccttaaatcatattcattatcaaagcttaaacacttgctttagtttaaactgaagtgtgatcttaagaagacaattaatgagtaagtaattgcttgtgaatatgaattgacaattggtgtgtgtaatcttttagtcttcttgtattgggaagtcctacggttttttgggtattgaaaaaggtgtattgtttctaggtaataataattataattattattactttgttggttcaatgtattgcttacttatataatttacctatatatatgggagttctctactgtaagatttgctcatacaaaaatttcaagagaaatatagtaaagataccatttttatttatttgtgttgttttcctttgtttatattatgcactattttactctgtaaggctaagaaaccagagtagaaaaggaagagcttaattatacagaaactaaggttagtcactcacttcacttctctatttattatcatttttttcttttactgtttttcttttcaactgaacaaaagtctttgaagcttcaatttttctgtcatgtgttactattgcactttttcataatctgatgcttagttttgattaaaagcttagtgtgatctatcatggcagagatgatgatcttattcttaatttcttttttttttttttggagcatatttcaggtagctatggctgaagatgtctacaataacaatattaataataagcaaaccaaaggtatatatctatctatctatatatttaattattttcatggattgttcttttgtttttactagtttatctcttttctgcaacttcgttttttctaatgttttttcacattactgtgtataaaaattgtttgaacataaaatgttgatttcaataatgatctatacatgttcatataatttcttcaattatagttattttgctcaggaaaaaggattcataagtaatattttggttttcctaaacttttcttttattattaatatattatgtatacatcttatggtagtaaactaattttattttgttatatatttttgtagctgcattttgcaatctcagcaatccaataaatcatcttaataaaaataaattcaggtatttacagaattctttctattttttacttgaatgatctattattttttcatgtttttgctgtatattttactgttaaactttttattaatgtatgagatactttaggcttcttaaatatattaagatgattatatagttaatattattaccacagatgtgtttcttgtgttataacatgtatactactatttccttttggctagcaactcacctaatcattaatttacaatcaatattattgtgctatttatgaggtgattgtattgggtgcatttaaagatgtatggttaagcaaaatctttatctgcattgccttgagtgtttttgcctcattttggaaatttacctgtcattttacttcacgtttttta

SEQ ID NO: 29704 - DNA, 2171 bp, Cannabis sativa
aataaatcagagaaataagaaactaccaaatttcccataacagtgtgactagagacaatattctcatgatcatccttaagaaacttgatagtgttattcctcttacgttgaaaagcaaagtgatggaaaaatttagtatttttatcaccatccctaagccactgagttcgagccctctgcctccaatagacctcttccttataaaggagagcatcaagttcagattggaggcactgaactcgaaatcgactcatcttgtaataaaaattttaagcaaaaagaatgatagctaaagtgttgtgagatccttactactgtttggagagattagcaaatggtaattgggtttagggattagttgagagataattagtaggaactgaggtagcgtttggttggaggtaatgaaatacaaaataaataatttttattttattcttttgtttggttgcatttcaaagtattggaatatcatttagtggaatatttattccattttaaatttttttaccaatatcttatttaatatcatgtatttcaacaatcaacctaattattaaactacctaaaacacgtttttctaaaactaaaattaaacaccttaagtaacagaatacttatagcgatgacatagtggaataatgtctccttccgccaaattatctaaaccccaaatcctttctatagcagggtaatcctaagaacgtgaactgacctttttagctttatctttctaaatagtcttctgaagtaatcttgcaattacctaaactactgtaggcaatttctcaactcactaatgatgatggtgaatttctatgagaaaaggaaaagatggatttcaaaattcactatagaagaaatcatgagtttcatttttcttgttctctaccagctaaagactaaatgagaagagaatgagagttaaatcttagctctatatatctttctttaattaagaaatccttacgctaggttaaactttaaaaaactaaattctctagattgttaaaatttaaatttttaataaaatatatttttttttatcagaaaataatcaattcattataaaattactatgaataatataaaataggaaagaagaagataaagagagaaaaagaaactgaatgagaatctatcagtagtttattctaataggatgaatccctatttatacaaaaatataactaaaaaataggaaactaaatcaatgtattaaaggaaaatacaattaagcatttataagaataattaatttggtaatttagacatccacatataatatttcataataccccccttggatgtccataaaaactgtctcattaaaaatcttgctaaaaaactttgtcaaaagaaaaaaagtgctgtataaattaactttctctcatttaggcattcgttgagatcttctaatagatgaatttctatcttatatatcctcttctcaaatgttgatgctgataataactttgtgaataagtatgcatgattgatacttgattgaatatgttaacgttggacaccaatatagtcattctccttaagatcatgagttaagaagaatttggtaaaaatatctttggctctatcttcttcattatagctttagttgagtaatgcatttcgtatcatcttcatagagaattgcaaatgtcgatattgtgttacaaagtacaatccatatatttcccgaatatgctatgtcaatgatgtcattccaacacattttctacttgcttcataaagtgcaagtatgttagtatgatttaaagttgcctcgttagaaatcttgtcaggataacccattgggacaaaacctgagctaagaaaaaaagagtgcaatatttatatgtatatttcatattcataactatttgcaagatgcctcgttaaaaatcttgtcaaaaaatccagtgggacaaaacctgagctaagtgaaaaagagtgcattatgaatatgtctctcgctcatgcacatacagtccataattattttggtgataatatctcataagattattgttatcacttgtaaagtatcaccgtatattatctatgactatacattatctataactatatattatatataactctttcaaattgtatgtgtggacttttaaattatgaatgagagattcctacagcattaatatttatctaac

SEQ ID NO: 29705 - DNA, 3062 bp, Cannabis sativa
aattatttacgtggaccaataaaattgtgccacgtgtttattgtgtccacgtggacaatccaatctgacagttaacagctaaattgaacggaagtgttaaattgctaacaatttcctggttttgggggtttacccgcacaaatttgggttttgggggtttagtgaaaccaaaacgaaagtattaggagttgtgccgccatttaccctataaaataagcaacgaataaaatttataaacaattatctaatattattagtttgatgtgacttcttgttatagtaccggttcttctaggtcaaaaagcaaaaagataacgtgatctacagtataaagaaaattgttttatacaagggatgtgaaacctcaattctaagcgagggattgtataaagctccttaaaagaaatacagtacttgtaatttttgttttaactcccctatctggtaattattattttgaattttgtgttttataaaatgtatatattagactatctattttgttaaatgacaattcactttgtatttttctaaatggtacaaagtaggccttgaattcaatttcatcaattttttattataaccaacctgaagccaatttttagcacgaacatatgtaaaaaatataaataattttatcataacacttccaaatcaagttattactaaattttaaattgacaaaaattaagtttaggatctatttttttttactattttaaaaaatacagagtttgaattgttagaccatctccaatgaaagatgtaaaaattaatctatatttgacacaaaatatggttttgtgatatttttgcatcaatttttactccaatatataattgtaaatcttgatgcaaaatttaatatgtcatttaatgctcatctaatactttcaactggaaaaaagggaaggaggggtactttgccattaaaattgatctcgtcaaagcttatgatagatcgagttggaaattcattgatcatgttcttgactgctttggattcccacagatgttccgacattgggtttctcagtgtatctccactaccactcttaacatatcccttaatgggggccaggttggtaagattgtgccctcttgtgggattcggcagggtgaccctttgtccccctatctcttcatatgtgctgctgaagttttatctagacttttagaggagaccctggaaaggggaatatacaaggcattaggctgagtaggggtggaccggttctatcccacattttctttgcagacgacctcattctggtggggagggccaatttgagagaagctcaaagttactggagttgccttgagaagttctgtgagtggtcaggccaaaaagttaataaactcaaaacgtctatcttcttcagcaaaaataccctggaaggtacgaaaagaggtatcaaggacattttgggtattaattctccggacggtgtcattaagtaacttggacttcccctattcagatcgagacaaaaggatgccaatttcaacttcattttggacaatcttacctctaaattgcagggatggaaggcaaaaactttatccaaggcgggccgggctacccttattaaggttgtaggcttctctctacctatttatgccatgcagacaactaagctctaaaaccgtcttgttaataggatagatggttttgtccgggattttcggtggggttttgagaaagggaactatgcccttcacctaagagcttgggataaactttgtctacctaagtccttggggggtcttgggtttttgaaaactaaggaaatgaaccttgctttcttggctaagtgggggtggaaaatattgaatgggtgtcaatctctgtgctgcaagatcttggaggccaagtatctaaaggggaaggattttctcagctgtagctacagggactctgattcttggttttggaaaaatgttgtgaaagccattacaattctgagaaaagggcctgtaaagtggtcgctaatggaagggatactagtatttggagggatccttggattcctcattgcaaaggttttgttccgaaaccaaaggttgcggccttaacagatcacacttgggtgatcgatctcttgttatctagtggagggtgggacttacagaaactaaacagtctgtttgaccgagagactttttcagcaatcttaaaaggtggcaatccttccggtcatggtaaggatagatggatttggactttggaaagtaacaggcaattctcgtgcaaatcagcttacttaacacaggctttggaaagagcccctcactgtgaagttgccccgtcgttttggaataggctttggaatagcaaaattctggagcgacataaggtactttggtggtgtattctattaagtgcactccccgttagatctgagattggtaaacgttttcaaatcgaggattctaactgccctttgtgtggtttgagggaagaatctattgaacacttattcctatcgtgtgaggtggcatgcatttgtggcgatcctcaccttggggaatctaccccgtgtgtgatgctggtattcgtgtctgggactgggtgaaattcatctgggatcttacaaataaggagattggttgaggaagtctttctttatgcttctattgttgttgacaccatatggaggatgcgcaatgaaaaggtacacaataatactcctcctgatgtgttgaaatgtattgacaatatttgcacttcttttgcagagttacatgcttctcttttacttgtccctacaccgatcctgcgagagacctggactcctcctccccaggattggacaaaagtaaattgtgatgttagagtgggtttagagagtatgcgcacagctattgtagctaggaatcatctgggtaaggtgatttggattcacacatctcggttggatttctcggatgttttatgcggagaagctacggcttgttgtctggctgtctcatcggctgcggatttagggtataagtatgttattgtggagagtgattcgagactagtgatcaatgctctcaataggaaagtgttccattgg

SEQ ID NO: 29706 - DNA, 4468 bp, Cannabis sativa
tttttacaaaaatactatcacgcagatttttttcaaaaaaaatattgtgcttttataaaataatagtaaaacacaaaacataacagttaaaaacaacagtaaaccaattaaaaataacagtaaaaattaatatagtacacaatatatttaaaaaaaattccgcctagtaataatgtaaaaaaatagaaaatttggtgtaaataatctaaaaaaattgccaaaagacaaaaataagtcttctcttttgtttttttagatccatttttctttatatgatgatgatgatgtatgtatgtatattttggtagagaaatccgctgaactagttcaatagatcgtgcgatatctagtaacaagagtccgtgtagaaaatcatatttatctaaaaatttaatcggaaagattattttatagattttcacacacacatatatatataaaattacaataatcattgaatttatttataaaagataaaggtcaactttaatgatttggttgtctttaaattattgctatcagctaccaatagtgtttagtaccttctcgacatatcgcgttgtaattggttagcgatactttctaaaaactattatattaaattatataggactcgatacttaattggaccaatagcgatattaacatgtaagaaagtactaaacaccactagttttttagcctttctctttattttttccattcttaaaaacctatgcaaataaaagcccaatcggcagaccaagcaaaacaaagacgtgcaaatgacaggctgcaatacgacataaactaattactcatttccattgaaaaatgtatatttgaataattaagggtctcaacccaactgcctgtatgaaatgcgtgcaaactgtgtcaagcttacaatgacacgtatacacatatatatatatatatatattatatataaacattatgggaagcacgttcaacaaagtgccccaccacatagaaaatactacaataaaacaaaaacacttgtaatttgtaagactatattatttcatttgtaccttattgtatgtaatatttctatatatattacataagattcagagcgatgatgactttgaaagaagatattcagacttttgagtccaacacaaagagaacgatcgttgccaatacaaggcaaactattatacacatacccagcaagctagttagctaggcacaccaagaaattttttaagagaaaatggggaagaaatatgtgagactttgctttggaggccgccccagaagtagtggttgtttccgggttcattcccttcagtgtattcgatcaaaacccagatccagttcgtttggatcggttggtcagaaggcagaatttttaagccaaaacagtaataataacatagctactgatacaggaactttagcaagagatgatgatgaagatgagaagatcagtactggtaataatgaggctgatcagtcaatggggaacaagataatgattgtcgttgattcaagtcttgaagccaaaggagctctcgattgggctctatcacacactgttcagagccaagatactgtcgttcttcttcatgccaccaagccttctaaacaaggttaaatgaatcatatatattttactaattgatctcataccgtttttcattttcataagcttacgtaaatgttttaattaattataaattcttttgttttttgtagacttaagtgggaaagtaaataatctgagggccactgaagttcttcactctatgaaaaatacttgtgaaaagaaaaagcctggggtaagtcaagtggacatgactttttcctttaattaatttatgtgtactgagtatactattaaatatgtttgtttgtttgtttttttttaataactagaaaccattagaattttatatttaattaattctattaaagtgtttagaaaatgacttaatggatatataacaacacaattgtactctctagctaagataagtcaactacataatatgcttggatttgtaaataaatgcatagataaaattaataaatccaatcgttatagttattaatgccaactagatatgaacaacaagtgccaaaaacagaatttataatattaaacaaatcaataattataagtgtatattcatatccatatacgtatatatgttagattgataatgtaaaacaattaaataatcaaattaagctggttttgtgttgaaaaataataggttaaagtggtgatagaaatgctacaagggaaagaaagaggagcagcaatagtggaagaagcaaaaagacaaagtgtgtcattactagtgttaggtcaaaagagaaagaggtcgatatggtggagcataatgaggagatggtcaagaaatgggcttcgaggagatgtagtggagtattgcatagaaaatgcttcatgcatgaccattgctgtgaggagaaagcacaagaagcaaggaggatacttaatcaccaccaagcgtcacaagaacttttggcttttggcttaagataaccgttatttatatgtaagaaaagataataaagaaaaaagaagagaaaagtaaataattcttaattcattgtttcttagttttgtgaattattttcacaccccatatatgtatttgtggattctagatatgtttttcttggtgtaaccatgttttttagtttggttaatatgatcgtgaaacatttgagtttttgtctacatttaagtgaatagtattacatataaaaaaaaaattaacacatagtttgaccatcaagtattgccttgtaaatattgaatgatattctatgaccgttactaaattaaaaaatataagacttgatttttgattatatgaataaccatatatggtagttctaaacatcactttatagcttaacaagaaccaacgccaacatcaacttataaaagagagataataaatttcatcaatcacaggctatatataaaatcaatatcgttcattgggatgatattttattttatatggtattatattacacatgatgggattaggtgagtatgcttattttaatcacaggagtaggcgacgataggattacaagtatgtgctatccacgtatgtaatatacgctatcattcaatattaaaattgaaggatatgaatggcattactatagctataataatctatatatatcggttgggcacgaacagaacgacactaaaaaaaaaccatttgaagtggtagcgataatattcctctttgttaaatgttttatataattaaatccatgtcacgccattttaatgtaaataatcgttcaagcacattacatgaaatataactatataaattaaacaaatgacaatttagagtgggcatcttatatatatatgttccaattctatatctatataagaaactaaaaactaattaagagatggagcatatataaaagaaatagtaatgtatagacttttgaggaaaaaaaataaactttttccaatgtttttgcaagaaaattattttaaatttcaaaagaggagtgttaccgtcaacctcttgttacaatttcttagttaactttcacgcccgaaaacacacgtcaagttagaatatttttttttcaaatttacggcggtgttcgttatgcttacaataccatctctataaatttttaaaaaatttcgagtagtttacagtgcctacgtttaaagttttttgaacacgtatggaaaattagaatatcaagaactctattttcagaattgtaaactagtcgaattttttcaaaaatttatagggacaatactgtatatataacaaataccgctacatgaaaaaaaatttgaaaaaaaaatatttcggcatgtgatttcggacgtggaggttgactaagagattgtaataggaggttgtaattagcactcctaatttaaaaaatataaaaaaaattcattaaatataacacaaaatataatatcatattaaatttggcactgttatccgtattttcttcatcatgacacatggagttttaatcaaaaaaaagctaagaagttatcagctgccacacttcctcaaatggatgccccggccgtgaaaataaaggcaccaactttgtgggaagagcctctataaagaggagttccccgacatctagatacacggagggtatccgtgagctgaagtctccctccattctaggaactaaagctatcggctctcgaaaacagtatggatcttcttagaagggccaaagcattccgagaaacactaagccaggctatgcctttagcccgcaaaagcctcacctttagtgtcaaactacaaacctagtggcgaggctgtcttgggtacaatgtcagaggttgtcagcaccaaaatatattacagagtttttcgacaactaaatatttttagcgctttgaaaagtaaagataggataaataacaaggtaacaaacgagagattttttacgtggt

SEQ ID NO: 29707 - DNA, 2366 bp, Cannabis sativa
tccgtgatgtacggcagccgttagatgaggtagttatttgatccgagggttgagattgatctaggggtaattaggattaaaaaataataacgtaatctgatactcatctattaccctgagattcatctaatgtactacgaaatacattcgtgtccctatatatagtgtgggctaattaataagtaagaaaggaagaatttatcaagtaagtcaagtacttcttgaaatatatatattgtcatcctttgatctttttctttttctttccctaaacaaataaataataatatcacttgcaaaatttgaatgtttgcagttggcacctacttattaccacaacaacaactcaagaagccaaaggagggatccactttgttgtgtactgatcaccaaacacatgattccatggaaaaaagatttccaataatgtcacattattattacaagctagtgatcaaaagactcctaactctccctatatatatcaccaaccaagttcataaaaatctattaatatatatgccaaataatcttgaaaagtggtagatagtcaaaattaattatttatatgcaacttaattaattcttcttctatcattcacactattttttttaattgagcatttatatattataatgtatagttcgaatctagaacttccaacacacatgcactcttatatgtctatttgagctagcatcgagtggttttctatcaatcacactaaatatattcttccattcactagtttaaaatattttattaatattgattatagaaaatcatagctatttatagagtgccacacctcatgatgaagctaagcacccatcaatggtggagctagaacgaaatgtaataggaggcaaatacatgtaataaaatcataaagagattttataaaaagtatggagaaaaaaatagtttatatttatatgggcacattaaattatagcacaaaacatgataattttagagaaattagatttaattaaaataatgggaaccccaacaaaaaattaaaaataaagttaataagatttttaagattctattttaataaatttataatctttttttattataatcacaaatatataaaagcttatgttatacaaaattttatttagtatttttatttcatattataaatttataagcatttgataaaaataatttataatatttttaaattatagttttatcacatgttaaaaaaattagaaactcgaaactcaaaaaaaattttaaaaaaatcaaatatataagaaactctataagttgatgttgtttgttaatataaaaaataaaatataaatatgttttaaaaacaaaataaaaattgaagatttaaatattatttattttttgtaatatataataaataattaaatatattttatgtacaaataaatttattgtagaatctttcaattaaaataatttttttcaaaaagttggattgcacatttagtttttagcttctccatgaattctttaataagttattacagttttttcaaaaaatatcttttattagcttttccaaaaacaatgtcaaacgtccctaatcttatgagcaaaaacaatttcattatctgaaagtgacctctatttaagagatcgatcattctcaaggaaaggacatgttctatgttctacatcatacgctctacacattatactcactgaacactaaactcttattctctcaacattctagctttagttcaatctctggccttccaacaacgaagctaagtttttatattttattttcagtctgcttattttaatcaacgttactgacttgacagagtctttttggcggcagcacctcagtgtctcaaaaactttaacggtccactttctttttgttgtgtgcaaattgtcagtgcccagcttcaattattgtagatttgtgtacattataatagttaatgtataattagcgacacaaattaaaatttacattatttttgtttttattatgtttattcaaagttgatagtaatgttatattattaattagggttcataagaagaattaaataggtttatgggctattttggcatagttttgcaagcagttgtagctgtgttatgagaaaaaacaattgtagctgtgttatgaaaaaaaaaaacagttgtggacaacaaaaaaataaattaattttttaagcttcatatgaaattttttgttgaattggatgtttttctacacaatttttctttccataataattattatttttcactaatttttttcttacatttttcctactttttttccttcacaaaaattcaactttcaaacataatcttagagttctttatatgcattcttttaaaatatatatatata

SEQ ID NO: 29708 - DNA, 2382 bp, Cannabis sativa
attttaatttaagtttttcttctaaaaggaaataaataaaatagtccagtccattcttaaaccaaacacatgattactttcaacataatccaatcttgtccagactagtccaatccagtccaatcatgcgtaccaaacgtgccctatatttagggtaagcatatggtacattcttaattaaaagagtgtcggtagatccatatatgttacggtaactcaaaagagtttttttagtgcatatttataattattctattttaatagagtaagtctaggatacatcccctaaaagagtgttggtagactccaatctgttacaacaaccaaaagagctcttttagtgcacaattataattactctatctttatagggtaagtctatgtatacatcccctaaaaaggtgttggtaaacccctatatgttacaacaaccagaaaagcttttttatagttcgttttttttttagtttatgatcatgtacgtatgttaaaaattatttaggatcacttgtaaatttttaaaaaatttcgaataattacaatgacgaaaaataagatttaaatattttgtaacacactgttttttcttatatgtgttgtaactatttgatctttattttcggcactttcaactatttagaattttttgaaaatttacatgtaatcttaaatagctatatcgtatgcattcatgaaaaaaaatatactaaaaaaattatttatatgttaaaatagataagaggatttaccaaaatataagtgtactatgagagatttccatctttatataattctaagttttcaacatatgatactttacttttttagtaatcaagtcatactatcattttaggatattgattggattttttttaaaagaaataatatttttaactctttattaaaatattattttgtatcttgttaccaatcaaattctttgttattgataatactagtaagaagttacgtgagtaaattttatgctagatattttctattttatttaaaagtgataaaattaataattgaagaaaaaaaattttctaaaaaaataataattgaagaaaaaatattattaattattaggtgagattataatataatagataatacacatatacattctaaatcgagaaatctttcctcatgtctctttacttttgaattgtgaatccaaatagtgacaaacaataagtaccgtacattataaactggtaacaataagtaataataagtacagttacaaaccttgcattttcttaaatgaaataaaataattgaagaccatatccatcacttctgattttgatagaaaacaatcaaagtaaaataattatatcttaaaaagtaatcatagagatataaaataccacgtaaatatcatttttatttaagttttagtggttttgttagacattttggtaactaattttaaattattattcgaacgatttgttttataaaactaaatttggtgagtgtaccattgttgtgtatataaacttatatgcacattgttattaataataaatagtaaattaattttaatatattcatactcatactcatgtagtaattgtctttaatgtgatgaaataatttataataagttataacaacatatgactttaatatttattctttgtttcgggaaagttaaaagcattaatatgtgttttgcaaaatttaaaagaaatataatgtagtgaaaatgaatgaaaaattgtcattttgaaattgaagaatataattattaattaaagtgttaatatagaaaaccctatgaaaaataaaactaagcataactaaatgttatcttaatcttccatcgactcaacaatttgtatggtgaattaattgtgctttggactcatccgttaaatgtgctttggactcaacaatcttaatattacataaatataaatataaatatatgatactttaaatgtgaaaatatacctcattatttgaatacaattgaactccatgattacagtgatgttacgactttagtgtttaagagcctacggggccgcaatattaagcagacatatactggctttctcaagagaagtttgcccctcttcaacccatattctacaattttcagttttagatggaaagtttacataacggaaaaagatatataaatctcattttgcttaagaaaaaccaagtgtatcacacattatagtatatgcataaaataccacatctagagcttacaatacataatactaagtactaactccattgaaacacaaaaaccatatcaagataagatgttaatgatacagttacccaattataaagatatcaatatgtatgaataatatgtatgtttttgtagaaagcagaagaggatgacgaggagtgtga

SEQ ID NO: 29709 - DNA, 1567 bp, Cannabis sativa
aactagtaatcaaaagtacttagcaactgaaattcggcgcagaaaaagaagagaagaaagtcatggcaagccgagaattttttctctctgtgagaatttggcgaagccaatattgacgttgtgtctttggtattcttctcttctagttgaggtttctttttactaaatagctccttcaagttcctgggctatggaggagataagcaaggggacgatggagaatgccccggctgctgatggtgaggttttaatggaagaggttcctacggacagggtggcttgcgaatcgtctggggttccactctctatctgcggcttggtgaatctgcctgagacgacggtagagggaagccagaaagacaagatggaggtgttaaggcagaagtttttggaggagtcttccatggaactggaacccttacttgagatttctgaggagctagaaagaaaaggtgctttggcttgctgtttttggaagcttcccctgccgaagaacagagtgaagcaaatattgacagggatttggagtttgaaagggaaatggtggatgaagacaatggaaccgggcctctggggaattttctttgagaatgaagaggacttaaaacaaatcctcgacggaagaccgtgggtcttagggggtcaagttctgaatctgaaggagtggcccgaggatggttgttggcaaaaagttgatatgaaaatggcaagggtatgggtgcagattcacggcctcccaaccccttatttggcaattcaaaatgcccctgtgattgctgccaaagttgggacttatgttaagttcgacactgcagatcaaagaaccattagtaggagagggtatttgaaactaatggtggagatagacctcacccaaaggattcctgcgggatttcacttaagcatcaacagaggtaggaaagagtggatacaattcaaatactgtaagattccgacgctgtgtttcaattgtgggtatctctttcatgatggtaaagattgttcgaaagagaaaatgtttgccttcccaccggtgggagaagcggtgccactctatggtgtttggatgaaagcaaattctcaagtgcgcagctgtttcgatactcgcaacattatgatggttaatagaggaggtttatgcccggagaaaatggtcaatagattacaagccctgaatattcaggacggcggcgatggtggtgtacgaaagaataacgatggaagggaagggactgtggggcctggagtggaaaggccaggaggtggagcggccatacagcagattcgtacggtcagtacgagaagaaaggaatctctggcaggggaattacagcaaaaaggggtgacacatccactcccttgtgtgattgctggggaccaccctatggccacgttggaaaagaatcctatggatgatgaggttattttatctcttatgcccaatgttgggccctctgcagcccaaatgttggataagcctcatgaattggtttgtaaatccaggactccccatcaataccctgaacctgtgcctgttgcttggaacattgggttgggctttgaaaag

SEQ ID NO: 29710 - DNA, 1822 bp, Cannabis sativa
  modified_base (1064)..(1064): a, c, t, g, unknown or other
gggcttgggtcgtatgcgttaccaatatgagctgccaaagctacaaaagagtgccaaaacaaaagttggagtcttcatgtctgactataaattatttatcactctcttttgaaaaagttgttctgatgtgcattatagaaatcctggtcgcttgacaggtatttataggtggctatgcaaagattatgtacgtagatgagcttctggtcttaggttttttttttgttttgtttttttttttttcatttttatatgtttttattaggagagagggaaagtaatttaattattgatttggttacgttagctatatacttagtattttacttatttataatatgtatatgcatgataacctatatagatatgtcttattctgtgtaacttaacataaacttataattcgcaattggtgacactgttatatgattcaattaattcgcctagtaatttaatttatagaagtaaatataattcattttcttaacggtcacttcatcacgttctagccaaagtattgggtgtgtgggggaaaggagaaccgtgctgactgtataaaaaacaaaacaaaaaaaaaataataattgttctcattaataataaaaatgtttcaggccaacatatataatatttcctatttacttattcaaattcttatctaaaaggagatttttttttttttttttgcagttattagtgtaattaagtattgggtcctatatcgttaaccaatcataaaacatcacctataaaaattactaagcatcgtcttttttttttttttttgagtgtagcgtaatggtttttacaatcatatattagcttaatagcttcaaggttctgggttcgaactcatgatctctccttttttcccatttatacctccctcaccactaagctagccttagtggctttgatctgcatgcatcgaattcatttagaaaaaaatataaagccatctcgtgagtgtcaaagaaggctaaattgaaacatgaaagaggtagttaattaaagaggagatacttaaatcattagatgtaggtatcactacaagaaatgtcacntttaccagcacagttcgctactgcactggtaaaagtaatttttaccagcgcatttcgcaaactgcgctagcaaagatgtcaaagttttagcagcgtacatttgtagtagctaaaatccaacttttaccatcacatttacgtgttggaaaaagtcatctttgtcagcgcttttcattttatgctggcaaaattctaataccaacattgatttgtcaatccccttttgccaacacatcacaagtaaattctattttaccagggcaatactaacttttgccagcacaaaaatgtgatggcaaaagtgacatttgttgtagtatataatataccctacttctgatagtttatgtgttagtttgatccatgctgctcttaagaagtttgtgattactgtagtcaagaatacaaatgaattaattctcactaaaatctaaactggatggagagtgtgcattgactataaaaaactcaatagcctcaccagaaaaaactatttctcgttacccttcattgactaaatgcttcaaagattagttagtcatgagtattattattttcttgatggttattcgggatacaaccaaatgctgattgtatctgaggatcaagaaaagaccacttttacatgtccttagttatagaatgttgcttatcgatgaaagtcttttgagttatgcaatacacctgtgacgtttcaaatgtgtatgattgtaattttttcaaatatatatggttgaacgtttttttttttttttttt

SEQ ID NO: 29711 - DNA, 2914 bp, Cannabis sativa
acaaaaatccttaaattcaccaatcttactagtttaagggaaacttttaacggccagaaaagttcaagggacataatttggtacgtcaaagtttagtgagcaaaaatcctaattagcattttacaaaagtgtttaaaatccagtttaggtcatctagaactgacaaagtaagaaagttactagcaattccctcacaagactgactttaaaatcatacatgcaaccataccgaacacgttacttggaaaacaaaaggtataattgggaaccaccatttcatacctccttaaaagagtgaacatcacttccccaaagccaagcatcacaaccagcatctctagcaccccaaacatcgtttcttcgatcatcaccaacatgtacagcctcctcaggttctaccccaagtaactcgcaagcctttagaaatatagtgggatttggcttctctgcttcaacctattcacaaaagatagtttcctcaacacaacagaacacagcacgctttcaccacattttgaagcaaaaggtaaatatttgacttacttcagctgataccgccacaacatcaaaccaatgatcgcaatttagagctcgcaagagaggtctcagtctagtatcaaaatttgacacaacagccaactttacacctgatttcttcagcgctttaaagacctgttcagcctcaggatcacaaaggtgccaagcctttgtatataaacaataaggaataagttagcaataataaaaataatgaaaaaaaataacaacacactttctatagaggttttcagaagaagaaaaaagtaatatccatggtccaaccttgtcagtggtataatagttgtatagttcttcaaagtattgagaatctgaacagccagttgaacaactgacaatatattgccagaagggtctcccatcgtttacatatctgcaataaaacaaagaaacaactacttaaccatttacccaaagaactaaaacaatttccaaatacgaaagaaataaccttttcagtaataagagctaatgaaacaatttccaagttataatggctaacatgacactgtgcataacagagaacaagcaagtacattacccctacacccaaagaacataaaacagtaaaaagttatgcagcattacaaatattgggttttaaggaaatatatattccaattggaatttttttaattttattttttccgattcctgttataagaagtagttgtaattttgttagctaagtcaactcagaagattctcaagtcagacttatataattacaaattaaattaaacacacattattccacacatgagagtaaaaactgcagaatttctctggtaaaaactgttccaaagtccaaacaaagcaaaaaagtttagattcacatgaaacagcggaagctgcccaatcccatgaatctaatgaagttaaaccgaagaaagaaagagaaaaaaaaaacatcaaaaagttaaggaaatccaaaaatattagaaagtgattttcattgattatcacaaagaaccaacaactataaaaagatagagaacatgaagaataccttaggcgagatctaccccaaggctgctcgtaagcccttctgtaccgtttcaaaatctcagtctctgagtactccactccatacttctctccaattgttctatatatctataaaaagaaaaaccatacacacatgtaagtttatagaaataaaacaacattatgaagcagtgaactgcgaactgaaacatgacccagaaaaatcaaacataaaacaaatgcatgcaacaatcaagtgtataatttttgtcaagaaagagtaaagagagaagaaaagacctgggccatgggctgagaaggaataacaagtgtcccaacggcatcaaccaacaaagccttgtgactaatttcaccatacaaggatcttctgtaatccacatagtcttttacaccaagaatttccgatcccatgtgtctcgaaccagctacctcacactcattttgagccaaagccgaggacgagtataacaatggccccaattgtgaactcaagcccaccacgaaacttcccttgcccccatgggagcaggacccagatccaaaaaccggttttctataggtgacactacttaagagtttggagaggttagctctagtcgccattaacgccatcttctaaacttcatttgaggctctgttccactgccttaggcttcctttccttttgtctatatatcaaaatcatctgacaaaagaaatgtattatgtaacaataaaagggaataatgattcacctgaacagtggcttgccgtgagttgattcgcctttttacattaatgccctgggaaaggtttttttttttactagcaatactaagttactaacccttatttatagagaaatgctatctttactgaggtgtaatcagttaccttagtgccccatctcaatacttttatttatattaggattgaacatcaggtaaatttatcgaattttgggttcgcgggttttgggttcaaaaaattgtacccagcccaacccgtaaaatggtcaggttggccgagttcgcagatcacgggtttgtgagtcacgggttgaccgggttgatcgaatcaacgagttgaccttatcaattttattttttttttaaaaaaaactcaaattctatatagttttttctatacattaaattacacatacaaattataaacttataatactataatttatatttgttggattagaataaaaaaacattaactttaaaatataaattataaacttataatacccttaagctataattacattttaagaattcactcattggttaatttggaagaaaactaaataaaaaaggattcagttttgatgagggaataaaaaaaagaggtctagacaata

SEQ ID NO: 29712 - DNA, 1287 bp, Cannabis sativa
ccatccaactgcaccactcattgtcccatgggtctccggcgtcgttagtgcataaattgtgttcaaccaacaaatggggaacacacacatattattggaacaccattattacacactttgaacaaagtgagttgaattctgaactggctgaagggagaaagaagtaggactatgctgctgctattcaatcccatccctccatccttttttgaggtttttatttttacaaagttatataattttttgtaatacgaactattatgggaatagcaagtttcaacattctcttcggtaatcaaggcgagcttaatcagattagattgtttgagaagtgttatgtggattgattgctgcttatcaaactagatattacgaaggaattgatttgatctttgtacgatgcccttattcctatatatgatggattattagaagaaaacgatgtacaagattgtcaagtaaacatatttgctgaaaatgtgaatattttctattaaatttttatgtcttttagtatttaactctaaaatttgcttcaacttttttttctttttcttaatcttttatagatatgcactttttggaaaattattaagttagagcattatttttcgtattgtcactatatagaggaattgtaaactatttagccgagattttatcagcaggttttgcagctgcaatttatcacatttgaatacacttgtatatatgaagattatacttaaagtgtggctcatatagttgaaaagattaaaagagagatacaatataagatggttgtattcagaggaaaatgaaagatagagaagagatgtatgtttagaatctacttgatgtaattgcttgattttgggccagatttgacttgttttgtattggctttggtttggaataaaagttttttttttttaacatgttttttattttaaaaaataattgagttattgtcaattttttttttttttaattttatctcacttcatttttctattcattttttttttctctcattactttttctcacattttctctcgcatcactttctcacattttctctccctcattttctatctctcaattttatctttcatcactttctctctcatagtctgggattcgtgtctagctccaaggccttaacttgtcttcgggattgggtttgagttcgggtcagcgtctgtgttcgcgttcacgatccagtgttgggatccaagttcggggttcgagtccatggctagggtctagatttgaggttcgggtccatggccagggttcagattcgg

SEQ ID NO: 29713 - DNA, 1637 bp, Cannabis sativa
ccctcttgaagtacgagtgcaaaggtagcatcgccccttgcttagcatgggcacccgaccaggcacagaaccctttctttgggttagttgcccggtgattttgggaagggagataacactcaagttcgcctaggtatccagccttttctaggtcccttaaatggccctcggttatgttggacggaggacacacccattttgcccctaaggcactttacctcctatgggggatcgccacggtaagctcctgggtgacatagtcttgcccctcgaccaagacgtcatcctgctcggatactggcttcccagtctcattataccctccaaagtgtggaggctcgaccactccttcctcctcagcttcgcaaggtctatcaagacacacgtcgtcctgctcctctatctcttggacctcaatgtccccctcgtaatcctccttttccacagcaggcagatcctgctcggcacttggcaacgtggcatgctgggtcatgtgagggtttgacgcattaactttccacatcgtctactttgtacggcccatcatccttctcttggacggacattggtttgtatgtcgtgcaacagtaacgacaggggcagctattggaataccaaagtcaccagaacttggacggccaacagaaagggtatcagcaacaccaggtcggacaatatatgtccagctggacggaagataacatttccaacccttcttcagctcccaaataaagcgaccataaccttctcctgtgatttgctcggagtaagagtggtgttgcacttcgggttttggagtagaggaacgatcactactcacctccaaatctatgaagcttgaattagaaagtccgtcactcgaagaggacggactagcgcgaagacaagtttgatcctcgtacagaagttgaagcagatcgtggtcaattcagtgttcgcctccccaaaactcaccagggttcatctacacaagacaatacacaagatgagagtttggctaggatatcgaacaaaaaataggcaaatataccgatcaggactactcaatagattaaaaagacgcaaaacacataaaggttaagctagaacccaggagtttgaaatttttgagttaaaggctaaatttcacgaagctttgaatgagcaagttgagaatcgaacattgcgagattaaagtcaaaatatcataaatgacgaggctgtacgaactattacagaggaaattacagagttttgagcctagattttctacgtatcttctacaacaagtcaagaacaactacattttctacaatggaaacccaaaaaattgaaggtacaaagttaaaggagaaaaagatcgaaaacttactcaccgtttgaagcctgcgtgttgtcctgatttagctgctcggatacttttgctagaaatcccacgatagacttgaaagaaaactcctttatgctctgagtttgttttgtggaaaaaatggtgaaagtaatttctgagaaatttcagccctatttataggctaacttgtaaaaaagggtaatcaattaaaaatccccagatgcttcgatttccccccaaaagtaaatattgggaagttaaaagcaatcaagtgcctcaagagaataatcgtcaaaggcgtgcaagg

SEQ ID NO: 29714 - DNA, 2090 bp, Cannabis sativa
attgagttaaatagccttctatatgtattagaatagaaaactattgactcattcgatggaatcttaaatggcatggcattgaaatcagacaatagtgacataatcataccgcttcagttttgattgaaaaaacaaagaaataaataagtaaagtcaaaatggaggaaaggtggtcttgggccttaggaagcaacaggccgtgttttttgtgtccaaaaggtagtttgggcctttgccttaatactcaaagtctcaaaataacttatgcacgagagagtgacattttgggaaagaattactacatacagaaaaggcattttaagttggtattggcccaaaattattgtggtccaccccttacaacccaaaccagggacggaggagatccaagaaggagactctgcctttatttagaaagaagaacctgacccaagtaatttcggaatttttggaacgcattcttaagtcagttaaaccaaaacagtgcaaggattttagtagtgctattattaatttttgggaagaatttgagatgaaaggaaaaacttaaccgaattcggtgttgcaagaattcgatcagatgtcatttgaggaggaacctctatcaaaaaaaaggatgaaagtttatttcagaaagagaacttcaatcacaaggagcaaagaagaagttttgaggaatttcgatagagaagaaatcgttgatgaagaggaaaaggagggtgaggaccctatgagtgaagcaataattgactttagtttagaaagtgataattcagttgaagaagaagactacttcgatgatgaggaagaagtagatgaagaaattctgagggatatatagcactatggcaggaatcttgtcataatcagatgtcttcagaagagagcaatcagcctgaaaggtcagtgatgtcaatgggaatgttggaggatggattagtataatgatgaatctgacctagaagaatctgtgactgtaatgggtctgtagttgataatagatgagaatgcagcggaatcaaaggagagacatgaattgggaggaaggaagtacaagagagaactcaaaaatcttgctttcaacattaactgtgaaaaaagtcaaaaaaaaaggaggggccccaaagggtttattatgaagatcttaacttggaatgtgagaggaaggggagacaagaaaaagagaaaatctattaaggcaactattagtaaggtgaatccgaatttggtgattttacaagagatgaagaaggcaacgattgataggagttttattagtagtatttggagatctcgatttaaagcatggattctaatacaagctagcgacagttcaagagggacactgcttgtgtgggatactagaagtatcaaggtgctagactccatggtggggaagttctctatctcggttttaatagaggctgaaggtcggaggccgtggtggttttcaggggtgtatggtccatgctcttataaattaaggtcagaattttgggatgaattggcagggttaagttcaatatgcggtgatttttggtgctgaggaggagattttaatgttgtttgaagggtacaagagaagctaaatagtaattcttggacgaagagtatgaagatgttcgaccaattggtttgagagttaaagttattagacccaaaactgaaaaaaggtagcttcagatggtcgaacttcagagaatagcctatttgttgtagactggacaaatatattttcaccaacaattggtgtgaggtatacccatttgtgagacaagaaatgttagtatgaattgtttcggatcatagtcctgtggttcttgattctaacccgctcaaatggggaccgagtccattttgttttgataatcttgggttggaacacaagatgtttttcaagaattttggggcctggtggaaaagagcataaggagtaggttgagcaggggctaggttcatgaataaactaaagaaagtaaaggaaaacatcaaagtatggagcaaggtaacttatggcaacaatcatttagtcaagaatgttttggagaggacactgctggttctgtaccagttggaagcatccaatgagt

SEQ ID NO: 29715 - DNA, 2388 bp, Cannabis sativa
  modified_base (2351)..(2358): a, c, t, g, unknown or other
atcttcatccttctcttcaaatagcagcgatcattatgaccacattcaatctttttgattcttggctcaaacacttcttccaccctttgcaatgttgtggtggcgccacatttaaggtgattgatgctcgacaacctaaggcactgatgttagatttacctggttcacgaggacattaattgggggaagtatggagtggcatttgtgagcaatttgcatgtttgatcttgcttctgagtaaatctaatcatgatttctctttgtgtttaattttgagagtcttttcagctcttaaaatattagattttacttttaattgttgtgtctactaacctggtctgtggatagatttagataatctttcacttgaaatggctattaatgctatagatcctactgtctctggcattcgagtgtacctaggttagtcacaaccccctgtattccccctagaacaatcttcttagtttttatctatttgataagacccaggttaatccctttacgttatttgtttagacttgcctatcttacctttcaattcttactttacctaaaatggaagacttagcccccctttttttttttctgcaactttgaatcttattgaaataaagaacattgtacactctctcgtgaataatactgacattcaagaaggactttcactagctttaccctattctacctcatggccaccttgtatagcacaaaaagctttaaccacaatgtcttgaaaagtttccttgaaaaatactggaaaagaaagtttcctgttagcattaaggaaagatcctctaattcaaacctgtacctggtatctttccactgtgaaggagataggtgtcgagccattgtcaatcaaccttgaatttttgactaaaatcctatcctccttgaaatccctgaccttgactcttcccttgtccctgtggctattaggaaaatcccactatgggtccaaatccacaacatccccttcacatgaagatccatatcgatggccaaacttgttggtcaaattgtaggggttcttctagaaatccattaaccctccctcctcaaaacacggggatcttttaaagttttgtattatgttggatgtcaccaagcctctcgcaagaggtttcctattctcttccctgggatgtcttccgccacctagcttaaactgaaatatgaggatctccgtaaccactgctatcattgtggatgtcatcgtggcttggaagtggttaagaacaagtctacgaaggtctcctaggttgatatggaggcctcgggtaatttgctaaactaatcgtgagcattaacttctaaggtcgcaggaagtatctaatattttgctagttgtggtacctggtctttccataattgtattaaacttatctaaataatcgatcgagttagtagtacctttgtatttgagcgacttagatagcctgaaacccttcgagagtctagcttgttgcacttcttctataaaaggcaatgtcccatggagtttgtaaataggctttctttgctactcgatcattcttaatgctcgcaagaggctttcttggtcaatacctcctggtaaggcataattggcctgttactattagtatagcagcaaccgcgactttgttagctaggattattacctctgtggtcgtagctggtgcgatcagcgggttgactggattagtcaggttgttcacattctgcgtgccttgatcccccattttgggatcacaatgctcgtcatcattacaatttcttggtgtccgggatcacaccctaaaattctcattgaggtgatcacgaagatcagctctatgaacatggtatctccctcctcgtcgtgtctcaacagaacctggcctagtataaatactaggggagcgattgttagtagaagaagaatgagatttgacttcatttacctatacttgtggccgagcctaacaatctcaagtttcactgttcagggtcttcctcttgcggtctctcttctctgtcacgaccggaatcaggtgcaaccagctccctactacgcatggagttatctgtgggttgattcagattgagaccctcttgcacattcacacgttccctgcgaatacaattattgttaggacgttcatttcgttgtctatttgtggtagttacttgagggttgcctgagcgcgtgttcgagactcagggtggacgtcgggtcctgactctcccatcgactttagcctgcaatgcctacatctatttctgcatggtcgcatactgtgctgttgtcagttggaaaattcctttaaaggctacgaccaacgtgataggcgagaagtggcctagtgtaaagcccgcttagttannnnnnnnattagcagttgtttatgtttaattatgaaa

SEQ ID NO: 29716 - DNA, 2053 bp, Cannabis sativa
  modified_base (33)..(52): a, c, t, g, unknown or other
tcttcttcctcaagttctctctctctctctctnnnnnnnnnnnnnnnnnnnnctctctctctctctcttctcttatatatataaatcttgtataaatatagcagctgattttgtgtactgatggtgtatatgtatacatatgttattatgatttgaaatcagatgggaccctattaatggcatgttagagacccaatatacgccgcagcccagcatgaccagacacctccttaatctccacgtagaggtttgtcttccttttcctattccttgacacaacatatcaaagattatgatgatgagagagtgagagagacctcactaaaatattccagaaacatgtagtatatatgtgaaaattaaatcttatattttgcacttgttttcgtatatgcctttcataaatcacaacaaattgtttgaataatatttctaaccatgtaaatcattcaaaaataaaattaaaattagtaagaagagctagcacatcaagattcaaactatatatactaacggaaaactccatagtatgctgatttctctcacaaatataagaggtggcaattcaaatcctactctcccaatatctcaaatatatagtatatatataacattttttttctatgacattgttgatctctcctgagagagtgagtgagagcaaataaacccaaataacctatattctaaatacataatagatcacaaatatgatttttttcttggagaactattatgatttttatagagttttattctttaatttttttttttttgaaaacttttcctatgattgtaaaactgatattgtgaatgttctcatttagttgcattttttgtttattttttaaaacaaatttacttatgtgatcatcatgatcatagataggttgcaatacaaattaatatctctttagctaactaaacatacaaatattaatatagattcttatagaatatatcattgaatactttgccaaattaaatagtgtcacattaatattcctacaattcagaaaataataattataaaatataactataataaacaagacatttgtaagtatgttttaatttacaaatgtgataatatttctgaagaaaaatcaatcatatttatttaatagcattatatatagatattggagtttaatttcttaatctctcctgataataatattaattacaggaatctcatcaacacacgtctaagaatcaaaagcatagaagtaactcactgggtagtagtcagaattctgaatcaagtgacactcaagaactagatttggagctaagactctcactttgatcgatggtgccatttcattatatgattatgagacattattaattaataatgttactagctatctctctctctgcgccatgcctcaaatattaatgcacacgtatgtgggttgtgaagtaataatgcacatacgtatatatatgttggttcttaatttatacaattttttatgctttatgaatataagtacttggaacatatttgcaaaaattaatgttcgagcatgaagttgtctcatcatataaacatatatatagttttgccgaatatatatattgaaaaaaaaactacacccaatgaaaactcataggagtgtaatttaaaatgctatatatatacctgagatctttgtagtaaaacttctttaatatttataattgttatatacatgatcctaattaaaataatatagtggtaaaactactttagtttatgattttgttacattcgtgtcctttttaagtttaatgttaattcagaaacatatacatatgacaatatattattagattatgtatgaaataagttaaaaaaatacgttgttacacgtttctaaactaatatttaacaggcttaattgacattcaacaatcaaaaaatagtacgattgcaataaaattataagaaaatgtatttttattgtcacttttttttattaggttaaaaaaatttcacgacaaatatatatagctatgattgggttttcgcactttattccagttttcttctttaatttctttcttt

SEQ ID NO: 29717 - DNA, 3027 bp, Cannabis sativa
  modified_base (2969)..(2987): a, c, t, g, unknown or other
agatggcctaataatatgagatcttctagcgttaaatatttgactctagcaacaacaggtttttagctcatgcctattaattcttgtgaaaatgagtttcccgagccacatgtcatcatgtaagtgagaagtggtatgcctgcttccaccaagacaaggtaatttttttaaaaaaataattttttttttttttgagaaatttgttaaggcatgcttaaaataagtgtaagatcttttaatatttcaccttaaataatatagctttaatactccaaaaacccttaataccaataatactctctccatgtgaaactcccactctccctctaactctcactctcttgaatctctctttctctaactccccaaacccacaccaacctgattgtcaccatcactttaccaccaccggatgcaacattgacgaaacccaaggacctcaacaaaaccaccaccttcgacaaaactccaagcccaaactgatatcgcgaaacccaatcccaaactgcgaaatcccaaacccacatccaaaatcgcaaaaagtatatttttctaaacttttttttttattattttaaatgggtttttggatttttttttttgtttgtgcttcattgtaaggaaatttgtttaatttaggttcaatttttatgtattcgtttgaatttcattgacacttgtttgagttctaagtttttggtcgattatcgacatattgcgacattatttgcgatgtcttttgatttcttctcgaaatgttgtggttgttctttctattagcgatgtttcacaacatgttccgacgtgtttataagctatttttggtcagatgtgccttttgaaattttatttgtttaggtatagtttaataatgtcttacaatatgattggcgactttagatgatatgttcaatgataatattgtcattagatgtcgttaatagtatcgctagatatcgctaaattcggttgaacaacaaaattgctaacaattaaattgatatgttaccaacatgtcgtgaaataccgcagaacactagctatgtatttgtgattccattttgctatgtatttgtgatatgtgttgcgatatttattttttagtttttagcaaaatttcttacaattttgtaaatggctcctgaacttaaacttccagttttccaatatttcacaggatgtcttacctattggggtacagataggtttagagatatcaaggccaaatttacggagcttgagttgattgatacaattaaggctagccctttcagatacttctaggaagctggagagttgactttctcaggagctttggtccataacctcctcttacggaagatgaaagtcgataatgaaaaggaagatgaggtttggtttcatgtgggcaaaaatggcatgagttttgggcggatagagtttggacttattaccagcttacttttgggtagtgcccctacagaggaagaaatagaagcaaagcccaacgactgcctagttaggacgtattttgaagggaagagttttgtacaattggattcactattgctccaactacagtggtgtaaagtaaaagataatacctacaagcttggacaaattgctattattgaaggtgtattagtatcaaaagagggtagtgtccatgtttggcctgacatgttaaaatttgttaatgaccttgaattcttcttcaagtatctgtgggatgagtgtaacaccctactagtttaggcgtgattttaacttaattgtgcagctcgttgctaatctacgagtttattgaaaatcgtgaataattaacttgcaactccacatcaccatcttcgttcaaatctactacaggatcattattgtaaaagggagcatcaaactcattaaactggtcaaatgcattgtcacccctgtcctcatctatatccgtaggggcatgctcatttaaacctactatttaatctatttcttggataaaactctgaacaatagttcttggggggatagttggcggagtaggccctaacatcacatgcctcttagtcttagtcataaacagtggcaacaagttctccaaactcatgcgtgccttcattcttaagaacaatcttacttgactatctttcactaaaacctttggttgtatcatattgctatcatgtacatgtaacacacctctactttcagttcatatacaagagggtctatatccaactcttcatacaaaatttcatgcatcttctataaagtagtgttaacctcaaacattaacatcttactctttgggttattcaatatttagttgaaaccttcaactgcccaagccccatcatatattataaccacaaatacagttgaatctgcaaaaaaaaaaatagttaataaaaactatatcgagaaatatcgcaagatcgccaataatcgcacactacatcgataagcaagttgcataacatcgctacatgtcgacaaaatacccatctcctactaaaccaacacagtactctaaactattgacacatgtcgcaaataatgtcgacagaaatcgcgaaaatatctatggtaagcataaattggcacaagtcgtaaacttagtcgcaacatgttgtagaatgttgttataagtcatccctaacctttagcatactcttatgtcgctatgtattgctagatatcgtaaattatcgctaaaacatgaaaaaaaaagtagaaaatacaaaactcacgcagctcaagtttcagaaataaaataacccaaataaaaaaataatacgtgtagatccattcgtttcaacctaaatacaaacttaatctaacaataattattaaataaattacatacccattttttctttgaaggatgagttggtagggagtttggattgctcctacacacttggttgaaagctaaaactccaacaaagggtgctctgttacgaaatttatagacaatacgcaagtgcacgtaatcaagnnnnnnnnnnnnnnnnnnnaggtcgaaccacagggaattgaactaaatactactaaatt

SEQ ID NO: 29718 - DNA, 3368 bp, Cannabis sativa
gagagagagagagagagatagggaaagaaggggttaaggtcttaggttcagtgtgttattctattatttgcactgacatctagctggatgacacgcttctcctatatactttctaacttgggcagatacactcttaggagcccccaaggattgatacaaaggtccatattatccatacatagcaaaatgtcggggcagagtcattaagggacatccgaccaagctcaatcatgtgatcaactcacatacgcctgctaggaaatgtgagttattggcaatttcagaggtggatatcgttatttctaagtttgcatgtcacgaagataattcctatattttggagataaatgcaaagaataaaggcaataagcctagatttcccaatctctgtattataattatggaaataaactagtttcttattttatttgttatagattaaaggaaatcattcttcatgtaatgagcccctataaatagtggtttattctcactattgagagacacgaaatggattcacaaagaacactcaagagagaaataacaatctaagagagaattattgtgagatccattgtaagagctttagagagaatacttttttctttgtctcatatgtcaatacaaccaaaagaggagtaggctattaccatcatcagatggctgaaactctattctggtgttctctttatttactgtttttgatttctattatttattttatctaatcgctttatttagactcactattgttggctagaagcaaagtcaatattttggtgctttcattgagagcagaaacaaaagttttttgtcttaaagtcttgataggatacaggatggttgtaactcgtgggagaattcaaactgatctagtcaactagatggtgatagatccaagcgtgcagactcctgacattgtaagagaaccatagggacaaccctcggacaagttaatacacaaccaccaatggtgggccgtggagtgactttcctctggctgggttcactctaggcatgcatgaaagaaactgggaataccagtacggtggctgagcacaccactcctagcactgatatcccatccaccacgaactctcaaaggccacttagagatgatgctgagcttcaaaacttgcgagctgtgctagggttaatgcaaggccacaataacatatttcaccatcaccatcaggatctccgagtagctatcaaccttgcctttgatgaacaaagatgttagttcatagagtagagagatcaagagatggaagtcatgagagccctgtaggcagccattgacaatcactctaaacaggccactatactaatcagaagggcctacaaagttaccagtcaccaactagtgactgattctagcgttcccttgtgatcccaggatgggtcggaagagtatttagctaatcataccgcatagacttatattagtcaacgtactatccaatccaaggccacaggttcaaactgtggtccaaacggtagatgggcagatcttgccaaatcgtcccttgggaggaggtactcaactaaataatcatactcatacagaggtatcaggccaacctctcaactaagtgggtcagacacaaagacctcttggtgcatcagtgttcgaccggttaggtatcgtacatgaccttagaaacgtttaaaattgcaaaagggggactggatgggcaaaatattccacctaccatccagttaaataactatgtccagatctagttttaagagatcctaatgtgacacaggttagtcaataggctggccaagttcatccacttgtgcaagcacaaataaatcaacttaaaagcctcgtataaggcctaactgacctaaaaatcaagatcttgaacttgatgggacaagcagatcacccttctcacctaaaatcaatgctgttgacctacccccaaagttaaaaatgtcagtatgcaagatgtatgcatgaaaagaggatactttatctcacttgatatactttgagatgcaaatagccttccaggagtaagaggtaattaatgtacagtgcataatttttccagccacactagtaaaggccgcccagtaatggtatttcaacctacctctaggaaagtttaattcatggatttctttctcatctaaattccatgcacaattttcctcctctcatcagcttccctctcatctagaagacctagaagaagtaaaacaagtgccaagagaacctttaagagcttacattagcaggttcatgactgaagcaacaaaagttaagggtctcactgaggagggaaggttagccgcaatattagaaggtattgaggctctgagagaattgtggaaggatcattaaagattaatcgtaggatcaatggtagaatttttggaccgagcatatggattcatcaaactcgaaaaagtagtacggtgtgtagatatagttagacaaaagaaaaattagcaacacaccactacaaccactgcatctacccaactagcccacaattcacagcatcccagcaattcgaatcaaagtggaaatagattgaacaatggcaatagacaatcactacgacaaaaactccttttagtgacctgttttgagagtatctaaagtgttttagtgacccttcaatgcgggttactaatgtgggtgtcaagaaatatactttttagagttacaaaatgtgtgtcactatatcatttttttatttaattttttagttcatataaatagtaactcaattttgagtgtcactatatcgttttttatttcatatatagacagtaactcaaaaagggcgtcactgtataaatgtatatatattttatttttttttttattttaaaagtattaaataatatgttaattattttttttaataaaattgattcactaatcaatattttctaataatcatgctaaaaccaaaagtttacaagatgaataactttttttaccaataataatatttttcatatataaaattaaaaatacataatttaaacccgacacaaacaaaatcaatactaattacatcaataatttctcaacataaatacaactctaattcactacatcatacatttctgaaaaagaatatcatttttacagtcaaagaagggctcatttacaacatacacttttggaaaaaaaatcatttacactaagcaaaatcacacagagaatgaagaacaacctagatcaaccacagacccaaactcgatcaaacacaaagccctatcgaacatagctctttccgtccatctgcatacatacagaaacaaagagaaagaaataaagaggcgatggagaggaccatcaacaccattcgagataaaatgagagagagagagagaga

SEQ ID NO: 29719 - DNA, 3845 bp, Cannabis sativa
atagtcttatgatttaggatcatttactatattttttttgaaaagaagacataaactaacatactcttatgatttaaggtcatttactataatttcacatgaaaataaatggagtgttgtcggcatgaaagtgggccaaaagtcatagtccaaaccggtcagagaattgattactatgccacaaaaactatcacattatcatcaatatcatatcagatctcatcgacactaacataacatgtctatattatctttgtttttaatctcacttgacagataaatctagaagagttgtttcggataatacacatatatatataaatactagtgtttcgccaccacgtgcatagcacatgtaggaattgtgtgaatgaattttttttattttgtataagataattaaaataaaataaaaactatgcattttttttttgtaaggaactataagaattaatttgactaaatataaataaatattagttattaaaaaattagaacaaaaattttaaatgaaatctaatttaatgaaattagattattaaaacaaatttatattactttgtatgaatacctaataataattattataaaaataatattttatatttaattaaaattgtatttatttaaagatacttttgttaagcataacaataaaaaaaacatttaatgatttttctgtttctcctaaattaaagaaaagaaaataaaaaagagaaagagaaaaaaagtatttatattttaaaaaaaaaaatagaactgatttgtaattatgttttacaatatatagataaaatttaaaagtttggaaaagaaaaaaaaaaaaaaaacaggataaaattaaaaataaagaaagaagtaattgttagtcagtctcttactttttctccatattataagaactaaaatttgataaatataactacatgacaaaggttttttgcctttttcttttctaagcacctcaaaaggaagagttttataaaaatgattgattcttattatatataataactatataataaagagatatacagatgaagctatagtaaaatttaatttacacaattttatttaattcaatttataaaatatagatattcgtatttatataaatatatttattaatatataaaagtaaccgattcaatctatttacatatatttatataaaattttaaaaaattatagactatttctacagtgtatcccctaaaaagagtgcaccactacatttttttatctatttcagcatttaaaaaaaaaattaatctattttttataattatgtacgttatagttatttaagatattctgcaaaattttaagaaattaaaataatttacaatatatagaaagcaatgcacataaaataaaagagttacgagtgcaataaattatttgaaccatatttttgatatgttaaattttttcaaaagtctcaaaattttgtaagatatcttaaataactacaacgtacacgactttaaaaaaaattggactaaatttttttcccaaatactaaaataaatagagatatatccgtgtatttctttttaaaagagtgtatggtagaatttttcaaaattatatataccatcactattttattgtaagaaaattagccatttaaaaaatttaatacgtataatataaatatattttaaaatttaataaatcaaatgtatattttatacttatatataatttttcgtctagatacaatttaaacaaaattaatattttttttaatatataatttttttcttcttttaaatttattatttattattttatttttgatttattgttagagatttaaaataataataatttattttattaaattaaatttaagttattatacatattaaattcgatctaaaatataaaatcaacaaaatcaaatacattatagcaaaataatacacattaaattggtcgtgtccacttgaaattgtggaaataataggcataaaaaaactttaagttggattgtatatcattgggaccatgttattttggaaacggatagcttggtctgtgtccaagctatcaaaagtaatttttctatggcttcccaattttggtcttaccttgttcaagatatcccgtaatttgtttttagttttcccatatatattaaattatattttattaaacgatttgaaaataaattggctcagattaattaaacaaaacttatgtttattaaaaaaaaaaaaaaaatacacattagattggatatcaataatatcgatctccacccacgcggcttatcgatccatcttattgaagaaatcgctcctcgttaccaattacatcaggaaggctcagattacgatagtaatcccaatcaacgactctgaatccgccacatattttcagacaaatttctaaccatcgatatttatacgcccacttattattaacattatctaaaaagaaaagaaagaagtttcaactaatccaacacgggttatgtgtcaccaccagcttttaagggtcaagacaaagacaatgaccaatcttatcgtgaccgacctcaaataacaagtgtcaacacacccacttcgccacgtgtcagccaaaccgacgtgtatagtattaccataataattacactttaaatcgaacgtgtaagaagctagagacatgcacgtaattgagctctttaagcctatatataaagagcctaacccaactcaaatttcaatccatcacactacaaaaaccacaaatataatcataaaatatcattttttgttttaagaagtttgaaaaatgtctcatttgcaaaaccaatatggggctactacagtaacaccccaaactgatgagtatgggaacccaattcaacatagcactactacaacaggtggccatatgagtggaggccatggtggggcctacgatactactggtggtcctaccggagttggttacggtaccactggtggtactggcactggcactggcacttttgatactggtcttggcggacaccagcaacagaggcttcatcgatctggaagctctggctccagttctgtaagtatctttaatctctttcttttttcttaaaataaaaaattctgtattaattaaattaaagtcagatatatatattatatattaaataatattaatattttgatgatgtgatatagtctgaggatgatgggcaaggtggaagaagaaagaagggactgaaacaaaagataaaggagaagctgccaggtcatcatgatgatcaaggtcagcagggtcatgttggtcaaacttatggaacttcaacaactacagctcctggtgtttatcatgagactgagcaccatgagaagaagggaattatggaaaagatcaaggaaaagctacctggtggtggtggtggacaccatgaataataaatatgaacaaaatactagtacttcaacatcttatatatatatttatatatataaagtgtgtttgtttgagttattaataatgatgatcatgatcggtgtgtgagtgatgagtgtgtatgcatatatgtatgtatatgtatatgtattgcttattcgtctgttgtattacccagctgatttccagtaataataatatatatatgttgtgcttttattattatttcgtttgatcagtattaatatatatacaactgatttcgtgaacctttctctctatttataagattaaatttatatatatataaataaaaaaaaaagtttactttagtacaacaaaattgtcaaatgactaaaattattaattatttctgtagtatcactaaaaaactgtgataaaaaatattaatcagaaaaaattataatttgttttttttt

SEQ ID NO: 29720 - DNA, 1195 bp, Cannabis sativa
atttagaaaagtgtgaaaatggaagggtaaagttggaagaaagaatgaaaaagaaggtataaattaaagaaatttagactgcgggtaaaaatgagaggcactaaattaaaaaggatataccatctaatttcctcattttcaaaagtacctcttatttaaatattaagttgtcatccaataaagatgagaataaaatcttcttaattctcatatattaatctagtaaattgcttggttaaaaaattaatctacaaatattcctataattttttttgaaactgaatattcctataattttatataaggaaatttcctccaagatcaataattaaaaatccaaacaataaattttttataaactcccaaccagccacatttactaataaaaaaatttgaattatctatatgatgcaaagctaaaatataattcatttaggaaaaatgtattataattgtgtgtcaaaatataatataaattactctaataacagttaatttagttcggtaataaaattatatttttttataaaaaatataatgtaaatttgacacatatagatacaacatttgctgtaatataaaatttgcatgattataaatatatttttattattttattaatatatttagttataatattaatgataaattatttatatatatttttttattattttatataatataaatataataatattattgataaaattattactattttatacttttaataaaaataattaatcttcattaatgtaaatatattacaaaatatatatttttggaatactattttttttttaaaaaaattacatttttacatgaattttttttatatatttttaatatttttcataaaaacaacacgaaaacaacaaaaaaattacaaaacgacaataagtgtacaaaataaaaacccgtattttttataaataaaattaaaaaaaattataaaaatatatttaaaatttcataaaattatatttttataatttttttttttatatttgtgaaataatcacaatattttattttgccaaataatgggcaatttgtgcatctaatctttgttcgtgtcaattaggttgtctttttccccttctaaaacgttgtacttcttggtaaagaagtgtgtagtggaagcctatagaatagagaaactcaaataaaaaacaaggaaagggatacgtgg

SEQ ID NO: 29721 - DNA, 1881 bp, Cannabis sativa
aaactaagaagccattatatggcttgaaataggcctccaagcagtggtttgctaagttttcaagtgccttatttgatgaagggttctctcactctgaaacagaccattctctgttcataaaacattttcatggaggattcacctttctactggtatatgtacatgatgtcatcttggccagcaataatgctcaagagcttgaagctctataactcaggttcaatgataaattcaagctaaaagatttgggacagttgaaatacttcctaagacaggaagttgctcgatcagataagagaatttttgtctcccaaagaccatatgcactacaactattggaggaccttggttgtcttggttgtgaactaatgagcacacctatggaagctaatcttagacttggccaagatgagaaggaaaagttggcagatccaaccttatatagaaggattgtgggaaagttgcagtacctaacaataacaaggccagacatttcatactcagtcaataaactgagtcaatttctggccacaccaagagctagtcatcttaatgtacaaagggttctgcaatatattaaacgaactcctggctaaggcattttccttccacgtacatctgaagtcaaaatttaggcttatactaactcggattgggctgcctatccaaatacaaggagatcaacaacaaggttttgcatcttcattagagattcaatcatctcatggaaatgtaagaaacatcacactatttctaggtcctctgcagaggttgaatattaagcaatggacaatacaacttgtgaaattatttgacttttgtctatcctaaaagagttgaacattgagcacaaaggggccgcattgctacattatgacaacaaatcagcacagcatatagcagtaaatctgattttttatgagagaactaagcatattgaaatagtctaccacttggttagagagatagtgcaagaagggatcttaaagacagttcatgtctcctcaaagaaacaacttgctaacatcttaactaaactactatttcctaaccagttcaagtttttcaaagacgagataggcttaaaggacatatatagtccatcttgagactgagagggaatatcaaacttgttaagatagagttagtgttagttatttgttgttagttgttacatgagtttgttaaaaggacatggctttctcttttgtactcacatactataagtagcatctctctcattgttgtaactgaatgaataatacacattctttcctcatcttcactgctctgttctctctctctctctctctctctctctcttattctgtttttgttccttcgagctaatatcgaaaaaaaataataatacaaaaaatttacagaaagttcactttcacaatttcctcagctcattaatgcgacgaccattgaggaaatcattcgattcccaaccccaaacacttccaccgctaagcttttccagctatggatcattttggtgaacatatggagttgctaaaactctccaaattcaagctccagctcggaactctcatctctgaatttcgagaagtccgagtatgcttttccatcgtcattttatctatatccatctctctctctctctctctcagctcttttgggaaaattttcaggaacgggaacgttcggcgacggagcaccttcatcatcgaattcaggtcttattcttatgatttatttttattggaataggtttttcaatctttgaatgattgatcggtgatgtttggatgcagaaacaaaagcaaaatgaagaagatttcgctaggaagattcaggaattgcaagctgaattatcttcctctaatgaacatcgccagaagcttgagagaaagg

SEQ ID NO: 29722 - DNA, 1549 bp, Cannabis sativa
ggagtggtcagtcggagtgggttgtgtggggggttgtgcgatgtgggttcgggtgaaggggaagaggcagagagagtttgagggaaagagagaaaaagggtttgaaattttgagaggagtatttttggggttttgaaaaagtgatcatatattttcaatgttaaaaagtattagtttagggaaaaaattatcccctgatgcatgcatagaaattcaaatttcccttttggtttttgtttggatagataatagtgagttttgaatcttttgatggaatcccttacttttgtaacgtgtagtgtacactacttcatgattagaaaagggtgggaaatggggtggtgggggttgggatcaaagtatgttcaagtatagacagctttcatggtccatcaatgaatctagcttgtttcttctttaaaatatactctgttcttcactattacacaggaatgggtggattggtaccaataccatggtagtgagttttggtttcaacccaatgaatttgcaatagtttggttttaatatttggacttgtctgcagcccatatctcatacttactcatgcacacgtacagatctataataaagaaagggcccattctttttatttgggcatttctttatattctcgggataagttaaaaaatactttttttttgtttttttataccttaattaaaaatatcttcatattatatttaattaaaatatatccacttttttaagtaggttatccaatatacccttactttctatttaagtctaacatatagtttacgttaacctaaatgatccaatgggaacatcatctataaaagtgggtatatattaaaaaatataaaaatggaggtaaatattaaaataagtaaaataaagtaggtatacaatataatttcctctatatacccttagcttaactttatcgtgaaaaattccgagtaggattgtcatggactgtgttgcctcttagagcattttcaaggcaagtaatgtctataaaactcaacatcaccttaaaatataatattttattttctctctcaacgacatcaatattaggtactttctgctaaataaaacactttaatgctcaacaattctttaaataatatctcatacactattatttaatatatcattcattttatttctaatatgttattttattattgtttttctatttcagcaaaaaacttttatttaaaaaaaaaatagataccacattgctcctgtcaaactacagcagttatccaactatttaactccaatgcaatagctaccattaaaagtagtccatgctatctttgatgtatagagcaactttgatatatagagctgctcttaagataggtttgttttttttcttcccaagttcccaatgctatcttttttttttaatcaaaatgcaatttattaagataaattcgctattacagaagaattaaaatatcgtggacaagtattcgtttatacacaatctcctaaactagtaacaaaggttgtcaatgtataggcaacactattcgcaaactgtagagtagcc

SEQ ID NO: 29723 - DNA, 1781 bp, Cannabis sativa
tggaagttctctataaagtcaatgtgtaaaatcattcgacattagtcggtccatcattcctccattttgatggaacctcattggaaatggattttggggctcgtatgaataatcagtacaaaaatttttggtggcaggttcttagtgatgttctccttacccgatccaagcttagcaactgctttgatatttcctcgacaacttaccccttctacgattcgcgtgagaaaacttctatacatttgctttgggattgttcttttgctttaactttatagtttggttgctcttggggtattcacactaatagatgcaaaagttaatagttggtgggagtggcttgaggtttttaaatccaatttcgtttcattttcccctctagaatttttatcaatttctttatagtgctgctattatatttgaaactgtctagagtattatgtatgacataattcatggagggtcttcccagccattctcagtaatcattaagcgtataaacatctaatttaatgagattactattgaggcagattcgcattccacttccaggcctgcttgggttcctcctacgcatggttggttggtgtgaatactgatattactattggcaaagagaattcctttagggctgcattttttttagatgtcaatgaaggtgttgttggtgctttctccaagaaatataatcaaaataatcctttaaaatgggagcttattgctctaattcttgcggctgaacaagctggtgttcaaaaatttaaaaatattatcttttatagtgactcgtctcccattgttaaagcaattaagagatggacatgcaagagattattttcttcatttttgagttggttaaggtagtcactctaaagcttgattgttgtgaaattatttggatacctcaaatctataattctttggctcataatactgctcagtgggctaagaggaatgaatttgaaggaatgataagtgttgataatttggctacgactgcttggaggaaccttgggatggaggttgattgttaccatccactgatctaatgctcttgttctatcttggtttgttttgttgttgttttattttctggcttttgtgttccttttgtttcttgttgttggcccaagactttgcctttttatttgttatttgtagcatatatgaactttgtttttttaattttatctatggctacctcctattggaggtttactttactaaaaaaaaaaagaaatcgacttttgcagcactcctaataaagcttaggaataattagcatttttgtctcttaaattttttacactaccaagttgcatcctctatgctctattattattactgtcagtttttaagaccgatgcctatgctactgacacaaaatgaaatataataggcgtaagtccttaatagtcgacattacaattatgcgaccctttaaaatcaacatgataaaaaaaaactcaaatctgagatacatctaatcaaaaacaacaacaatccaaaaattacaatctcacaacaaacgtcaacaataacataatacaataataataagatatgagatgaaccactgcctcaccatcgcaccaccaccaccacgtgcctgagaataaatacaaaatgaaagagagggttgagcgagagagagagagaggtcaaaagagagtgtgatagagagagatcgaaagagtgagagaagaaaataacttactatcactgtcgaagctttgaggtggcttgcacggctgggacgaacagaggagggggggcttttg

SEQ ID NO: 29724 - DNA, 1515 bp, Cannabis sativa
tttaatatatcttgaaatttttttgagaaatttaacaaaatttaacacacaaagttcaaataatctgttacaagtgtgacacttttattttatatccgtgtaaaataaaatatttaaacattgcttatatattgtaaattatttcgaatttcttaaaattttacaacttgttttgatatcaaaacaaacattagtctacatttttttggagtacattatagaagcacccaaaatatacagggtaaatattattttggaccatgtgttttgtaaaaattaccgactgaactttctgttttcttaaatgataattcaaaccctatattttttaaatggtacaaaatagacctcaaatttaattttcgtcaattttttttataatatattaaacttaaagcaaatttttaatacgaacagatacaaaaaaatgtaaccagattggtcataacaccttcaggtcaagttattattaagttttaattcaacaaaaattaagctcatgttcttttgtactgttttaaaaaatacaatatgtgaattgtcatttaacaaaaaagaggatccaatcgataatttttacaaaatactaagtctaaaataatatttgctcaaatactaattacaatctcttagtcaacattcgtgcctgaaatcacataccaaaatattttttgtcataacagtattcgttatagttacaatatcatttatataaatttttgaaagattctaaatagtttacaatactgaaaataaagttcctgatattctagattactaagtatgtttaaaataatttaaatctatttttaataatgtaaactattcaaaaaataatatcataattataataaacactgtcataaaaaatattccaacatatatttcagcataaaaattgagtaaaagataataataagaggttgaagtgtctcaaacttattagttttatattgtaaccgctaattgcggtagaaacaagacaacataggatttgtaatttaatagtcttaaaacaaaaacacatttcaataaagaacatactcttttttctcttctccaatgattatccattccaataatacccacttcaccaaacaaacaaggatttttatggaaataatccaagattttctcaagtcaacccaaacccaaaattattttatcaaattttgacaaacaatacaaagaacattgtatattatcatcatctttgaacagtctgagtattatgatgatgatgatgaatcagaatccaacaatggaaattggttctttgaggtcgaacctcatctgggtcggccacagttccaatgatcgttgccttcattccataaagttctatccttttcaccatagaagcattttcccgggaaaatggaaaggaaacagagatgggtttttccctaatcgtcattttcatgttaattgcaaaatccaggtgatttattaagtacccttttgatcaatcaactcatatttcatgtttgaattattaaagcaacatgttttgta

SEQ ID NO: 29725 - DNA, 1510 bp, Cannabis sativa
ctgataacccaccatgagcttaccttggagttaagcatacttaacttggagtaatctcaagatgggaaatcttttgggagtcatctcgaaaagtgtacgagtgaggacaaagtacgctagaaagatttgtattaggatgaagaattagcaatcgttccaaaaattattaagaggaaggggtatgttaataagtagagatttataaggcattaagataagtataaattagtggattgaagtaaggaatgcaataattgaatatatatcagaatgaatacttaatttgctaatacgttaaatcaatacatcaacttaagaaatcccataggaggaatagaaagacataataatgaattatatattgtgggatcttatgattttgaccgagtagtaacggttggacataccaagttaatatgttgtctattagtgcagatgatttatacaataaatgagggtatggagttcatacaaaggaatagtaatcttttgaaatttcaaagttaatatctttggctatgatgttaagaattaaagaaggttattgagaaccatggatattaaagcagaaatagtataatgtttaatttttgaaagatgggtaacatgaggatcaatggaatattagaaacatgttatgggcatatttgatgaaggttagattattttagaataatctcttcccctaacggagagtttatctaaaagtgataattaaatgtaccattggttagataatttaataagtgtggtacgaaagaaataatagacacatgttcattggactaacacaggtgagaaaagaatacgatggaccgaaaagatccaaggaaattttaagtacacagaaaagctacgctgtttaaagcgtaggaatatcgagttccaaatgggagattttatttttctcgaagtattgcctatgaaagaagtacatagagagggaagttaaaccctaaattcattagacctttcgataagggagtaagtaggccaggcagcctatcagctagccttgaaacctgcattgtccagagtgtacaatgtgtttcatatcaccatgatgagaatatatgtatcagactcgacccatattctgagttgtgacgatgttaagcttcaaacaaatttattatatgagaaaaacatcctgtccaggttttggactggaaagaaaaatactttaaaataagacaagtccactagttaaaagtgttgtcgagaaatggtgtggcggaagatacaacttgagaattagagttgtaaatataggagcagtatcccgaattgttcaggtaaattttgaggataaaatttctataaggagggaatagttctattattccagaaacttaattatgaataattaggatttattatatattatggattaattaggtagtaatgagtatgattaattatgatcctgctaacctaatctagcataatgtaaagcccgcttagttaatttggaaattatcagttggttatgattaattatgaaattatt

SEQ ID NO: 29726 - DNA, 3870 bp, Cannabis sativa
tatatatatatatatatcacctgctgctgttgtattactaaattatataaccaatacatttttcaaacaaaattttaaatttccagctgaagcaaatgaaaaaagaaaaagtaattattagctgaaaagaatcatgtaatattgtaatatacagagtaattatatcattgttctgttcatactagtaaatcaacttatctgacctcaaaccaaaatcgtgaatatgccaattagttttttgtcggctaagagtgacaggaaacagaagaataattaaggatattgttctaaaattagtgggatggttttttttttaatatgtgctactgaaatatgataaaataaaaattatattttaaaatttgtatttttataatagcacagtaaaccgcactgcaccaggatatttagaaaaattacaaactgcaatgtactgcatcacaaatagtttaaaattatatatatatttatatatatatatacatattttatgagcagtttgatgtaaatcattgactctagatattgaattgtataatagatatatgtgccttaaaaaatataagatatgttattttattggagctagtgacatttatagcaattatgaaaaagtacacatgcacataacatggtagaaagaagatactaattagatcatgatattccacttctagttttttcttttgtttttttagctggatgatcaagataatgttgggtctattatttggatttgtgtttggtatttgtttttatgtgtgttttaggtgaaagattgggagttctctgtttttgtttattttggtgtttttcgagtccttttatgatgaaaagggtcaattattgaaaaagagaagttcgggactcaaagtcatattcagttgcagttctcgacactaaaatatattcaaagttcataattttaagctccaaaagttgtggttcaaagtgagacttcccagaagaaaaatgaaggaatggtagaaattagaaaactacagtgaaagttgcggcatagcagagaatgcagcggcactccctcattcaccaaaaaaaataaaaataaggaaattaaatcacgattttgggaaacaaaagaaatgtcgcgacattacaccttatgctgtagcatttgcggtttttgggaaactttaccgtttttggtttataaaaaggagaaatgctaaaaggcactaatggtgtcaaacaccctcctacgtgtcaatatcgctattggtgtaatttagtattgggtcccatatagtttaatataatagcttttaatgagtattgctagccaatcgtaaagcgatgcatcttaagggtgttaggtaccactggtacccaatatagcaatgctctataaaaaggtgtggagctcggttttcaattaattcaaacttggagacgaaattggagcagaggagaacgattggaagcagaagatacttttggagttttccaattagtgttctttctcatctgtatctatcttttatgttttttaatttaatctttgttgttttagaatgatttttatgagctaattttcttttaggatttttatgtgaaccacttgaattacttttatagagtaatgtagttatttaatttttttttttttcttgttctccatgcaatttgatttaattatgaaattattgactgatcacctataattgttatctatgaatttgaatcaaaattatgaaaagtgagacttgattatgttttcattgttatggatgcaaatcaatttagggtgaaagtatctaaattatttgtatgattttatatgttgtcatgtttgctgctttctttgtgattaaactttacaaaaaggaatataagcagttttcacatatattgggtttgtaagtcttaacgagcttatgaactacttaatataacttgtcaatagaataggaagaagagatattgggtaattgcattaagaaataaaagaaaggatagctggagattataataatccttgtttttctcattctttatttctcaaatttttaattatttgctttgctttatttatttttctaaacctttttaattgatcaaatagaaatagattaattcattggtaattgataatcagtcctcgtgagaaagatactctactttatcattatattacttgatttaaatgtgtatacttgcgtatcaattttaaacgaacaagtttttgacgtcgtttctagggactgaaaaatcatcaatattagtctaattaattttttttctaatttgattttattttctctagtttctaacctatttagttattatttttgctatctcaagtgaacttgctatatgcgcaacataagaggagcagatagtcgtgtttctttgaatattgagattgaaaaatattgtaagcaaaatagaaagaacaagagggaagtcaagaaatctgtggagatggcgcagattgatgggaatgagaaatgatcgttagattatgggaatgacagaaatgacagaaatctagacttctgcaaggaggccacgctcagaataatggtgaaaggagcctgagagattatgtactccttactcttacggggttacaaaactatatcagaccaccattattggaagccaacaattttgagatcaagctagcaatttcgcaaatggtacagtccactcttcaatttagtggtttgccatctgaagatcctcacactcgcttgtctaattttctggaattgtgtggtactttcaaatacaatggagcgagtaatgatgcaatcaaactgaagcttttcccattatctctaagggaaagagaaaaacattggcttaactctccacaaccaaactctattgttacttggcaagatttagcttagaaattcttgtttaaaattttccctctatctaaagttgctaagttgagtggagaaattaataacatttgtcagaatgatggacaatctttgtatgaagcttggcagcattttaaagatctattgagtgagtgcccctaccattgtgttgagtagtggatgttggttcacaatttttataatagtttatgacctactactagaatcattgttgatgttgcatctggaggcacattcatgagcataagatcatatgaattttttaaagatatggctatgaacaaccatcagtggtttgatgaaagagcatctgagaagaagaaaacaaatggtattcatgaagttgatgtcagtactgctttaacagctcaggtagctacattcactaaacagttaaagcagacaattatagttgtcaatgctatacaaacttcagttggatgtgaaatttgtggagaccctcgcacttttgagaaagacgagaaaaacaagaaaatagaaaataataatatttttaatttttaatgataattttttatttttaaattaattataattaaaattatgatttggaccgataatatatcaacgtatttttaaaataaataaacggatcaacagacttactaactaaaaacgtgaccataaaccttaaattttttaagacttttacctcaattatccctattacatagatttaactaatactattaataatataaaattaaaaatctaaaaatagatatgtaattatagtttttaattattttatacacattaaaaaaaacattataccattaaaatacttttaaaaataaaaatacaaaatactgtgaaaaaaaatacaatataatattttcacttatataaaaattaataatactcaaaaacactccaagattttgaactaatattgtagagctttaccccaaagggagcccttccagaaattctcgaaggccttagcaaaactaaggcctaagagggggtttggaaa

SEQ ID NO: 29727 - DNA, 1561 bp, Cannabis sativa
ggttcgaaaaacctagaaatccaatttcaaaggtctgtaaatgcccaaactcaaaccaaacttcacctaagtcatataattgattcacacatccaatataaagcataaaaggtatatttcccatgaaaatatgcatgtctaatcacacaaaaaacaaaattaactctttacctttaaaactctcaaaataaacgcttaagagagcttaaacaaagtccatgctcaaattgacccaagaaaatgaagcaaaatcaagcttaatttcaccaaaatcacagccataactcaattaaaattaacttaaaaagaaattaatttcatgctcacctaaaaacaacaaccatctactatttcttagctttaaacataagaacatcattaaatccataacacaagatatacatgcaaaacaattcagctcaaattcaaatatttcatatatgaaaaattctttctttttcttttcaaagaataatatcaagaataagagagtgaaatctacctcaagtgtcctccttaaagttccaacacaaaaattcaacaccaaagctttgattttctctaaactttcaacataattgcaagaatggtttgagagagagagagggttggttagagagattcaagacaagaaaaaaaaagttttacattttccaatttcatcaacaagactgaattcaatttgtttgtaaaattggtcaaatgaccattttgcctctcgggtcaaaaatcaacataacatacaaataagggaaattcagacattacacctccacaaatacattcagatattctcaaataaattatgttataaaacacattattgatataggcactagtagtgccaccaatctatttaagccctctttgactgtgtagcctcatacctacactgtttcaaaatcgtcacacctgacatattcgaagcgatgtggcattgcacaacttatccaatatttttctttatggattgaaattttgtattttaaaataactagtttattatttaattaattccttaattaaatacaaaataataaaactattactaaaacaatttttctatagctataaaaggcaactctgtaacttcagaataaaccagaaaaacaaacattgcagaaaaataaaaacacacaaggtttttatacgtggtttccacaatatatccttccagatttttactagttcacggggtcatgcccagagataagattcattagatagatctcaaaagttaaagtgattggcttatgcataaacagattccctctgattgtatggtgcaagcttgatgtattctaccttttaatcgaatcttattgaaacttcaagtgctcgaactcccgttgcttcctcccaaggtaagagttgaaaagaaatctcccaagagcttgtagaaccttctcccaaaggtagcactgttgttctttttcttttaccgacttgaatatagactcaagacaatacaaaaaatatataaatagagtaagagacgaacactctcttctctacaaagcaaagatactattttcttaaatgaatataattcaaagtgtat

SEQ ID NO: 29728 - DNA, 1381 bp, Cannabis sativa
  modified_base (47)..(53): a, c, t, g, unknown or other
  modified_base (1331)..(1331): a, c, t, g, unknown or other
ttagaattcatattaggatgtgaatgaaacatacttgttagtaaatnnnnnnnctggtaaaatatatccaacacactaaacctctctaagattctctctataaattggtgcctcaagattacaaatgagaagttatataagctttatgttgtaacaccgaaactaactattttaacaaatagttagcataggaaatttcctcatttgatgaccaaacaaatcaattatccactttggtcattaagttaggacttagccattagaaacttggggctgaattggactagattcctcaactagtatctgagcatatttagcaagtttagacaaagtctaaccttagctaaacttacatacttggtcatcatgtctacaaggttctcttttgttccaattttcttcacaaacacctaattttctgcaataatatttctgatgaagtgcagcttgatatctatatatttagatctttcatggaacattaaatttattgttaagtgcagtgcattttggttgtcgcagtgcatttttatgttatctaatttgaaccttagttccttagtaaaacccttgagccgaattgcctcttctatggctctattgcagccatatatttacactacaccaataccaataattaggggcggaagagtccgccggtattaaagtccaaatccatcggtatttgctattaccggtagggttccgccggtattgccccgctggtaatacttggtcgctattagtcattaatagcgacggactgacacatcctccgctattaattattaataccggcggaccattagcggggggtccaccggtatttaattcgtcaaattcaattgctgacacattaatagcggcgggtccccggcggtattaatgtttttatataaaaaaataataaattataaatatatttatgatttttttttatttttgcattaatattaataataaatattaaaattaatattataaataaatattaaaattaaaattaacaataaagtaattactatacacattatgaattaaaaattatccatcataaaaattagataattatcatccatacatagtttaaaacttaaataaatccaaacataattaaaaacttaaataaatccacacataactaaaattaacataaactaattattgttctcttcatcaaacatattatctaaaatatttaagccggtagtgttcaagttaagatcagtagtttatgcattgttctgagcttgcgatactgacggtgatcggtaatatggttgttggaaagataaaatctccacaaattgtcgagtctgtcgttgttgtgntaaattcggagattgttgttgttgcgaaacatttggagattgttgctgtg

SEQ ID NO: 29729 - DNA, 4814 bp, Cannabis sativa
aatctagatcctgataaaatatatccaacaataagttctatagattctcaaaaatctcaagagctccaccgaacgagctcataatgatgcagtctccttggccctttgggatatggggatagacctaatcagtcacctcccaaagggaaaaagaggcatacaatttgctgtcatcatagtagactacttcaccaagtggacagaagttaaacccttggcaacaaccacctccaataaaagtccttgaatttgttttcaagaacatcatatgtcgatttggacttccttagaagactgtgttagacaatgggaagcagtttgatagtgacatgttcactgatttttttaacaaacatggcgtcttcaaaagcttttctgtcgtggcccatcctcaagcaaatgggcaggtagaagctgttaacaaaaccctcaaggacaccctgaagaagcaccttgaggaagcaaaaggaaactagcctgagttactcccagaggtcctatggttgcataggactactgagaagatggccactaggcaaactgcattcgctctagcttatggctatgaggcaatgttacctacagagctagtatcgccgtccacaggagaacaacctatgaccaacaaacaaacaacaccctgttggcaaagtcccttgacaaagtagaagaaaaaagaaatcaagccaacctaaagctgcaagcctactagcaaaaggtagcaaggtactttaacaagcaagtcaagaataggaaattcttcataggagacctggtgctccgaagagtgttcctaaacactaaagattcagtagcaggagtgttcgtacctagttgggaaggtccctatcacgttatagagataactagtgagggagcctacaagctgggaaggtacaacaagaatatggagctggttctcctaccagaatactggaataaagagctccttcgcaaatactattaataaccagcttacagaacactactccaatgtagcagttctacctactcaacattagagtacaaaagagctagtacccacaacctttttggcatggtctcccaccgatcttcaacagttgcctctactatgcaaggaaagcaggggtagccatttgacatctagaagctaaaactgtgtaaagtaagcttgtagattaaatttatgtaagttgcacagcaacaaagaccaattaatgaataaaaaacaaagtctatgttctatttattgtgtctaaaccacttgctcacaagattaacttcttaaagttactctttcagttccacatgcgtactatggataacaccctaagaaagaacccatgcaaggtctgcgaagcttgatgaatagcaagtggccaaaagacttgtctggatggtcacttgagggcacccataccatacaatgcactgaactagcacaaagaacttatgcaatgaaatttgtaacgcatagaacaagctactaaacttgcctctaagtcgtgcaggcacacttcagcttgacaaagtaaatccggacccttacttgtcaaggccataaaaagatacctaggattaatgaccgcatgatcgatcacacagtccatgataaaaagacaacatggctaaacaatagtagtgtgaaaaaacagagggcctataggccaaagatacgaacatgaagaccttggagttaaaaataagtagtgttctaaaaaggccacatgccacatggaacatgaaaacaagtagtgttctaaaaaggccacatgccacatggatgaaataagtagtgttttaaaaaaaagggcgacgagctatacataacatgaaaatattgtctatgttatacaaacatgatgctgaatactactaatgaaaaatactatctatatgtgtgcaggggcaggtggagtcgagtttaaagctgtaagattgggattgccggagtcaaggttggccacaacatcaccaagatggctggcctggtggtcagtgtcctaaccggccacctcctcggcaagtgggtcggccagcccctcgtcatggttccctgatgatccctctcgatagacagcaggctggtccgcctccaaccgactctggaagagcactctttctcgtgccaatatatgctccacaaaagccttactgcccatgtatgacaaattagctctgtggttacacaacttgaactcataagtgagttcagaggacaaatcaacatactcctcccttatggcctgctggccctcaagagctgctctcagtctctcctcatgctttgcgaggttagactccagcctagaaataaaggtagcatgtgtggtgttctccttgtttctagtactgagcatggtctccaagccagaaatcatgctccgtctctcaataaggagggcctccatctcagccatggctctgtccttcaccagaagggaagcctctaggttcttcacctactcccaaagagcatccgaggacccccgggagccatcacgtaataagcttagcttcatcaaggcctaaaagcaaaataagacagcattagtgtcaaattacaacactagccgcccagcccctctttgggattgctatggctggccagcccctcactggtacatctaaggccggccagacatttgcaaaaagccctttggccagccagcttacacagtgccagaaaatgaacaaagctaaaattacaacttaccagggaaaggtcccgaaggctagtagagtagagtgtctggctcgccatcaccaagctccttgagattttcatccatgaaaggaaaaactctctctatgcgtctatgggatacctccacaaccttctgtcctacagctgaccctgctcctctgttgggcctccgagcaccctagcctgcaggtcgtaccataggctgcctagcaggttcaagccctggtggaggaggtaaagacgacccagcaacatcctcgcaacgagaaatctaagccaccttagccctcacttgtcctgtgggctcatatgaaggtccctcaatgagacctcttagcctagaagacatatctataaaaataatgtagcaaagttgaaaagcaataataaacattcaatgcaagacaagaatataactaataaataccatcgtcattagaagagaaactatcagaatcctctacaattgcctttcccttgcctctagatataggaaaggggcgattaggtccctcagaagcctggcctccaggcccaatccgaagagaagcatcaccaactagaccccgctagccaagcgttggcaaaaggccatcgccttcctctcaagattttgtgcaatgcgagataaaggtacatcatcatctaagtcaggaacctatccatatccaggataggctccctctgcaactagggctcccgcaactccagaagcaagaggatacaaaccatacttcaggaagttggccactggtcaatctgagaatgtttctcttctctaccgagagagacaagatgcagtctgccatgtcttgcatgtctaatgtagggatagaacacttaaaaaatggcactctttgaaagtgtcgatggtgaacccccttaacatcctacgaaatgaagtatttctcggtgtacacaccaacctttggcattggtgaattgttggtatcatctagccactggtggccaacttgaatgaagttaagataaatagtttaggatatatagagagagtttaggaattgataaaaaaaatcatttttttttaaattttaattttgaaaaataataaaaaaaacgtgatatatgccatctcacaataatgaatttttcttttaacgtgtagagtcttttaaatttttagaaaataaatatgagaaaatagataaatatttataaatctaataaaaaattaaaaacaaaaatagagagaaaaaaaaaacatatatagattttttttttataaaaaaaaacaaccatgttttttcggaaaaaaaaagcttaaataaaattattaattaatataattaataataataaaatgataaaaaaaatatgagaaaataaatgaatatttataaacctaataaaaaaattaaaaaaaaaaagagaattaaggagagaagagataaaactatttaaagtgattttagagttttacgtcaccacctcatacttctcatatatatattgatatattgattggactaaaccgaacaatgttactaatctagtgtttggtcattctagaggactgaaaaactaatctagttatttctatctatgtgagatattattcatcacatccaatagtgttggaaacaattattttttttttattattatttttttaattttgtataaatattttagatttaaaaataatttaaatggaagcatagaaaattttgaattctcaggtggttaaaattttaaaatgatataaattaaataataaatactttaacatagtattatatagaataatctctttaaattattgcatatattttttaaaattttaataaaataatacttgtattaaattaattaaataattacttaacaacaatatttctttttattttataaatattttccttaacaacttttttttattatattaaaacatgatacattacttaagtgtcttatatttattctatataaaatatggttatgtaacaaaattcttagattaactgagtttttttattttctgcgttacctttaataaatattatttattaattttataattttttttaaaataaaattatatatattttatataaaaaattaatttaattatatatatttaaaaataaaagatcggaagagc

SEQ ID NO: 29730 - DNA, 2829 bp, Cannabis sativa
  modified_base (34)..(43): a, c, t, g, unknown or other
tagggtgttagtcaacatacttgtgagtagatcnnnnnnnnnngtaaaataatttccaacacatttgcccacacatattcccatcatagctgagcctcctattgtaattggtgatcagttcccttctggtgtgaacagacctgcatcaggtagtactgtggtcacaccagcagtgacaaccagcacatatcctattcacggatgccatcaacctcatgaccagcataactcacaccgtatgaagactagatccaagtctggcattcacaagccaaaagccattttagtaaccagagaaccatcatctcttcaagaagctctaagtcaacttgtttggaacaaagcaatgagtgatgaagtgttggccttggtcagaaacaaaacctacacccttgttaggttaccaccaagaaggaaggctattgggtgtacaagaaaaaagaaaatccaaatggctctgtcctcaaacacaaggccaggcttgttgctaagggttgtcatcaagagtatgggtttgatttcactgagacttttagtccagtagtcaaacttgttactattaggattgtcttaaccttagccttgtccaaaggttggcttattagacaattagatgtcaataatgccttcctcaatggggacctacaagaagtgtacatgttgcaacctccaagatttgaagtccctagaaagacagacttggtatgcaaactgcacaaggccatatatggcctgaaacaagctccaagagcttggtttgtgaagcttcaaaactgtccatctcttggcttcatatcatccaaatctgatctttccatgtatattcaacattcttctacatctgttactctcatcctagtttatgcagatgatatattgattacaggaagtgataacaacatagttaaaaccatcattgcagcccttaacagggagttttctcttaaggatctagggccccttacatacttcctaggtattgaagtaacacaaacagatgttggtcttcacctatctcaagcaaagtatgcaaaagatctcctagcaaaggcccaaatgagcaatgccaaaccagctcccactccaatgacaagtggtattcgtttatctgcttactagggggaacccttggaagatgtccaattatataggtcaattattggagccttgcaatacctgactatcacaaggcctgaactttcgtttagtgtgaacaaggttcgccagttcatgcaaaaatctttgtctacacattggtcagcagtcaaacgaatactgagatatgtgggtggcacaacagatcacgtgttacacttgcaaaaaccaggaactttggatcttatggcctatgtgatgctgattgggcctcggatccagatgatagaagatcaaccacaaggtttgctatcttccttggctcgagaattgcttggaaaagcaaaaggcagcaaactatatctagatcgagcacagaagctgaatacagaagtgttgctagtgttacagtagaattgacttggttacaatacttgttctctaaactaaggatacaactatctcaaactcctaccatatggtgtgacaatctaagcaccatcatgctaactcagaacccagtgctccatcaaaggacaaagcacattgaacttgacttgtatttcatcagagaaaaggtattcaaaaagactatttagattaagcatctctcttcctatgactagcttgcagatgggttaaccaaagctatatcaagtcaaaggtgtgctgaatttaaacacaaactcaaaattgaagatcgttcaattatgagtttgaggggaggtgttgaagacagttagaactgttagtgtttgttggagttagttggtgttgttaaacacgtgcttaattctgttataagttagttgtagaattctgttattgtatcttagttgagtgttgttatataagttgtaacacttcatttcaatgaataagaatctttcttcaatctttgcttccctttccttcttcttctctcttcctctctctgtttatggttttgtgttcatcaatagctcgcaacttcaacacttgttgttataaatgactttttgatttataataatagatcttttttgaaaaaaaataatgtaaaataaataaataagaaaaaaatgttgtgggtgattattagatgatacgtcggataaggacacaagataggaacgaatcacaagcaaaaatcattaaataaataacattttggaaaatttatagtaatactttcaaataaagagtggaccgaaacaactcttttaagaggtgaactaaagaataaccccaacttttttacactctatttcatgacatgctgccaaaaaattaaataaacttttcatccatccaaaccaaaggtcaaagtgagaaataagttgaaatatgattttactaaatcaacctctcaatacgaatttcctcaagaatttaacgaacattttttcctattctacaatgtacatgctcacaccaagtcaacttcgaaaagccccccatcaatatccttattccagtgggcagaggcactttaggtatgttgcatcttcacctctattcttttctcgttgtcttaaaaaaaaaaattgcatagtaagattattattacaacttacaagcatattattcttgccttacaaatggtgaggagctcatatctgtactgtagaaggaatcctctgctcccccatagtagttttcctccttctcttcgtcccacttaagaacctcccttatatacttgaatgcctcgtcaatagttattcggtccctagcccgagcttgccctacgaa

SEQ ID NO: 29731 - DNA, 4282 bp, Cannabis sativa
aaagtgtctttcaaagatgacttcttttggacaactggcctttccccaatcggcacaaccacctttcgtagaattcgtaagtgattgctttcttcatgttctgttgaattaatccttgtcttttcattttgagttttctagctaatgtttcggttttttttcacagccctcttgaaaagacctgtccctactctcgagatggtcagtcaacacagacacttgctgacccttccccacggccttaggtcgtgcgacttccttctaaacgaggccaatctgagatcggtgggccttcttactgacaaggagtatacttggaaagtccccaagtattcttcttggcagtaggttttcgttccaaaggaggataaggcctaggatcgcgtggctcaggcacaataccttcaaagcactgccctttgggaagccggtgaaggagcatcccaaggtaatcaacgtggttggtctcccacagtacttaggaccaaacgtaacacattagtcaccttccgagatacccgccttaatttttatatttggaattcccttctcatagaccgagttactcataggattgatagctggtaccctagattccacgtccagattaactttcacgagtcatattatggtataaccgagaaatatggcaccatgatagatagggcaagtcatatagacgcgagctgggatttagaaccaattgagccctttgatatattcaagataatatgctgtagtgattttagtgggtattacggtccttctaccccctcttctagcgataactcgccttctagtggctttggtaaattccttagatggaaaattatactcccccttcctttttaacctgcctttttaataactgtaacactttattttgtcatgcagacatgggttttgaagatattatggacgggaaagggaagaaaagggaaaccaacccaggggttcctacagaagccgaggtggtgccttccaaaaggcaaaagaaaaccattgcccataaaaaaagatgttgtccgagcccattgacctcgaggcctctgaaactgagacctacgagcagattcttcctccggtcgctcccaacaccaacgcacctcctcctgagacagctcatgcttctgcctcctcaagccaggccattgaaactttgttggctacagcgagggagcctaattcttaattttcccaaatgtttgtgattgcctgctggcgcaaactcaaggctttccttccccccgattgggatctaatcaatcttgtgagtcctgaagagacgctttcgaggaacttggactataccctcatggtaagttagctgtattattatcattattttttctcatattcatttgctcgtaattctccaggcttctttcctctcttttacctccaatcgatgactcttagagcggctcagatacctggagggcgaggtgcaaaaatcactagcctaatgtggggctgtgattaagcaatgggacgacacccagtaggaaatcacccgtctcaaacaggaggccgagaagttgaagaaagatcttgaagaagccgagaaggccatcaagacccagactgattaatttgagaagacgctcactgagaatgaggccaaacttaaagggaaagaagccaaactcacagggaaggaggccgaaagcacagaacaatgcaacaaggtcagcctccgtactgtataccgagcctggatggcaaatcacaacatggacagaagcttcttggaggaggaggaagagaaaactctggcttgctgcgagaaggccaggaaggaggagaaagaggcagaggcagaggaagaaaaagaagatttatccaagtctcccaccatgtaggcttggtttctatttatctctctttttgtttttaaaaatggccttttggccgagacaatggtttgccccttgtggaattttttgtaaagacaaatttgcaaagttggatggccaactttgctttttaatgcctcttgcttttaagtttgaacttcaatatgtagttgtttgcttgcgtttcattcacaatttttttaaaaaaaaatcatattttgatcttgcataaagtttcttaggggtttccattactcgtagttctttctgacattgagtagttaataacctactttacgcacgagcgatttatcatctgccctgcactttgatttgggagcagtcattgattctacctcgcgattatcagcagtaatctgtttcaagcaatcttgaatatatttttaatggccttgccattttgtatatatttttattgcttacatgagtagttaggtcttctacccacgtgttaggagtactatttaaagacactttgatgtctcgtttaatactttcctttagcgcgagccgttagtattcaactttatacgcgggttatgagttatatctcatttataactttagattttcctttcatgtcagatagattttaaatcaaaaattatagttgtttgatccctttctcgtcagaaatgtttgatcaggaagttataacgatttgacccctctctcgtcaaaaaggtttggttagggagttataacagtttgatccctctttcgtcaaaaagctttggtcgagaacctttaaaaagttttcaataaattttttatttttgaagtggtgggtttgcattatattatgtatttctagataaattatggttgatcatacatatatgcccctcaagtaattttaaagggttatgccttataattacttgttaaaagaaatgattactttattcacaactgaagttcaaaatattacatcagcgatgcgatttgcaatcattaatctcataagaacttccccagttcaattgcttattttatcaatcttctagaagctactggttttgataagacgggttctgatgttcagggtcaatccctaacatattcccacaattttttcaatattcagggtcaatccctgtcatatccccaggttctaggtgaattaatccttatttagttgtttgtcttaactgctagtggttgacgaccagctttcctttatagcaactctatacggcagccattgcgagccggtatttgcttacttagcaatacttttacataattactttgccggactaactgccccttgtcttcttccaacatgttccctctcgaaatagccgaggtatcccttcctcctacagaggaaggttatgatccctggttgcatgagttacttggtggatcgggttgatcatgggcattgtcctgcccctttacatattgttgaaagtgtcctcgcgctatgagaccttccatctcatctttcaaatgacaacattcttccgtggtatgcccaatatctctatggtattcacatcgtctggttgggtccctttcacgtctcgcgagtttcataggttttggttcgctcaaaacgacttcctgttcatctgcgaggttgatactttcccgagtttcattatgctcggtatagtcagtataaatgggtacatatttttcgtatttcttctgtttcttatctttggacaactttttagagtcgtctttcctttttgatccgaaagcctccgactcgaattcttcaacagactcgcatcccaattattttcctggttccttgacttgatgcctcctgaacttgttctccaactcgtctattcgcaaatggattgaatctctttgctttggaccaagtcgttgacgaagatcatgtttttttccagttcaagcgttcttgtaggtccaattggccataacgactgactaatctcgttccacccgtagaccatattttgccttttggtcatcgctgcagcaagcgttctcttctcctcgcattaatcgattatgagttaccgtgtacctcgcggtagccctcacctcttaacgtcctgctcttcttcctaaggtttgattcgtctcattctccctattgggatttgtgcgagctcctttcctatgagcttcgagagaaagttggcgatccccaactgatgatccatatatcgtaggatgtgtccccagatttcccttattcctagggggaatttccggttttttggtccctagttgattatagagcatctcaccttcaaggtatccctcagtttcctcaagtgttctctcttgagagttctggggataccttcaggctgtctcctgccccctggtttgcgagtcacgaggtttgcctcgtgcatctctttctccaaggtcaggttgattttgggaactattctcctgtgacaccctgactg

SEQ ID NO: 29732 - DNA, 1632 bp, Cannabis sativa
  modified_base (548)..(557): a, c, t, g, unknown or other
acggtcccaaaaaaaaatcgtttttaaaaccgtcgcgaaaacgaatatttgtagtagtgttgggtttcaaagatttggagttgtagaataaagccttagttccaagcaagtttggaggctgatttacaattcagattcatcggtgtctaaggtgcactatcacagctatctttataatggtaattttcttaccacaaaattggagaactcgccttcatttatttggaaaaacttgttgagaggaagagaaataatcttacaaaggtataggagaaggctgggttcgggagatacagttagaattctaggtgatctttgggtccaaaggcctaaatcagtttctttctataacaagtcatgtcttcgtgctgaagtatgtgagattgatcttcgacttgcattaagtgagtgggatgaactatttattaaggctattttcaatgaagatgatgttaggatttatgtcttgaaagccaatagacatttctgattatcaataaagagttgaacattttgatatatgtatgaatattaaattattaatattnnnnnnnnnntaatttatatataaatattgaaaaattctctactcatatatgtggttgtgacttgtagttgtacaaagaactaagatcgcttagccatgaataaaaaaatcatcaatataaaaaagtttggaaatctttaattaataatttctagtacgattcactaatgctcgttcttcagtgcaaataatctcagtttggattatggatatagtatgacatcaaagtgaatatgttgtatacaatagagattatatatgacaaggaccggtatgaatgaagttttctttatctaatatgtcgtttactataaagacctaattcatatcataacgatgatcaatggtagatcagcctaaatgctaagtaatcatgaattcttgttcgtgttattagtttctttgattcactcattaaagtttctcagagaatatgattcttacaatttctattttgggaagctaataatgttgatggctaggaacatgatctataattatagaattctgacttgcctaatagatcgaatgctagttccctttaagtgttaattctagaactacaaagttgtgcacaaatttagatgtcttcgaacaaaacaaagccaaagcctgtgtatacaaatacattaaaggtaatatagtggtattccttgttctttatgttaatgacattctacttattggaaacaatgtaaaaaggctgttagatgtaaagaaatggttagctgataaattccaaatgaaggatttgggagaagcaagctatgttctcaagatcaaaaactatagacacgacaagaaaaaggtgttttgccggcaactaagctcgtcggcaaatgtaagagcaactcaccggcatagttttgccggtgacattttgtgctagcaaaagatgccaggaattgttatttcggcatatcaccttttgccagcaactttagagccggcaaaagtgtttacacagatgaattaagttgtcggcataagttcgtcaccagtaatttggtgccagatgaggagtccttatcgatgttttgccaacaagttaattgtaacgccctaatgctaaggcacgctacagt

SEQ ID NO: 29733 - DNA, 1835 bp, Cannabis sativa
ttgcaccaaaaaataaaatattttacactattagtggtcttagaatttttcttcattattgtcaaaatataaataagagtaaatatcattttggaccatgtgttttgtaaaagttattaattggaccatctattttattaaataataaaatagaccttgtactttttaaaattgtataaataggaacttgaactgatttttttgtcaaaataaaattaaataataatctgatataaaaaagaccatggtcatgcactttaatttttttcatacgagtaaaagccctaaagtctcaaaaatatacctaatccaattgagaacaaaattactggaccacttgagcctgaccaattcagtaattatcaattttaattattgattctctttttcaatttataggtaaaaatactgataatatggtcaaccaatccattgaatctattaaaatttagtccaccatgttctcattcatgaactggtttcatttctttttagtactattcacaaaaatcattaatgtaattatttaaattacgaccttgaatattatttatttggaataattgtgccaagaataattattccaatatggaaaattatcatatgcatgcagtcttggttaataattccttatataaatttcttcattatttcggtcttactctataagcacatgttttgaatttaattatatataattattatgatctgctacacttgatagaataataaagtgatatatttatatgatcgtgatttaaaaataattaaatattctgaagaaaaataaataaataataaatagaatataccatacttgaccaagaaatgactataaaattctttgtcaacacatatgttattcatgtgggcttttcttcgaattaattaagggagtaaatatatatatgttgtctctaagttaataaatttttaaatttaattggttttcaaaaaaaaaaaatattaaaatttaattatatcatatgagtatttatatatgcggtgattattttaataaataagaatgcgcgttattataatataaattaattaatataatattggagagtgttgatttgattacatcactacatgtactgctgtatgttaattttaattaattaattaacatttagcgtttactactccttaaagtttttaatagcaatataaaaattataattatgtagtattataatacatatacatgtatcttcaatgggaacacgaagttgagtcatttgtttaattaataatatatatatatatatatatatactaaggctactattaaaacttatatactgatgcaaatatttaatatttagaagaatttttgagtttaatattattttatatttatgtatgttataactatttattatattataaaattttgacactactacaattttagtctttaaagtagttttttaagatttatagtgttgattttggtgaaattcgtaacgaatgttgttccaagcaatactgtagggggaataaccgacgacataagaaccctatgtcaattgtcgagggcagaccttcattgtaactagagggggcgattgttccctaaaagaaataggaaaaaaaattatgtgtatttaagttaattacagcatatatttgtaataaaagatgatatttatatagattataatatgtttggtgtaatgattaaagtaaattacatatatgttaaaggtcaaagttcaaatcctgccaataacattttagtttttttaaaatttatttttgcgctgttttattaaaaaaaaaaaattacgccccctcactttaaattttaaattcgccactgccctatg

SEQ ID NO: 29734 - DNA, 1477 bp, Cannabis sativa
caactaatttgcagatgatggtggttgagtgtttcttgattcccttgcttgttgcttgcttttcctcatgttcctcttatcagtttaaggatttggattctttttaggaggacgacccatctttttcttctgggaaggttcctgataccataataattattaggttaacatagtgtgtatactacacaaatttcaatataaagttaaatgacattaagtaaagaatataccttttctcgtactggttatttgcaagtggtctttgtatgacctagttgtgttcaattagaacaattgttagacggcttgaatctcctcattttagttacatcggttggaggttcatctacttctcttctccttgatttcttaggcctttattggatttaggcctttattaatgtttaggaccaggcatgggtgtaattgccccttcataagtagctgagaatgcttctttcttataacatttagcaacaaaatcatactcactaaggttggaataccatatgtaagctaatacatgaccacagggaatacctgtaaggtcataacatctgcaagagcatgttttggtctccaaatttgttgattccacctgcccagtagacactttcagttggaacaagcctccaacagactttgtacactgacatttcattgcaaacttccttttcttctaaaggatatcaaagatcctcttccccactagattttttcacttagtgacactttctctttgctttctcattctatccatcaaccagtatcgtacatactctaacagaattattattgcctggtctcttccatctagtatggctgagttgaaactctcacaaagattattcagcaacatatcacacttagtggaagtcctaaagtgggacttcgtccattcagattgtgattttttggacaaccaatcaaaagctgctgcattagtctccttcaattcattcattctccttttgaattattccactgtagtagctctagcacaagcccataattgttgcttcaacaaatatccaagaaactccttcttgaagttggcataaagatgcctaacacaaaatcgtatttcagaaccttcataaactgttcctaaagccctttccaaccctttttatctgtctgaaatgaaagtgaagaatcttgtgtcttgtacatctaggtcctctttcagtagttgcacaaaccaagtccaactattagtgttttcctttttaactatatcatatgcaagaggaaacatgttgttgtttccatcaatactaatggctacaagcaacataccccctgcaatatcctttcaaaaagcacccatctaactcgatgatgggcctgcagaacttgaaaccagatttacatgctgcaaggcatatgtaaatcctttcgaaaaaccttatatcattcactaaacttgttaggatgaatgatgagctaccaagattaagttttactaactgtgcac

SEQ ID NO: 29735 - DNA, 3239 bp, Cannabis sativa
ttaatatatatacatatggtgatcttagggatatgatacgatgataatcagtaacatttattccgctgcgtacctaatttagtaccataaaactaacatagggttcatcttctaggaaaaaaatacttgcgataaatacgttgaagcttttctagctcaataatattgactcgtaaactaaaattcattcacttaaaccatgtaaaaattattgtttttcttgtttaatttatttatttctttcttaaacttatttattttataatcgatttttgaaaatttcgataaacaataataataatagaacttatttctaatattacacaaataattcataatctacttattaattattaattaatcactaatcttcatctttaattatgtggtcattatagtttcatctcgaaaccttgagttgatctctaacttccattacttgagctcaataccagttgttattttggtgggtcttgtaattccaccaattgtcatcttaatttcaagtacactttatagattcatttaacccataaaactttttatgtgctaagacccacacatgtttatctatagctgccacattccactgttcaatgcaccgaaagcctaatccgtcttgatccttcggcttacatacatcttttcaagccaataaatctaactttttgtactcagctgtgccactccataaaaaatctctacatattttatcaatagtttgcaaaacctttttggtataaatagtaaatatttgacttggaccatatacattgccaaatattaaatatagtgactagcaccacttaaaggtgtaatattatcagggccgtcttaaatattttagagattctgttttaattttaaaaatttggctcttaataaaaataatagtataattaaattctaagttcaatttttttttatttatttttttaggtagatcaagtttaaaaatttacttctagaagttttagttaaaaaaaaatatttcattcatatttgataatttttttaaaaagaaataaaatcttgccattaacccatatatataaccgtgtgtatattttttttttctcttttgatattttcttttctttttttttttttaaaatgaaaaatttaaaattgaatagaaatatttaaatatatatgatgaaaaaaattatttattaatcaatttttgaaacaactaaaagatattatatatatattccactatcaaacatataataaatggaatataaaagattgaaaaaaaaaaaatagtaaactaccataaattggaagagattctaggtataaagaggtgggtcattaattaaaaaaataaaaaaataaataaactgaaaaagatttaaatttaaaaatgataaaaaatttagcttttatttagttgggccctgtgcaaggttgggccctgtgcaattgcacagcttgcacagggttaaagccggccatgataggtgatatactttatcagtatttgtgtcacatcaattgtcagaatattttaacaattaattcaaacaattgaattgggtaataaatattgaattttgatcatatatagaatattaattaattaattgtattcacattcaatgaatataaaatattcatttatctcaaaattaattgattaattttattctataaatacaaaaatacaaagtacattaaaaagacctgtgttgattatattattagtccaaaaaaggaatattaataaggtgagcttccaaattcaaatgcatgcatatgagaaatttctttttacttaattttgatatatatatatatatgcactacaataattaatgtacctatgtatatataataaatgaaaaaggccctaatataaccatattaaactattatttaatgagaccaattcaaaaaattaataacatgctaaactatagaaaagataaataaataaatacagttaaaacattttgagaagtgcaatttctcattttcattgtttgagaaaagtcatgataacattatggatcatatatatatatgacatataatactaatatatataaaataaaaataaataaataatgttgacttatatatgtttgcttttaaataattggcattaaaatggtaataatcaaatatatatatatagtgtactactacacctataggctatagctatatatatgtgtgtgaaaaaccaaccaaaatgtaaggacaagatattacaacatcatgaccatgtaataaaatagtgcatgacaagaaataacattattattaccatggttaataatttggagtaaataaataaaaacacctcataataatcaaccctactcctcagtgtacaatttcactctgtacttgattaacttaatcttttatatatatatatatatatatatatattattacttaattccattaattaatgcttcatgccacgtatacaaatatttatatgtagtagttgataaaattctattgagagattcttgaaaatattttataataattattaaattaaaatatataaaattatatatttaatttattattgtagtatgatatttagcgataaaatacttataatttttaactttactaaaaataatatattgtaataattagtgatttatataataataattaatgaaaatattagaaacttaatacatatttaattatacatgtaatattatgcatactttatggtagagaaatattaaaagatactaataatatatattacattcttgcatattaataatattatagataaaattaaatatcaaatttcataaaatttaataaaataatttttaaaaaatattattaactaattgtaaaataacacgtcaaaaatattgtagacactaatgatagtaatgcttcttatggtaatactcgacacctgcattagtgcatttctaacatttatctatatatataatataaatgcacaatactcaagaataaagtctatatatcactactaaaaaaaaattacatttaatcataatatcttaactataacataaattttcgtaatttttaattataataaaaaattatttttgactcaaatacaatatttaaatataaattattattaataattttattttaatcaaaatatatatataatgataatttatgatgagacaaatttttatgtattacatttattatttataattaattctgatttagttacttcaatatgtgtttatcatgaggaccac

SEQ ID NO: 29736 - DNA, 3087 bp, Cannabis sativa
tttatttggtatagaatcatagatcctctattggcctagcagaaacgtagcggcacggaagtggcaagtagaaaggaaataagaattacaaacgtgacttaagtggggaaaaggttgtaaataaagccccttttgtggatttacgaaatcgagtcaaagtcatatgtaactattgcttctcaactaagtgttgaatagtccaagaatgtgaaatttttctataaagtaatagaaattaattaatgaatgaagttctaccaattatttgtaacaaagtaagcttgcattccacaaacttccacagcctaaagtcaccccatatacaagctatatttacgagttgattatctcattattatagagtaattttagtgagagacagaaaaagagagctcaacatagagaaagaaagagtgcgagagaaaaataagtgagttttttcaaagaaattgtagtaatatctttgctataacaaaatttatctacaattgccaattattttaagttaatgtttgacctcctatgaggtttacttggccaagggtaataagggaacaaacatgtaaaggacagtgaggtgtgtgtatgagggccttttagtaattattgagtggttggaaaggcaaaacagtgacagctagtgttagtgggaaaagttatgtaagaactcagatttcatcaaggtctgaaaggaccgttgtcttgtccatttgttgttgctttcctctttgacaaatacaatcaagaaccatggctgctatggtttagtttttagctggtgtgttgctattgttttctaaatattgttcaattgcttgtggtgcttttttagtatagtttgatctcaggtggtggctgaatactaggagtgccaaacgaatggagacgattgaggaagaagcttctcataatcaaaaccaagatgaaacgacctctgtaaaatgagctttgatgagatcaggcaagagttgctacaaaattaaccaatggtcccaagagtccaagccacaaagaatctaaggagcgttagcttcatatagctctattctaggcagtagcagtggcagcaacaacagaggtaaacacaaaggagatggagcgcgatgccatgagttcacagcaagaaaaattgaattaccagttttcttaggtctagagccagacgactgaacatatcgtgttgaacaatatttcagtttgcagcagttgaagcccgtcaaacaactcgaagttgtcgtgctatgcttggaaggtccagctcttcgctggttctgctgggaaaatagacagcggaaatttgcacttgggaagaactcaaatcgttgctgctaagacaattcttaccagttcatcaaggttctgtccatgatcgttttctaaacttgcaacaacctcaacaatacaagaatacaatggcttccttgcttggaacaattgatgaatcaataatggaatcagcatttatgaacgggttagtcatgcaaatacaatacactagtatccttagtgggcctctttagcttcatgtgttacccatgagttcaaagggcacttatgtgcaaagcccaacaataataaacagtaagaagtacgtaccttcatcttcttcatcgcacgacacaactagttaatcgaagcaaaaattcaagagaaaaaaataagggagtttgcttcgaatgtgatggtacctaagctcgtgggcatcgttgtactgctccagagttgaaagtgattcgaatctaggagaagatgtgggaactggaggagtagtccgccaacgaggaaaccctaggaattttaaccgatgaggtagtggaggcgcaaacggtacaggtttttttaaactcaatggacatacttctcctaaagccatgatattattagggagcatcaatgataaggaggtttggtggatagtagggctacccacaacttcatctcaacaaaaattgtgaacaaattagctctgccagtagtttcaacggaatcttatcggatacagaagggaacaaggaaagttggatatgtaaccaaaatttgtaagacaattcaattaacaatccaagggctcgttattattgatgtttttctccctcttcccttggacaataatattattcttggggtacaatggctggagactctcggtaataccacccatcaatggaaggaatatagaatgaagttaaatgttggtggcaaattaatcacattaaaagtagacccatccttgcaacgatctcgagtctcggttaaatctgtgattcaagcacttcaacacgaaggagagggcgtttaggtcgagttaacaatacctttgtttttccagaaagaatgatggatagtctctcaatctcaagcctgttacagaagtattcaatgtgtttgagacacccgcaactcttccgccaacgagaaatcacgatcatactattatcctgcaaccagggacctcacatgaaagtgtgccatcttataaatacgcccacgtatagaaagatgagattgaaaaatcgatgtgtcaaatgttagcggcaagaatcattcaatctagaacaaccctgcccaatttttcacgtaaaaaagtaagatggtagctggaggttttggcactaaggtgtttccaaagattgatttaaaatcttgttatcatcaaattcgggttaaggcagaggatcttcacaagatagcttttaggactcgtgagggatactgagtttttagtgtccctgccacttttcaaaccgccgtgaacgagattttctaaccacatctccatgacttcgtgttggtactctttgatgacatattagtgtatagtccaaatgttgaaactcgtgtagaacacctctcaatagtgccctaaatcctttttcaacatcaattctatgccaacctcaagaagtgtcattttgggcaatcgaagatttagtactagggccatattatttcgggggagggagtatcggtggacccaccaaagatccaggcgatgcttgattgggctctattgactactatatgtgatttgcttggattcttaggtctcacgtggtactatcgtaagtttatggttggatatggtag

SEQ ID NO: 29737 - DNA, 2278 bp, Cannabis sativa
aagctatacataccgtcgaccctgcgtagaacagagaagttcgtgtaggttcttgagatcatcggattcgagtttgaatcgacacaggttctgggccaagcaaacccggcgactcaggattggttagtctgcagtgttcctttcggggaggactcgcgtctacagctgacttcgttgttgtcttagtcatcgtcgtaaccttttctttaagttcctcgccgcgtttcaagatcttgatttgacccgtgaagaagcttccgacgtgatgaggcttttcgaccgtggatttggtagccggaggggaggtggtgccgttggaaagaggagggatcctttttcggcgattggcgtgaggacggttgttgttggggcgtttgttagggtttcgagtatagtatcccatgattcttgagaagaaagtatagagagagagagatgaaatatggtatgggttttttcccctttctttgctttgtctatggatgttgtggttggatagggactcgtatcataagacaagttgataattcttggttagggagcttacagttttatgtacatgtttgctttgttaccacgactttctttcgcctgccataaatgaggctccctaataaatttgagagtaggtagacacgtgacctttgtcttgttttctaaaataaaataaacattagagtggatttcgaaaaagcatatgatcttgtagagtgaggccttttcgattttgtattggggaagaactttgggaggatttggaggaagtggataaaggggtgtttaattgcagtttcataatgaggaaattacattgtatacccactttacttgttttaatttttacctttatttttatatttttttagatatacccacttttatggatgattttcccataagaccctctaggttatgtaaattatatgctacacttaagtagagagtgaagatatattaggcaatccactaaaaaacgtgggtatattttaataaaaaaataatatgaaggtatttttgattaattataacaaaaaaagaagtatttttcaacttatccctttcatgatgggagacaaactgaatgtttcatgggggttcataatgtaaagtaatttaaagataaccctttctcggattggttgagagaatgaacgtttttttgggttctcagtgtttatgtctagggagattttggtaattttattctacctttttctgattttgtaaactttatttaataatactagtcttgtttttaaaaaataaataaataatgatatgattataataatgaaaaggagaatcttgcaacaagttaagagtattaaaattacggctaaaatacttggactgttttaagggacagaggtcaaatgtcaaaattgttattagaaccctcacaaaaagtagagaaataccatggctacaaaacttgggacccccaagagagtacaaaagcacaaaaccacaaatttctacaattagatctgaagctagactcagtttattaaaataggaaaacatcacatctattacaataataggttaccccagtctaagaaggatagatcctcaaagtgctttgacttaaagatctatgatgctacccaaaatttaattttctcccacatgtcctttgctgaacgctctctaccctaaaaattctgctatttttctcattccaaactgcccacataactagtactgctgacttccacagttagacatacacttgcttcctaccagcttactcttgatcattgggagcaacaatgagtaagacccgaaaaaccccaaattccaaaaataatttggaccataatttccataagaaaatggtcaatggtctccctgcttgccttgcagcaaacacaccagcttcgagattacacatggtatggtcttctttgttgtagtttgtcataaacgttcactttttccaaagttactgactattcaaacactttcaccttagaaggaacactacttctccataaagccctggcccactttacctcaacatgttgttggctcgagataagcgatgaaaagaaagatttgaaagagaacacttcacttggctctggatgcagattctgaatcaaagtaaagtgttctaactgttgtaagtcgacagatttagggtaataattttctgtaatttttatttctaatacaccgacagtgtatataacatgtacaataatccctattaaggaaacaaatcaaataataaagacacattgaatctctcaactaattccctaaaaatatggta

SEQ ID NO: 29738 - DNA, 3560 bp, Cannabis sativa
  modified_base (26)..(38): a, c, t, g, unknown or other
aataaaataataaaataataaaaatnnnnnnnnnnnnnctttactaatccaaattactagagcggtcattacacctagtctcccaggttgatttctgcggtgttgttttgtgtattttcaactcctaatccttggacttggatgcttcatgtcttttatgtgttggaattttatgccctaaataaaactcatctcatggtaatcttattgactattaaagaatgatatagaagtcaaactttatattatttggttcacatgattatttcgtgattataagtttaatgtataatttttatttaaatctagaacatatggataatcatgattattgcgttgtctacacattggataataaccatgatcataagcttcaaacttttagtctcacaatttactagtgcacatgatttacactgacgtgataatcatcaatattgtttactcacacttggataagtggaattctttttccaaggtattagtggagtaagctaagagtgaatgtattggctatacatcagactagacctatatttacagctaaagaaatatcgtaaacttactctaatatcttatctaggtaaatctctaatagttgatcttagatcagtgttcttaatcttgagataactaggttctggcttaactaggttattctttgtagcaccagctgacaaaccttttggatttagacttttaaacatcaatagagcaagttaaatccatatataaatatacatgtaaagtttacaagccgagatccaagattaaaaacatactttaaaaatatgttatatacatacattaggttttttttcaagtcacatagttacaacaaaagctaaactctcaaaatacaatatgaccaaactctcatggttgcattgccgcagtatgtacaatcattgccaagctaataactcactgttcctccacttttgctttttccttacttacacatggtagcaaactgatgagccaacaaacttcgtaagatatacataaactatatattaattaagacatgtaggagctccaatttttaggatgtaagttgaaatatctagactgaaaaagtggtgccataaattttcaaggattcccttaacatcatctatgtacgacaacaactaattatgaaacaaatttcttaactctctgtcactcaaaggagaaagcctaggatgtcagatcaaaaagaaaagagaaaaagagaagcaacgaatttggctttaccttcacgacacaaataatttcttaatcaccttgttgtgcaatcatcattaatcctttaaatgcttccttctccctctgaaacaaaataagaaagataattgttttgagataaatcaggtaagtgaaatcgttcccacgagaaatgcagctaagtaccaatcaattaaattcttatttcaatctggtagaatcaataataaagttgaataattaaataactaaaaattgaaaagaaggaaaataataataaaaagtgtaattaattatggatgaatatttaggaatatgaatcctgttaattgagtttctcaattgttaatgttaattattaattatctctcttttggtaatgacaaattatcaaattaaccctaactcttctcagatcattaaggtcctaaatcatacattatctacttacatttctgaagtaaattaacatataacttgcattagattcagaatttaaaaatcacataagctatgtaataacaaaatactttcgttttacatcaaaacttatgtttgtcctattagagcattcctaatattcacttctcagatttcatattaacatcataagtcacattcaagattgtcaatctaaaatatgtaattaaaacaaatcacacaaaatagggaataaaaacttataatcacattaactaaattgaagaaacatcatctaacattcatcatatccctaaattgggaatttagtttaaaaaactcatgttcatatccataaaaattgaaacgaaaattaacataaagacataaaagggagaagaaagaactagttggtgatcttgctccgggtcgccaccattgcttcctttgcctccttctttagttctagggtttaattttttcctcatttgcctctaaaacacgaaacccttatatagaaaataatgtagatatctttgaatggtgaaattacaaaactgcctaaaaatctcgtctttagcccatagtcgcggctacataaagcttagttgcgaccatgggaaaattggaaagtccatgctctctaagtggcctcctagtcgcgaccatggaaaatggtggtcgcgactactgaagcaaatttgacagcttcagtatttttcagtaaaatatgcataactttcacatacaaactcgaaatgagttgattcaagatgcgttggaaagaagaagaagaaatctatagcttctatgttttgactttttccaaaatctgatcagattatagtcaaatttaggcttaaagtttcaactctattttcttgtagaattttctctattctatagattgttgttttctgaaatttgatcaatttatacattcacagtgtgaaacctgaaatcgaagaaaagaagcgtaattttattccaaatataataacaaagaagaaaaataactatagaaagtgacctaaaacataggctaaaaatagcttaacaaattcccccaaactagactcttactcgccctcgagtaagactaaaaactaagactcaaaaactcatactaacacacaattaactaagccttcaaaaattaagctactgatgccacttatgaaacttcattcaattaattaaactagaatttcaattcctaaaactctaacaattacttcggatacttactttgaaaaataatgtattaatgtaaataaacttcagtatcgaaacaatgtcgtagctgtttcactcattctaaccaatccatactcgaatggctaatatgcttgcatacttacctctctccactaatattgacaacatttttcggaatcaaaaggactttttcaggttagaaattaatggctttgatacttggtagatgaagaacattttggctataagtagaacccgtaaacttttcaccaattaaattctcccgaagtgttcccacaactaacaataattgagacttttttaacaatttccagacatcacttattttttacttttagcttttgatctctcgcttatttttttattttatttttttgtcttcttttctttctttcttctttttttttcgagagaaaattactattctaaaatttacaagagatgtcaggttaaacttttcatttcaaacttttctcaatcacgccatttttttcttttcttcaacactttcgctcacaccattcttcattcccccaaacttattgtcaagcttatggtatcattcaaaatacaatgaggatagaaattaagcagtgtggatacatcttttagttcaatgggtgaagaaacgaaacaggtttaggctcaaaagggttcactaaggatattcattttatggtaggcttgaaagg

SEQ ID NO: 29739 - DNA, 1400 bp, Cannabis sativa
caatcttaatggatccgtccctgagtggagcttttagagttgtattttttataagaaaataagttaaattttatgtaaatgagagataaaataaaaaagtattgttttaagatgatgtatgttattgacctaattttttgttaacaaatttagaagttcgtgaacgagtaataagatgaacataagtcgataaaaaataactaattttttgaaataaatttggtaatgatgaacaagagaatttttatagtggtgttcacctcctttcaatggtaatgggctgctccacttatagtgctattgatctcaatatttaagaagagttctctagagttatattctctaagagttcaattgagaagtgggagttcaagtgttttaccttttttatatagatttcttaactcgaggtatctcttaccttaatcatagttaagttaaatttaaaatacaaaataataatagaataacatttcgggtagggtcgaagtgatggtgttggtgatgaggaggccaaagtgatgatggtgtggataagcttgtctcgaagtgaccgaagtgatgcttggccaagaagttgccgagatgatgcttcgacaatgaggatctcgaccatgggggaggagactagacatggagtcatcacctaggtgcttacgtgattggagatggtatcaccacctaggtgcctaggtaatttttttattattgttttttctatttgagtaatttgtgatataaatacttaagtttaactctcaattgtaaaagaatacctaagtttaatttttggtagtaataatacttaagttatatttttaaaactctgtaggtacttgatcgttaaaactctgtaggtacttgatcattttcttattagtatatttatattaatttttttttaaaataaaaatttaatgacttggaccaatcaggaattgtcacgtggcaatttacttaacacttaacagtcatgtacctacaaaagtttttttaataacttagatattattatcgctaaaaattaaacttatatatttatttacaactgagaaacttaggtatttataccgtaaattactctttctgttttttgcaaaattagggtataacatgcgtacttttggcaactataaatattgctctattagagatgctattaaagattctctcatatcatctattaaaaaaaatgattaatttaaagtttatatatatgtttagagttgttaactttttttaaaaaaaatatgtcaaatcgtatgtaaataaaagagaaaataataacaaaaatattttaagatgatgtatttatttttggcaactagatgttatctccattggagatgctcttaatgtgcttactatgttctagcactcacattagcttccctgcccta

SEQ ID NO: 29740 - DNA, 1703 bp, Cannabis sativa
atttaaaatataaaataaatgcaaaacataatttcacttatgctaaattcatagcataagagtttattaagattcaactcatctaaaattataagaataatctcttaattacaatctttttgtttaaagaaaataccttttgattcaactaggatgatattaaataattgaaacaatttgaggaaaatttagtgtgaatttaaaattgcagcttaactcagtagttttaattaattgagctgcttacataccttctttatgaaaaatcaagccacttgtagttcagaacgaagtatttgagaatgtgaatataaaaattccggtatatgaccactttaaaaaattctttgttatttaaaagtttggaaaaattcctaggtgtatgatcttttatggaattttgagatttatattttataccattttacggtatcggggactgcacttagtcttagcaactatgttgcctatatatccttttataagaatcaagtcaaacgtaattgcaatgtgttcaaagattttgtatcttcaaaaaactttgtggagaattaactcactttgatagtttgaggtatatgacctcacttgggaatttttgaggtaaaaaacctcacttgggattgttgaggtgaatgacctcatttagaatttttatatagatgaatgacctcatttggaatttgacgaggtgaatgactttatttggaatctaatgaggttaatgatctcatttgggattttgaggatttgtgattgtacctaattttagcaattaggttagttacgtacccagaataaaatcaaatcgaatgtagttcatacgatctttggtatcttcaataactttgtgaagaatacattgtgaggtaaaataactcattttgagattttgaggtaaataacctctttgtgactttagaatgatattgcatcatttgaattgattttaatgagctcatttaccattaattatggttagaattttatcatttttttatgacaaattgagtcttgaaatctctttattatttttttttaaataaagagatcatttgactaattattgtaattaattattccattattttataagaaataataaattattttataccatataatatctccaagaaaattatttggaatttaaactaaaattatattatttgcattcaacaagatttcggagattatggcaaagagcatgttgacatactcttctcgcaacacattttttaaacaaagtaagccaactcttttattcttttatattagacacatatatgtgtactagaaaaaaaaaaaaaactacgtgtacttagttttaattaaatgcacttatatttagtcatatatttacttttatgtaagtaatttaataaattatttttattatatattttattcgtttttgtcataacaactctagatcgagttattattaacttttattttgacaaaaaaaatcaattcatggtactattttgtaccattttgaaaaaatacagggcccaatttgtcatttaactaaataaatgtccaattgaaaacttttgtaaaataatgaatttaaaatcgtatttattctaaaaaaaatattagttatagttttaaaaataaaatatttaagtaattattaatttatatgaataaaattgtaattatgtgaaataaaatttttaaatgcattagctgaaaaa

SEQ ID NO: 29741 - DNA, 2116 bp, Cannabis sativa
  modified_base (561)..(598): a, c, t, g, unknown or other
  modified_base (1130)..(1152): a, c, t, g, unknown or other
gaaaggattgttgaaaccacgtacaaaaaccttatgtatttttacttttctgcgctatttgtttttctgatttctttcggagttacagagttattttttgtagctacagaaaaactgttttcagtaccaatttcattattccgcatttaattgaataataaaactgagaatattaaaatacaaaatttcaactcaaaatagtggtaaaatcatcacaaaagtatcaaaaccaatcacatatcatctcagaaaaccataagttcacaaatcccataactactctaaaatacaaagtcaacatatagaaccaaactttatcaacttaaaacgaaaatcaacccttaccttaagctcttcctcttcaatggttcactacccagctgctaacaggacttgaatcacaagatttctaattgaaaatcaaagaaaattagatggtaggagtaaaagtttcatcgcaccaaaagaaaaaagttttgttacttaagttttcttaaaacataacatatatatatcttattctttttaaactgataacttcaaattattattattattatnnnnnnnnnnnnnnnnnnnnnnnnnnnnnnnnnnnnnnttattattaataataataatattagtattgttaataataattattattttattttaaccactaagaaatttttaactttagagtatttggtcaactccgagtactctaaaatacttcggtaattctataatcaatttatctcaataatcccatcaatattactaactaaaattgttatgatatttttggcctccgatcgggtctctagagtcattgaacctaaaaatattctataatcatctttgcactttcaagttcatttgcaaatgcgttgagtaagtgaggattactaaacaacattttgacactataaataccaataaagagaaatcaattacttagttcaaataaattcatacacattcagaaaataataagtattgaagatatgtttgcaaaaatgccaaaataaaatatgtttaaattattttctaaggtttccaacaaactgatatcagggtcatgtttaagcaaaagtcaaagatatcattcattgaatagagtagttagctcatctaaaatggacaccatnnnnnnnnnnnnnnnnnnnnnnnaaaagagaatcttacgttgtcccgtttatgcgagagtcaaggtcattcctatttcacgagcttctactattatttcactctttgtaagccatactcttagcagtcactattgcggtgatcgttactaagaataaaagacttacaataatacttatctttcgagattctacagtgttaaattgctaatgaatgaacatctatttgggatgaatcatattaaaacaagaaccatgtagaaccaataatagagatcgaatatcccatgtttaagctcattatttaaaaaaaaatatatatttttaagtaatcatttattttaataatgaagattacttattttaagttggtctaaaattaattaaaactaattttcaactttatttttcaaaattaattttaaaaaaaatccaaatataaaataaactatataatttcaaaattataattaaaatatcataaaataaatatcctgaaaatgtctaatttaagttgttctaaaataattaaattttcaacttaaaataattttcaaaatttaattaattaactaattaagtatcttgaactaatcaacttaatttaaaaaatatcccaatttaagttgctgtaaaattaattgaaattaatttttaacttaaatatattttcaatgaatatctgaattactaactatctataaagatgtagttaattatcaattttaaaaatattctaatataagttcgtctaaaattaattttcaacttcaatatattttctaagaaaatttaaataaataagtatgtagaaaaatctaattagttataacttcttcatttaattaaatataaaaaaatacatgtagtttatcttgaattaatttcatttaaattaagtgtgtttttcttaaattaattttaaaataatctgatgacaaataaataggattttttcgtttttacacttttaaaaagttttttttttt

SEQ ID NO: 29742 - DNA, 3061 bp, Cannabis sativa
ttgcgtatacttgcgtagcgtttaaaaatatagcaacatatacctggacgaattatcaagacaatagagtgcgaatttacaaaaagatagattgtgtttctaaaaatgaagagttgaatcttcatccaaatactgaagataatttttagtgggagaatgaatttgatcattgggttgctttgattaaaaacataaaagttggaaacttacgctatacacatttcaagtttatcaatatgtagagtttgcataatgactttaaaattaatgttctcaccagtaaaagaagcaaaggagagaaatcttgctgctatatgttttaagttgaaacgacttcaaaaagactttaagaaatttaacaagcagcagtttacagtttggagatgttaaagttgattatgaggtggaaagagatatctataatcaaacttacttgaaccttcaacaacatccccattctttaaggcttgaaggggagttaaattctgctcgggagaagctaggtactaatagtagacttcttgaaagttgcttgagaaaaaaaaaaggtaaagtggagtggttgaagtttggtgatgaaaactcagcctatttccatgtttgtatcaagaaaaaagggagaacaattggattgcctctttccttgatgagcacggtcagattattgatgattattcaaaggcattccatcatttcctctctcattttaagggcttcatggaaaattaagtgtcgttgctgaactcattcttttccaatgcataaatgaaggaccccgactatccttagatcttcaactgagactaattcgacccttcacttttcaagatgtgaagaaagccatgatttcaattcaaaacttaaaaaatacaggtccgagtggcattggttcaagtgttttcaagagtatatgaaaggagttgggccaagaaatttcctctgttgttatcaattttttcaagatggcataatgccaaaacacctgaatgaaaccttgctcattctcattccaaaaagtggaaaacccttcacaggttgtagattatagaccaatagcatgttgcaacaccctgtacaagtgcatctcaaaggtgatatgctcaagactttctgttctcccagagcttgtgaatgacaatcaaggtgcattcattaagaacccatctcttgcacataatgttctcattttataaaacttggtgaagggttatcaaaataaaaacattactcctttgatgtttgatgaaaattaatttaatcaaagcttatgataaaattgattgggacttcttgggaaatttactaaaagcctactattttctgaggcaatctatagaatggattatgatctgtgttcgaaactctagctattttttagtgatgaatgtgaagatacaaggccaattccaaggagctaaggtctaaggcaaagggactctattatcctctcatctttgttcttgtaatggattatctatcttcgaatatcaattggaaggctagagaaaaaagcttttgcatatcactctatgtgcaaaagactacaacatattaacctctgctttgcggatgatctaattttattttgcaaaggaaatgttatcggtcaagtgcattactaaagcattctttcactttagcaattgctcagggctaaaagaaaataacttgaagtcaaagatatactttgcaagggttagtgaagcttccaaataagaaattcaacaattgatctcattgaatacgggagtttctcttgaaataccttggggttcttcttcaaccaacagagtggaggcaagaagactatgagactattatcaagaaaattctgataaatttacacacttggacaagtcgacacctatcattttcaggtagagctcttctcattaactctgacctaattggaataagatgttattggatgagcattttttagcttcctcaaaaagtggccaaggagatagatcagatttataggaattttcagtgggggagaaaggaaatacaagtaagatacatatgggttcttgaaaacttgtttgcaatccaaaacaacttggagggttgggattctaagagggccctaaatggaacaaggcctccttagctaagttacttaaaaataggatgaaattttgggtgaaatggatgaatattcttaatctgaatagtcaagacatttggtctcttgagctaaaatctgatgtaagttggtattggaagaagctcttgagacatagagatgtattcaccaaggcggatatcgtacaaactgagtataatgataaatttaaaatcggtcgggtccacaacatgctcataatttttaacatattgttgtttttttttctttctaaaaattctaaaatatagaacatttgaatagagatgttattagtaattaaatattacattatcaagttcgtttatgtagcgagaaaaattatttgttttatggagataaaatagtaaattaatattgtgttaaaattaaaataatatttattttaaatttttatataaaaaaaaaagttttattttaaattttattttaggtctctcaacactttgatacggcctgcattaataaataacttttaatttaaaggtgttatactttagtaatgaattatagatttatattattctctaagtgtcaagtgtagaagcattttatgggaccaaccttcatgacctcttaatataagactccttgtatatatttatttttagaaaaatgattactctttgaagattaaaaatttcgtgtaattcttcacgcaatccacaaattttaaaaaagcttcgcaaagaaagaagagtaatgagtgtaatttgtgtgtacgtatcttactaaaaaaaagaagagtgttactgtaattttctattataatctcttaagaaatagttgtacttgaaaacaaatgtctaaataattttttatagtaatgttgattatagttacaacattatttttatagattttaaacaatttcaaataatttactgtaaataataaatttgaagtttgtgaacacgcgtagtaaactgaaat

SEQ ID NO: 29743 - DNA, 3834 bp, Cannabis sativa
  modified_base (247)..(254): a, c, t, g, unknown or other
  modified_base (749)..(753): a, c, t, g, unknown or other
ttaatattgttgtttgcctcgtctttctgataattattgttgttttcatctattgtctttctgattttattgtattgtacttttcataatatctctctactttctttgtggacttgtgaaaatacattttagacaaccatagtagaagaaaagaaagtattttatctttttaggacacataaaagtacctaaattcttatttcaacttgtcatctacagcttgatataattattattattattattnnnnnnnntattattattattatgtagagaaggttgtgtttaggggtgttcattggatcacattcaatatttttaggcctatccagatccgatccaatcatatattggatgttaaattttatcatctgatccgatccaatcaatttcagtcatccaatcgatccaacatccgattggatcggttctatccgttggatggattttatatatatttattggtttaatttgagtttattcaatattttagacctagtattttttggatcgaatcggattcatctaatatttttgattcagtatgtattggattggacgggatccatccaatctataaaaaaagagtaaaattttaatattaatttttatatatacctatagatttaacgtataacaatataaaatctaattactcatgcaaattaaatgaaaatacaaattagttcgattggatgttggatgtattagatttttagacaccctatccaccatccgatccgatccannnnnatatttaaaaataacatccaatccgatccgatcacaattagatatctaatgtttggcggtcggttgtaattggatcggtcggttcacattggattggataaatttatgcacaccctgatggtgaacaagactcaaaactttattaattgcatgagacctatcaatttaggatgaaattaatactcaaactttaagaaatactttttttttttaactaaaaacactcttatattatatttcattaaaatgtacccatttttgtgagtgagttgtttaatatactttcattctctatttaagtttagcacataatttacatcaacttaaggagtatgatgggaagatcatctataaaagttggtatatcttaaataatataaaaataaacgtaaaacttaaaacgtaaaataaagtggatatacaatataattttctcattatactttatatatatttgctaagaattgagattttcttaagattcatatggtaatgttattgcttttttcttattggcagatacctttcaataatattatcattttactaaaaaaataaaaaaaaattcatatggtgaatctgtgactgattattttttattttcttttaaataacaatagaaaaagaagggtttgctctttttcaattaattattaaaagccaaggtaagttttagcgtagacatatatattaattgtgccttttttaacaatgcattttaaatttaatggcacatatctaaaaagatttataaaattaaaaatattacgactaaattaaaattataattaataacaaattttgaatattatcatattttttttatatataaatatcacttaaattaaacattatctaatgaacaatatgatgtttgttgaataacataaataatactatttatacaactaaacatatatataaccaaaataaaaattaagaatataactaaatatcgtgtattgtgaacgtaaattaacctaatggtaatgtttgtttactcattatttattgtattttggctctcttccataatatgagtgtttcttattgctctagaagagttaatgttgttgcctacaatcttacccaaattgtattaatctaatggctgatgtcataaatctttaatgttattcccatcttcttcatttttgagagttattgctctttagggtgagttttggcgttttctttttaaaaaaacaattttattctaaatcttaatacatatataaatcttgacatgagtaaagcttatgatcgtgttgaatggcggtttctagattctatccttcaagtaatggggttcagcgatcggtggataggcttgattctaagttgtgtgaattctgttcgctaccatgttattaatagcggtcaaaagatggggccgattgttcctactcgaggcatccgaaaaggttgtccgctatcaccatacctattcattgtttgtgcggagggattctcatccttagttcgacactatgaggccacaagacttataacgggatgcaaagttgctagaagtgcccctaccatttctcacttactgttcgcggatgacagttatgtgtattgtcaagcttggaagaagaagccagccatgttttactactcctccaaactttcgaaggcgcattgggtcaaaaagttaatctccacaaatcttctgcttttttcagctctaataccgcgacaaataccagaaatagcatttgcaatatgatgcatatccaggaagcgggagaggatagtatgtacctggggcttccaagtatagtgggccggaataagaacgctgttttggggttccttaaagagagaatgaggaagcggattaatggttgggagggtcgttcttgtctcgggctgggaaggagattcttatcaagaccgtggtccaatctctcccttcgtatgctatgaacgtcttctttttttcgattggcacatgtaacgaaatagagcggatgatgtcgagcttttggtggaaatcaaacaactctaatggtaatggcagtggtatcacatggatgagttgggatagaatgacgaagcataaatatgatggtggtatggggtttcgaagtttgagggactttaacctagccatgcttggcaaacaaggttggagactcttatttaacattgactcccttgctagcaaagtgttcaaagctagatattttccccatggtgactatctctcggctgagttaggatcgaatccgagcttcatttggagcagtatctttgctgcaaaagataagtgaagctaggcctaaggaagagaatcggccctggtacttcagtgcaaatcactaatgatccttggcttcctagtttggatcattctgttgttgtccccatgattcaaggccttgagaatttcactgttaacagcctgttccaagttcacaatcgctgttggcgtcgatgcagctatcatccttggaattcccattgatcaatttggtgaagtcgactcttggtattgggctgctgagaagaacgagttctattcagttagaagtgcatataatttaatccaggatcataaacatcactcggccaacacagtgagtaataagttttggaagattttgtggactctcaaagtgcctcctaaggccaaagatctcgtttggagagcggcctcaaattgccttgcaacaaaaagaaacctgtgtatcaaaaaggttctggtggaaagtaattgtcctatgtgtgatgtctctgctgaaacggaatggcacttacttgtggcttgcgattttgcttggtcctgtttcaatgttgctggtttagcttctgtagcaagagattctttctcttctttgctgccgtggcttgaggctactgctagctgtgttaccagtgagatgttggggcgggtaataatgctgtgttgggctttatgggcagcgagaaatgatctggtgtggaagcagcgggtgagaagggtgagtgaggtggtggcttttgcaaatttgagtcttgaccaatggataaaagctcaaggaaagggtaatctacccttgttgtctcctctcaaagatggagatggtgcggagc

SEQ ID NO: 29744 - DNA, 2243 bp, Cannabis sativa
  modified_base (689)..(698): a, c, t, g, unknown or other
aaaatccgcaatttcacactcttagtcttcaattatttgcaattacaaatatttacttatagtatattattaaaaaattaataatttcataaataaaactctccatccttctataattttatacttcctattctccatttttcctaacaaacatagccagtacgggtacagtcacccgaacacgaatgctacttaaattcaaagattttgaacccatctattagagttaccagatacacccgaaccatcgctttagttgtttttcaaaaacaggctcagagggtatgttgggttcgaggcccatatgtgcaacaaggactgatctcggcttaagacaagttagacttgcgcttaagttccatttaaggctagagcccaaaaagataattttttttttttaaaaatacatatttttttattaatttttaaatatatatatatatattaaatagagttaattcaccaaaaataaaaattaatagtgaatagattgattgttattatgttaagaaatataaatgagttgatgagatatgtggttgttaattaggggattgtaaggatgaagatggtagcaaaggaaggtgtgttgcaggggccattaacaactacactactcagcttctcacctacaatcaccaccactctcaatctcaatgtacattaattctattattattattattatnnnnnnnnnnattattattattattattactaaccaaatattatcatcaccatcccattagataacctcacagaagctcttctattccttgctcattttatcggtgatattcatcaggtatgaccaaataacaataataataatatgtgatctataattaattgtcatgattgagaataattgaataatttatatgatatgatattaacttttataaaattaaacagtatattgagaataaaactatattaattcccttagtcagggaagaatggtaagtagaaatattacaattttgcatctaccttagttatatatatatagttaatgaactattcaacatgattcataattgttattaggtaccttaaaatctttaagatccagagttgggctgggctaagttgggctaggcccatgcttaaagttaacctaacacaaagacttaaaaatatacatatttttaacaatttttaaaagtaccatatgttacactatgaaatagtacaagggctttttagtaatttgcaaagggtgtgaagaagtataaatgtgtaattgtgtagttattgttagatatggattgagaaaataaaacttttgttcaatttagagtttgacactgactcaaagagcacatttcgagatttgtcctatttcgaagaggactattaaacaattggtgctttcattgagagtcgaataatttttcttttttcaagcctgaaagaaggcacttaggaataattagcttaagcactttgaaagtatgatttaacatttatatatatatatatgtgtgtcttatgcagcctttacatgtgggttttacctcagacagaggagccaataccattgatgttcattggtacacaaggaaacaaaatcttcaccatgtaattaataataataataataatattactaatttaacttcttataattaattaatacattgtattaattattattttaattaattaattcattgtataatattttttagatttgggatgccagcataattgagacagcagaagagaaatactatgactccaatgtagaaggcctagttaaagccattgaacataatattacggtatatttgtaaataattaactaataattcttatatattttttatgatgatcttaattattttctacattcatataattaattacaactaattttatttttatgcaagactgaatgggctgatgagattaagagctgggaaacttgcaatttgaataacacagcatgcccagacatgtaagttaatttttatatagggaagttctgtttctaatattaataataataaaaaagtttaaaaataatttttaaaaattatttttaataagatttcatacaattttttttatcatattatataaatataatttattttcgtttaataggttggtatctttttgtcctttaaaggaatatttcggtatacttcctatttgtttcagtattgaagagaatttttaatttagtttttcacgatcacatactttgtagttatttaggagcacttgtaattttt

SEQ ID NO: 29745 - DNA, 1398 bp, Cannabis sativa
gcagccatgtgttaagcacaaagcgaactattctttcgccttttactaaagaataccgtgtgcttgtcactttcaatggcatacgcttatttttgaagagtttttcttatagaaaactctaaaatccagtttaaacatggaacgcatttgtccaattaatgtcgtttaaattgtttaactttgtttgttctatgtattgtacatgatgtgccctttactatttattttaaaagaaaaccacatgttatagtgttcacatatattgaatttgattggttattattatagattcaagttactcatattcaaataagattggattcaatcttctgttatctaatcaaaatcattttcatgaatgtagataaaagaactgatcaaaaccttcttagttaagcagataatggaccaattaactttcttttccaccggaacataagatacaaataaaattatgatttcaaattatgtttatttaatatgtatgatgaattataataacaatatatattaataaattcttctattctatcaaataaagagttgtttcttcgaaatcctatgtatgcccttttgaaaaaatacttcatctcttttcatatcatatctggctctagttcctgagacaaattgaaacttattttgaggatgtatggcatttgtatctgaggaaaaattgcataaccaatcaactaatcatattcatttttggaaaagaaatctatattttgaattcattctaaaacctaacaaatagatggaagaactaatcatcacaatctatagaagtaagaactccaattgaagcttgaaatagttaatccaatgaataattcactattcaccaacaccaagtgactcaactaatctgaatgtcctaattaaacgttagaaattgtacgtttgttatactatcccacactggaaagtgcataagcattcctgtgaaagagtaactatatagtaagtggcaattaatgtttaaaaatcacgcagccatgtgttgagcacaaagcgaactattctttcgccttttactaaagaataccgtgtgctcgtcacttacaatggcatacgcttatttttgaagggttttctttaaatagaagaccctaaaagttaagttcaaagttaattttttatacgtaaataataattttaattttcttttcgtaatatttttttatttaattaagcttttctatgcaatagaggtttatgtgaaggagctactgtaacagcggttaaagttggctgcgtaacaaatttctagcctcttttcgaaaagaggtctcgtatgtcgaaaagaggcctggtgggctaatctcagtgaagtaatgggtgatgtatcattgaattgagtgcaggttctcttgcttgtctgattagtgctttttt

SEQ ID NO: 29746 - DNA, 1181 bp, Cannabis sativa
tcaatcctttttattaagtggttcttttcttttttctctcgttctcagttgtcctgctgcacgaccaaaccaaatgatattgcacatcgtttgtaaatcaattgataataacaacaaaacgttattttgccttgtttattttcttaaaattcttttccacatactttgttttttttttcattcacctgatgtaatttttgggttcactcgtttttaaatgacatatctagcatgattattatatcgtttatatataatacttgtattcatttttttgttaatattaaaatttcttactaaagagaactaaaacaccatgttcatggtagagtgtctggagacaagaggctccagcccctcaatcaatgttatttctcggtgatcgttttactatgtaattttgtcccgcttgttttaattttataattgttattagatattaaacaattttttatttcatttttaaagtaaaaattaacaactacatgacttgaaccaattttgaactaacatactgatttggcactacttaaagtattgaaaataatattgagtgtagaattacctctaatcagaggtcattgtcactatattttattaattcaggttatgtgcgtaataattttaaattataaagagtttcattacaaatttttcaataactaagtgcaattttttttttttgctaaaagatccttaattagtaacaaattgcaaaaaattcattaataattattagtaatttaactttaaatattattaattttaattaagattttataaaaaagaaattatgaagctactatcagattacaaattaattattatttatttatttttaatttttaaattaatcacaatcatttaatagtaattcaataactaaaaataaatataaatatagtgattacatatttgatgtaactattgaaacctcctcttattctatatataaaattgggaccaaattggtatattttttagaataaaattttccagtgtattcatttaaaataaaatagatgtaccgattcattttaatctattttggtatttgaaataattttttagttgatttttttatggtcatgtacgatagaattatttaagatatcttgcaaaattttaaaaaattttaaaaaattttaatatgctaaaaatagggttcaaatagtgtgttg

SEQ ID NO: 29747 - DNA, 2829 bp, Cannabis sativa
ttgatagactttttgataatgctctcttactctcgtggttgattttaggtgatttcaacgattatttatctcttaatgatagatctagcaactctaatcccccctcttatgctatgtctcaatttcaaaactttgtaaataaattctcccttctgcctcttagtccgattggctccaaatatacttggaagcatggcagtgtttgtgagaggctggactggggtgttgttaaccacaaatggcaaaataatttcccccataccaccctctttcaccttggtttctatggttcgaatcatagagttattaagataactctcaatgatgcgagtatgctacctccgaaacaaaaacggtttttgtttgaaaatttttggctcacggagccgtcattctatgaaactgtcaaggaaagttggcaccatggctctcccaatcaaactcctctaacccttgactctttccttcttaagcagcaaatgtgtgttgatgatatcaaaagctggaatgctggttttaacagtctttctcgtaggattagtgctcttgaaaactcaatcaatgccattcattccaaccttcccctatccagagacgagattcaggaggcttctgccttacaatttcagctggattcccttctttataaagatgagattctgtggaagcaacgatttaaaattcattggctgcaagcaggtgataataacaccaaatattttcacagtaaagccactgctaggaggaaaacaaatttcattcgaaagcttaagtgtgaggatggaagagtggtcacttctattgaagacatttccagggaagtgtcttcctttttcaataacctctttaagacacaggaatctgatagtcatgctacccagtacctcctatctgccatcaataaatctctggataatgatcaaattcagtctcttgactctccttttgaagcctatgaagtcaggcaagccttgtttcaactttaaggagacaaggctcctggattggatggacttaatccggccttttatcaaaaaaactggagtactatagggactgatctcactgctgtgatccttgacattcttaatcatggaaaggacttttcctctatcaatgaacctctcatagtcttaatccctaagaagtccaatgcctcctctttgagggattttcgtcctatcagcctctgctcaacgatttacaaaatcatatctaagatgctttccaaccgtcttaagagtgttctgggcagccttatctcccctttccaaagtgccttcttgtctgagcggataatctttgacaatatttttattgctcaggaagtcatccatgccattaaccatcgaaaacaaggtaagtttggttgggtgggcctcaaacttgatatggaaaaagcgtttgatagagttgagtgggacttccttttggctattttaaataagttcaaattccctctaaaattcattagcttaatccatcagtgcatatcctctgcaaaaatttgcttcagtatcaatggccacattacaagccccatccatccttctcgtggtattcgtcaaggggatcccttatcgccatatctcttcctcctctgctctgaaggccttactgctgcccttcgactccaggaattaaatggatcctttaaaggcatctctgttgctcgcaatgctcctcctatctctcatctgttgtttgcagatgacactcttctattcacggttgcttctccctcatcttgtaatgctctcaaggaagctcttacaacttaccatttagccactggccaaaaggtgaactataccaagtcctccattcttttttcacccaacactcctaccaacatctccacttacttctttggtactttaggtctagagtcaagacctttcatcaacaagtatctaggagttccccaatgctttgggcgctcaaagaaatcgaactttgactttattctgcagaaagttagttctcaactttctaactggaacagcaaattgttctctaaggctggtaaggaagtgcttctaaaagctgtcattcaggcaattccctcttacacaatgtcgtgtttcaaactcccggcatcaacttgccacaaaattgaaagattgatggctcaattctggtggggttcaatggggaaaggatcaaaaattcactggaaaaattggcgctctctttgctcttccaaattctttggtggtttaggattcagatctcttatctctcataaccaggcaatgctagccaaacaagcctggcgtgtcctatccaatcctaactcccttctggcccgcatcttaaaagctaaatactttaagcttaataactttctcgaggctaagctaggtcacacaccttcatacacttggtctagtctagtctggggaagagaccttcttggtagaggcttgctttggaaggttggaaatggttgctctatcagaactttccaggacccctggattccaggtatgaaatttccaagcttaagaagtagtgatctacctcctgctgataaggtaagttttttcatagacaactctggtttttgggatagggaaaaactgcaacattactttgatgactactctgttttgaccattctcaaaattccaatcggtggcctccaaaaagctgactcactaatatggaaccaagaaaactcaggtattttctctgtaaagtcagcctaccatatagctaataatgcatccctgcctccctcctcctctgattcttccctttctaaagcctggtggaaaactctttggaacctaaatgtgcagcctaagattaaaaactttgcgtgga

SEQ ID NO: 29748 - DNA, 1187 bp, Cannabis sativa
  modified_base (26)..(27): a, c, t, g, unknown or other
aatcactgaaacagtaaaattgaatnnaattagacaaaaatccttaaatctaacaatctcaatagttcacgggaaatttttaacggtaaaaaaagttaagtaagaatgatttgataaatgtcaaaatttagagagaaaaaaccctaattagcgtattaattttgtatgtagacaaattgttctttcctaattccaataaaatgtccacatgtaattgtttccttgttattatataattaatcccaaactgtaacttgcgatattgtcatgaccacgcaagattatttgcagccacatatcaaaagctcaaattaaaaagcttactttttattgttctaaattaaagggcttacttcctttattgattagcttataagtaaactgttcttgaaggaactaataattaattaaataaatatattggtacaaatacaatgttcttgcttagccaagccatatagaaaagaaagtttttatataatttacagtaaaaaaaaaaaaaacagtgcagtcaaaagttaattaaaattttataaaagttaataaaaagaagtgtattaatgatgatatatagaactaaattttagcttctactttctatttgcagaaagtttgggatccttgtagatgtggacataaaacagatgtttcaacaaccaaccaatcaaattgtagattctatcaggcatttctaccaataatagatcctaattccagtcaaattaataaataaattaataaaaatgaaaaatatgcaagaccaatattgatgctttacttaaagcccaagcttaccttataaagtgggtagtgtgtagagaaactgaaaacacactagtttgcttaatccaacaccaattttgtatcaatattgaataatgtctttgtttttagaaaggatgtgtaagtaatgttagagagatagatttaaattatacatatcttgttttcacacacatatttaatttaataaatattatatttagtgtgatttatcaaaaaaataattattatttaagtggaggtcacattgatagttgtttttttttttaattatctcatatattatttttcaatttttttttttaaatttatggtttgagttgattcgatggcatgggcgactcttgcacagggccctaaaaaataaaagggcctaatatatatttttttaatgctcttcaatt

SEQ ID NO: 29749 - DNA, 3489 bp, Cannabis sativa
  modified_base (31)..(52): a, c, t, g, unknown or other
ttagaaacaaattgtcactaatttagttttnnnnnnnnnnnnnnnnnnnnnnaaaaatacatttagtcacaaaaaattgtgattttgtggctaatatttttaatcacgtcacgacgtagaattgataatttataattagtcacaagttttattgtgactaaaaataagattttttgtaatatatccgatccaatctgcttatatatatatattattttattcatagtgcatcaagtgtgattttatattttggatataattcaatttaatcagcaaaagtacaaattagatcgattattttggataagttactttttaatattgaattatttaatatttattaaaaaaaaatttacataactaacaacaaaataaaaaaatattattgctttatatctccatcgacaaattaaaataaataaacaaaaaaagacaaatttaaagcaagaaacaaaaaactacatgtataaagaaatatttaattttgttttagattatattttctttataaatatgaatagattattcatttgatttactctattttgaaatatatgtgtatcatatgtatgcgatttttaaattattatttttttacattaaaatattaattatatatattttttaaatatatgtgaattgaattggatcgattatttttatatgtaaatcaacaattactatttgtacgagtgcaaattttagattttctaatcgaatccaactagcataggcgtggatattcgtattttacgaattggatcatgcagatttaattaaattaggtattttatgagtgcccttacatttatatgttaagtcactttttataagtgagacccaccttatataaaatagattagttgaaattatttgccacataagcgttcatcaaatttttgtgttgctgtctagattttttgtaagcttgacacgtggaccctggtccaggaatgtttgacacatggaccccgattttgagaaggacaaactattctcgaccggacataatcattcgccctgaaggcctcctgctaagagtacatatgcggtgcggaaggctctgtgttttgtggtattcactagaccccgaggtcgaagcttaaaacttcacggaaagacttcccccaatatgccttcgtagatcgaccattgagggactaaggataggtggattcccgcttggtgtcgtggaagagctccatccgtacctatcaggttacaggcgtgacgaccttgcaatgtcaggtacgatgccagattttgtcccccacgccgagctacagtacaaagcatgttcacaaacctgtacttgccccagtgatccaacagctactatcaagggcaattcaaaaaggatgaccctaaggcgatgcgtgtatggtgtccggactgtacaagctgacaccctcaaatgccatgtgataaatctgccacctaccttaacgatcatatttggcccaacacgattaacctagcaaacatgcaaataatgaagattgcctataaatatccctgcattccatggggaaaggaggagaaccttctaaaaccacaaacactgtattttaccaataaaaactccattgaaatttctactaagcttcttcttcttcaagaggaacgagagaaatagagagttccagtctagtatatttgtgtatgattcattgtctgcctaagtggctaataaaatggactcgtggactaatgatagttaatgtctgaaccacgtaaaaaatctcttgtcatttattttatttactttctttcttaagctctaaatctaatcagtttttaaaaatctcggtaaatattttggtacttttattgagagctcagaaaagatagaaacatgcatagtgtttgccgtcgcaagtcttgaaatacaaaagagaaagtccaatcaagaaaaagaaaaaagatactgtcgtggacaaaggcccacacccttgtctgagcaagagaaatgaagaaggtggatgccaatggtctttgagcttccgtagctctcatgcatatttaaaaaggcttagatttggccggtcaatctcttaaaagcacggctgatcccttgtgctctcaagcccgagtgttctgctgctcacaaggggcgtgaccctatagaaacggtaagatatgagaaacttctaggtttagtggtggagttaacaccggtcgcaccaacggccaataacctacggggaactacccgaggtggcagacttatcaagttgagcacctccttactactctacccccttgacctacgatctcagtgccaatactgatgatggtgctagatctattaacgtcaactacttccactaccttttcgactgagcggagaagctgatcagaaactgacattgcaagaccccacggtgttggcagctatatgctctcctccaacgtcattagagtctgctaggtttctggttgggcctaatcatggtactgatagtagaaagtaggtagttaaggcaaatcactttggaccgaggttgctgatagggatttctaccattataatgtaaatatagctcctcaggtaacatcaaagaaagtaacttgagacattatagtcaggagagaaaatatttgtcgaagcaacggtggccgcactaaaggtctgagctcttaactcacctcgagctcttgcctcgtagggagggtgtgaaggtcacacccaggagaacgtcagttcccaaacaacggagtgcccaaatcttccccctaattttaagcctcttgcaaattcctgaaatgtgctctctggtgttcccaaacacattagcacaagaaggaactgcagtagggtagcattcctccccgaagtctaacacgcgcgcgaactagcacctccttgaagatatttttttggtatgacctagcttttgtgtgaaaaattagtgggagttgataagtcttcaaccctccttcccgaacgagaaggactacttgaagtctatcgtacgcccagtggtgtttcaccctttgaattttagtgcaacttcagccttttctcgcggaagccgaagcctgccataaaaaattcaacgtgactctcgcgtgcatgaagttttttcattcgtgaaagatcactggggttttgatacatcttcaatccttcttgatgaagaaactagtttcttgatgaagaaaaaccagtttcttgatgaagaaactagtttcttggtgattttttcagtgattttccccgcgataatgccaattttgactttttcgacgctggcagcagctttgacaatttttttgacaccagcagctcctcaggcaacttttctagcactactgcaaactttggcaactttccagccccaatgacaactccggcgatcactgtagtttcatttgttttatttatttgtttaataaaatatgaatggaattttaatattttttatggtaattcaaagtggcatattctatatatgctaagtttttattttaaatatcatatttttt

SEQ ID NO: 29750 - DNA, 2541 bp, Cannabis sativa
ttctgcgctattttaattagtaatcccggttaggggattagggctttataagtattttgggtagcgtgcccaattatttagggcgttccaacttatctctgacctccttctcaagtctagagactctccctctcatctttagattattgacctccttggacaaagaaacattattagcctctagctgctcggttgaaggcatatcttgcagctctttggtcagctcctcaaccttggtgttagcagcaagaagcttcttgttcacctccccgagctcattcctcacttccccgagcttgctctgcatgtcctccatttcctttctggccacatgcacctccctctgcagtgtgttggtggtggcaaggttcttcgcagcagctgatttggctcaagaataggaaaaagccatcttaacaattaattgcacgacaaacatgttaaagtttgagctacataaaagagaatgaaattaaaagcaaaaaaaagataattacctgagtaggccaatgagctcatcaactggcaccttctccttggacggagtctcgccccctttagactttttggccggaggggacaggcccgagttatctcccactctcttctttaaagcttggatcatcttctgagacatttctgcacaaataaagcaaggtaattttaagcagacataaaatatgtgaaaagcataaaatgagagaagtaaatgcaagctaaagtaccctgcatgcgggaaggggcattttcgcaaacaattacagaaggagcatcatcatctgacgactcttcttgctctacaaagatgacttttccttttccttctacaagggtagatggccgagccagcgtaccaggttctctaatcctgatagaatattctattggtgcctgctcggtcaggggagctttattgttcttctttctcgacctatcctgctcagaatattcttgagcatactgctcttcctctgaatattgttgagcataatgcttggccccgacacctcccttcgacttagcctcacgcttgagtggaatgagctctttgtcctactcggcatcatcaactcagtttggcttggacttcttcttcttctccttcatgggctttggcacaaaatcctttcggaaaagcttgtacttcacaaagttggcctcagtggtaatcaaagtaatattccaagcgccctctggcagttggagaatggtttgtgccctcaacctaactcccaatgtgaaaggaggatgacagtacgagggaatctactgaaatcgagtgtgggcggtatccatgctctgcatgaagtagtactcgtccacaaaaatatcctatttttctgacatcatagtccatagtaccctatagccatttctcatccgattgggagaagtagaagtaccccgatctgctctgcttgggagttgacttcaggtcgaaaagctcgttggtgttgtgtggagatggctcaccccattcttgggaagcatagaagatgaatagggtggataagtatttgatgccctttggtgtgaactgggtcgggcagagatgttattagtctgcaatcctcttgaagtacagaagcaagggcagcattgcaccctgcttagtatgggcacccgactaggcacagtatccctgtcttgggctggtttcctggtgattttgagaagggaagaagcactcaacaccgcccaggtatccatctttctcaaaactcctcaactgggtctgggttacgattgatggaagagacacccaacgagctcctaagacaccctaccttctttgaagaactgcctcaacgtactcctcagtgacgtaatcatcaccctctatcagaacgtcaccgacctcaaacaccggttcccctacttcattatagccttcgaaccacaatggctgagcaactccttctacatcggcttcagatggactatcaagatggacctttccctgatcctctatctcttagaattgtgcgttcccctcactatcctccacctcagcaggaggccaggcctgttcagcgcttggcatcgtggcaagctgggccacgtgaggaacagttgtagtaattctctgcatagtctattttgggcgagccatgatcctatccctggatggtgttcggttggtatgcttggaaacagttacagcggaagcagcaataggaatgccaaaggcaccggtacttggacggcccacagggatggtattggctacgtctggtcagacaatgtatgtctagttggacggcaagtatcgtctccaccccttcttgggttcccaaatgaagcgtctgtagccttcacttgtgatctgctatgacatgccaagtgatgtttcaccctttggtcttttaaagtgaagtcatcgcttgaatttttatccaattgtagccttctctcgcggaagccgaagtctgcctcataaaatttgacatgattcttgaatgcacatagttttttttacgtgacagatcactgggggtacgacacgtcttcaaccctccttcccaaaagagaaggactgct

SEQ ID NO: 29751 - DNA, 3018 bp, Cannabis sativa
ttttttttttcatttttcattttccttttctctttcaatttgttcatgctcactgcccatatcgtcaatggcaccacccaccaccaccatctaaaataatttacgattcccacccaccatggatccgatcatcgatcaatggttcaaaaaaaaaaacaattcagtgatcgttccacctgactcaccttctccttctcccacctccatcgtatttagattgtcaatgatagaaatcaatctcagatccaataatgggttctccgattttcagaaggaagttgttgtagaaggctctggtcattactggcgaactttaggtcgacattggtgtggtcctctacctgtcacctctacagatctctggttgaatcgagtccatacctggagtttgagatctggactgaaatacgcgtcactaaatcagcaagaaccgaattgggtcacgggagaaattctaggttatgatcaaaatgtgacgcacatcttcttcttcttcgatggcttcatcgccgtttggggctcggtgaggtttatgctagttcaatacaaatatgtttagaagatcggatgggtggggtttgggataaacaaatatgttttttttagaataaacactattattataaattaaactggtaagtcatttacaacaacagagtagataggttgaggggtgacctcagaccaaaaataagcttcttccagccctaatgcaaacttagctaagtcgtgagcagccgaattagctaaaagcttaacatgtgataaagttacatcagggaaaaaggaaagaaagcaagagacatctacaattagatcattaaatgctgaaattgtagaaggagtgcgtaaagcattaacaaccagcagtgcatccgattcaacctctttaatttggagctgccattgagatgcccaatttaagctgtgaaagagagccttagcttccatctaatgagaggaaaaaattccaacaattggcattgagagggcagcaaccacttgaccacgaaagtcttgcacaatagctccaactccaatggttttcttgttggcatcgacaactgcatctacattcagcttaaaagtacccaaggcaggaggataccatggaatagaggcagtagctagaggttctctggttgtcatcaatattgcagcagcaggagggacagcagcagcaacttcattgttgctgtgatatttgttggtggctgctctgtaattgctgatataagaggcagcaaaagttgcaagattcttggctggttttgctttgttaccatgaacaactcgattcctctctgtctatatcgaccagaacgtacaaattattaattccatttcagattttgagtaaaccgaagatagatgaaccaagtaatctcctttcctcattgtagatgattgctgccaatcgaaattgaaacctgaatgcttccaaactgctctagcatatcgacacccaaaaagagcgtgaccaatggattcccaagcacagcgacagattgagcaagttgaatcgatgataattttttgtttcaccaaagctgtagccacaggtaacacatcatggtaaacacgccaagcaaatattttaatcttcgtaggtaggtggagagaccaaaagtatttccaccatgatttggctacggttgatgaagaactcaaatctgaatgttcaagagcagaagcaaaatgatatcccgactgaactgtatagatgcccaagtggtgatgatgccaaataagagtatctctacttgggaagaagctcaagggtatagttaaaatcctatccacatcagctgctgaaaaatattgcagcagtaaggcaagatcccattgcctttcttcagtaataaaattcgataccatggtgttggggctgcttgagaaaaaataggggagaaaggtggtattgccaggaatccaaagatctgaactacaattgattgctcttccttcacctattttccatcgtagtccatttaaaagtagagcttttccccaatggatagcctgccatgttaatgaaggtgaatggccaagtgtagcatcaaggaaggagctttgggggtagtagcgactttttaggagttttcccaagagtgagtcaggatttgcaagtaatctccaggcctgttttgcaagcagagcttggttaaaagtttcgaaggagcgaaaacccatacgtccttcaccctttctttgacacaatagattccataatctccaatggatttttgagccattttcattcaaaccccaccaaaagtttgacatcatggactcaagttggttgcaaaaataagtttgcagccgaaagcaactcattgagtaagtaggcacggattgaaccacaacactttgagcaaaacttctcagcctctagcggaaatttttttatcactccaagcattcatgagcttccaaatctttgctttgatatcactaaagagttgtttcttatccctgtccgagtatgaaaggagccccaaatacttctcatggcactgacagatgggcagggagagttgtctatggaagaacatttgggtagcaagtgttgtatttggcgaaaaggacatgactgacttaatagggttgagtacttgacctgaggcatggtgataaacatccgtcactctttttattgctagacaggaacgttcgttagcttggaaaaacatgaggcagtcatcggcaaaaagtaagtgtgaaatcgggatagcacgtcgtgtgagtttgaagccattaagattacccaaagcttcttcatgttgtactagacgagataatcccttagagcagattagaaacaattatggagacaaaggacacccttggcgcagaccccgtgagggaactaaagaacctatggcctcaccgttgattaggaaggtaaagctatttgttgtcaagcatcccataataagcttaatccactgctccgcaaaacccatttttctcatgacttcgtggaggaaacgccatatcaagctttaaagatgcaac

SEQ ID NO: 29752 - DNA, 2791 bp, Cannabis sativa
cgctcttccgatctcatttattgaaagtttacacctttcaagaccacaaaaaataaaagctttcttaaggtatgaagacgtaaaataaataactcgaaaccttaaagttcagaaggccatcaaaggtttttcaaagtgttatgaggttttaaaatgctcaggaagaaaattattccgacaaaaagggagatgtcattttccctgcaagattgctcaaactcaatagatatttgatataaaaataattttcatgaagagagatggcttgaaccaggacaaagttttcaaagatcctctttaattcctaccggggagacaaaaacgtgcaacaatggtgaaaatgtttaaatgaataccacatttattaatgtatgtcttagacaaagaaagctagtgacaagtgaaagcacatgtatagatagtattatcttccttttatagtttttcttaagactgatacgagaaatgagtaagacgtctgacgcgtacaaaacctagtaaaactgtgtcaaatgagttaataatagatacccatgcttcataaggggaatcgaacaaatgtaaaggtcatgtttttcttattaatttttgtgccttctaaaagagccattcttcataatataatagtctatcaataaaaggtaaaggccggacaaacagaatgtctgtgcaacaaattatacaggaacatagttaaagctctgtttttcttatcgattcgtgcctttacaataaactatgctacgttcaatcataatagacaatacaatgaacttgcaaggactgaacaaacagaatgtccatgcaacaaaacatgcagcaagtgacaactcgtgccaaagaaaaatacagaaacaaataattattagctagcaacatttaccctctcatgtttctgctgctttccctttttttcctttttcattttttatgcatatttctccaattttctgtcttcccacctaacaacatgttccgtaaaactttagtaagagccacaatctaatattggaaaatgtagttggttattctgcgaatgaactcggtgcaaataatatattgcaatcagacagtttcttgatcataaaccaaacttgatattcttactcctacaggtgtagtcaaatcctatctatattggtttacttctttcttgcttatctgctgagagattgggaggttttgttttactttatagagtttttcagagtcccagtttttgtggttgttaggtgtctaagtttataggttcttccaaagtttgaaaatgatttgcagtgttcagatgaatcaattcccttgggttgtaatgatcctttacacttaacaagaaagctactaaaaaacatgtgaatatattaataaatacatattaattaacatcacattcaacagttttcaactgaaactttacttcactttctcctccacaccattttcttcatctcatttttcttaagtcaactaaacttaacaagcagataaagataaactaaattaaccgaaagacaataactgacacacgtactttaaaaatgtgtgtgtgaagtacaacaaaagtatcaatttaccatttttcaaattcaacatacaaaattgctattttagcattaaagaaccaaaatttagacagcaactaaataagagaggtaaggaaatgaaaaaggaaagaaaggtcaccagtttttaagtcatggagcttccatctatcccccaaagactgtcccactatcttgaatcgagatttatgatactctgaataatctcttgtgtgacatgccaaccttgtagcttgggcagctttcaagtgagtaaaagacaacttagagagcattttgagtctcttctctcaaatgggtttggttttcaagactcaagctttgcgttcatgtttttttttttagattttgagcaattttctggtcgaatgggaaaaattaaggagtacccagttggagaacaaaaacaaagtttgacttacaattgagaaaagaaaaggatgtaagaaaatgaagaggaggaaaggagggtgttcttttgaagcgtttattacaggaaattttgtagggctattcattgattggggggaagagaagatgaagatatagctccggcgaatggtgtagtactagacgataaaactggagaaaggtaaagccaagttcaatacgcatccgatccgagtgtgaaccaaacaccaaaatgttctggacttctggtccaggttgttttgttttggttttatgttattttatgttattttttcatgaaaataaacacaaattgggacaatatattaaatatttctttctcctcaaaaaaaaaattatatatttcttattccactcgttttgaaaaagtaacttggacaaatcacaaattgggatgtgtcttcccatttagatgtctccttcttgttggttttttcctaattttaacaaatctacaaattttatttctctcaaaaaagaaagaaaagttttatatccccctactccctattaaaaaataatataaaatatataagaaaaaaaaaataaaattttatcaattttaatggggtgaactcctatttatataaaaatatgactaaaaaaataagaaaataaatcaatataataaaggaaaatacaaccaagcattaatgatgataattaatttagtgatttggacattcataaataatatttcataatacattttttcaattttaaccaaaaaaaaagtaacatattacaaaaatactttcagctgtctaaataaataaatatatggtccaaataaaaaaaaa

SEQ ID NO: 29753 - DNA, 3266 bp, Cannabis sativa
aagtccattgaggacattcttgccactaaatgtgattcaagatatggatctgctacaagtgccaattgatctgaccaatatcttttctatctaaggtatttaaccattaagattgatcctttccgtgtggtttgtagcatagtccctaggtcatacatcttagcactaaaagtgagctccatacaaattttttaatgaaatatccacaaggatctagttgaagtacaccccattactttagtagctatggcttttgtcatcaatttatatagtcaatctgtgtgcaattcgtcacaatctatccattgctcaaatttagaattcactcgaatcccaaatgctactagcaaacccctaatctgtagttacacatgtaggaacaaactctataggagcttgtctcaatccattgataaaaccatttacacgtggcctcttttaatcgtgaaaattattattttttataaattataattgttacgatctagttttaaagtgaaaggttgaaagagtgtgttaccaaatggtgggcttttgaaaccaccagatccactctgaaatcctagctgtggtactccattaattaaagcctggtggggagatggtttatatgtggtcttattttttgtgtgccctgatctttgatagttgcagggatttattggtccctttatacctttttaggcaagtagtattttcgagtaatagttggtctcaatagatacattgttgcataaaaaacatgtagctctgatagtgaaaaaaaaaagacattttacaataatagaaaaactgagctcaaacgagactaagatggctaattgtattatctatattgaaagtgtgatcactctagctttagctaggaccacaaaagacagaaaggaaaaaagcatataataaaattgtaaggaaacctatctattattttacgatctaaatctatttatattagagaacacaatataattatttagaatatatctcacaaattttcgtaacatttctatatataataatttatattgctgaaacacaaaatagtttgaagcctattttatatgcaagtaattcaatcaaaatttatattataatatacaaaggcaaaatcaatattcctaggccaaaaaagaaaaaaaataccccatataaactttgttttggtttaggtagaggaaggacttcattgtcacatatatatattcacgtggccatgcactataaaaaaaatggttcaaatgctaccgttctttcacttgaaagaattttggattaggtacgtagtaggaccccataaatgagttagtaatatataataaagactacatataaatatataatatatattttagtactatattaaatttcaaataattcacctcttcgacatgttgagaatatgttaatggaaggatattgttgcatataaatgtacgacgtgtgcgtggaagctaaggtacatctataatatatatatatatatatctatatatttctgtgcctatcaagttggtagataatattaattatgggcaatattttttcttgttttggtcccaaaaaacaaaactctccagagttaaaattagttcgtcgccctgatccacaacttaacagtcacatattaccaggaaagcagggacatggaagtactgatcatgctaaggacagcttcaaaagttccatggaagaaaaactgatcagacataataataatgatgagattgctggggttgggaacaacaagtacggaggtagttgtactactattacaccagcaaataatcaggaacatgatcatgatgagaataacttcatcgaaagtggtagcgcagcctccttaccaccaaaactgggtcatgatcatattcaaactgatcatcatcagatcaaggggcaagattgttgttgaatattatattatacatgcttcattcatttcttttatttataagctctcccatgtctatcgatttatttatatcatagatttatataaatgaataaatccattatacagatttgtgttttttaacaaatggccaagatcattggtcattttgccgttttatttctgtttttaattatatatgcaataggttctttgtattactatcacttaattaatatgtatgtacgtacttgttgaaaatatttattatatgcttgtatttgtttaaacaattttatagctaatagtaatcatagatcattgattattaattggaaaaaagatattcgaccatatctataatttcttataggcagtacaatactgctaggtagtccatgcattgttcactttttgtgtttttatggaataatgtagaacatatgttattcatattaatattcttattatttgagtttattatatatatcaatatgcttaacttagatattttgcatacagctagctagcttaatcatatatattcttgttgctatttcttttctatatatatattggtgcttctctactatactctctccttgtaacattggaatcagaatatatatctatatatataaatgttttcttgtttcacaaatttcttaaatatataaaaagtatgttatttatcattacacatgttatttgttgtttgattttattatacatgttgaattaatgttaagataatcatgagcctaacgggacatgtgataattttatacttaattgttttgagtccttaggatagtaaagagaattgctaaaaggtattattgtgcctataccgctattggtgtacaagtattgggtttcataaaatttctcttcttcttcttcttccttctcacccaaatacaaagctaaggttctatgggtttttcctctcttctcttcttctcacttgctgtcgaaatctaagattcttataacaacagaaattagtaagttaatgattggattctgagaagtattaaacacagagaaaaggttttaaggtttgttgtttgggtattattaataaaatagtgagatcattcctactgtgattaaacgatctaaagtataaattgtaagtcatggtgtcttgtcttttgacatgcaaatttcatattgattttgagtgatctgctagccccagttttcaggtttcagtgctctgtttttttttcttcttttggttctttggcagtggtacaatggcaccacacatggctgaagttttagacattaaagaggcgttaagttggatcaaggatcatgaatggcataatgttgaactcgagtctgattgtctctcaattgtccaagc

SEQ ID NO: 29754 - DNA, 2427 bp, Cannabis sativa
gttcactctcggaactaacgctactcacagtcacacctttttctcacaacaactctcgatctaaattcattttctcttcttcaacctcaatcctcttctaatggctaccattcaagctgttaaggcaaggcagatcttcgacagccgtggcaaccctaccgtcgaggtacatatcttaatctttttcactcttttcctgttctaggtcacttttggattcggttttctcaaattatggtttcgtaactcccagatccaattgcgattgcaaaatcgattcttttctaatcgtttattgagaattttactgctccgattgctaggaacagtttatacctacgttttttatctgtagattttatgtaaagtatgtatcttttttgcttttttttgtttttaagatttagtgtttgattgtattgatgggttttcgttatggcaggtcgatatcaaattgtctgatggtcacttggctagagccgctgttccaagtggtgcatctactggtatgatacttgattagctgaatcgctaattttaacgcttttgatctgtttgattataaaattgttttgaattctaagttcactcaaatcatatgtatcttagtgtaccttaatgtattgaaatactttggatttaaatgaaacttgaaaacataaaatttgtttgtaaaactagttttaagggctcttttattcgcataagcatatcttagaactgtgtttgagatattttgtgtttttcctatttgattttactaggagtctacgaggcccttgagctaagggatggaggatcagactaccttggaaaaggtgtgcttaaggtaaggatcggtctcatagttttactgtcgcacttgattgatctgtttgatagatttgtttatatgtgtttaatctaatcgtttctctggacatctaggctgttgagaatgtgaacgctattatcggccctgctttgattggaaaggttagttcaatttgtttcaaactctcatctatacatttaagtcgttgaaaagttttttttcactaaacaatatctctataccgcagctttgaataaaagttcaggacaatatttatttcaacaatagtctttattcaccaacacagtttagtcaataattgatattctgtaatatcttctgaaaaacattcctgcaaatttattgaaattggtttttgctctttttaggacccaaccaagcagactgagattgacaacttcatggttcaacaacttgatggaactgttaacgagtggggttggtgcaaacaaaaggtagaacaacctttactagtttaaaagtcaaaagttatttgcttatttttgtaatttgcattaaaaacgttatttgcgtcgtttcagcttggcgcaaatgccatattggctgtgtctcttgcactctgcaaagcaggtgcccatgttgcgaaaacccctctgtaccaggtatactatggtgaactttaaaatctaatgattatgctgttttcaataaggtctctcatcttgatttctttggaagtcaaagagatgagcaacgaagttcagacaagtatattttgatttataacaagtgcatttatttcttatcactaaatctgatatctttattacctctcattgtttaacgcagcacattgcaaaccttgctggaaacaagaacttggttttgcctgttcctgctttcaatgtcatcaacggtggatcacatgccggaaacaaacttgcaatgcaggcatgccttttgactgattttcatagaattcatttatgtcatgaatgtctctttagttaatgtatctgatttttatgttcttgcaggagttcatgattcttcctgttggagcttcctcatttaaggaggccatgaagatgggagttgaagtatatcacaatttgaaggtaaattttatattttgtatttttaaggacttgtactttgtctataattgttacttactaacttctgttttccctttttgtagtctgtaattaaaaagaaatacggtcaagatgcaactaatgttggtgatgaaggtggctttgcacctaacattcaagtgagattcttagaatttcatatgcacttaattcctgaaagtattcctcaaattatttcgcttctcttttaccagcttactaatgtccccttttttttctggttgatttaggaaaacaaagaaggtcttgaattgctcaagactgccattgctaaggctggatacactggcaaagttagtttcatttccagtaatactatataaagaagatcataatgattttcttatctatattgacttcaaaatcacaagatatttattcagcttaactgattaagaatatggtttctctcttgtaggttgttattggaatggatgttgctgcctcagagttttatggatcagataaaaccta

SEQ ID NO: 29755 - DNA, 1641 bp, Cannabis sativa
tatcgtataatatgaaaaaaaattagactaataaatttttctagatgccgaaacaaatcgtgtatcagtatatctctttcaaagggtgcattgtagaatcaccctgtagttattaactagcagttattaaattaaaatatttataacttaataatagattgtaccaatcactaaatcagctttggtcgtgctaaagtttttttttttttttttttgaaataaagtcttgtgaattacaaagaccaaaccacaaacaaaagactaaatcatctttggtcgtgctaaagttaataattatctttattcactttaggaaattgtgaagcacagttcatcatccaactgtgatttaagagtaaaaataatatgtgtacaaaagtaacctctggcaaaagtttaggtgcttctaaggtctacctaaatctatcaatttaaagtcttagtgttttacaataatatggagagcatggtcatctactgtgcttctcgcgtgagtttatcttctgtgtcttccttggttctcttgtcattttttcttgtcatttctcctgtggtctttgttccctggtttgtgagttgtcctaagctttgtgtgtctagttagtgggtttgttttctcgtgtagtggtgagtgttttctttcatctgtggtagatggggctgttttattttggttctttcctgtctgtctgccttgtgtagtgggagtgagagtgggagagttttgttttctctttattccttttattcttgttatctttggaggtaggtggtttgtctcttactgtcgacatttatggagcttgttaatgcttccttaactacttctcctcttagaggtaggtgtctctctgttaatgaggctttgattaagttggtccctagtgaatcttcccgaaaagcgttatccactttttgtctgctaggaaaagttgtggcccccatgactgtgagtgaagccaatgctgttgattttgtggccaaggcttggaagttccctgtgactgtggtggctttgtctgagggccctactttcatcaattgctttgagcttagttttgctcgtgaggaagatagatgttgggcattggatcacggcccttggtgcatccgtggctactcattttttctgcaagtctggtccccgaccaatgtgtcccctgtgaagaatgatatgttgcgtacatgggtgcaggttcataatatgcctcacgattatttctctaaggctaatggtcttctgctaggaggaaaagcagggagtgttattcatgtagatttacatgaggataacccatcctcatggggcaaatatctcaaagttttgattgaaattgatattaaatatcctctgttctctggatgttttttcgatctggacacgggagttagaaagtggatacaatttaaatatgaacagatcggtattttctgctactactgtggttgtttgggtcaccaaagaagggggtgcaagctttcttctccgaccatggtgaccagcgacaatggaactccgtttcctctgtacgggccgtggttatctacgtcgtctacttacttggacgtcttctcaagcgtcaactcgattctgccctgtcgagatcactccggctatgcactgtaccctccatatcgtcg

SEQ ID NO: 29756 - DNA, 4376 bp, Cannabis sativa
gcataaaacccaacaatttttacaatggatgatgaatttgttggttatgcaatgttgtgatttctcgtgttatgcgttgtttgtgtttcatttgcttttcttgctgagtctttatgactcacgggtgcttcgtggtgcaggtaaatggaaggggaaagtggatctaccatgagttagaggtctcccagcgatgtacatatcaatcactgtgtcttgtcttccagtggacaggatcaccttttgattatgttttggaaatgtaactcaattttgtaatgccgattttgaaacctattataaaagtttgtaaacaggcgattcccgaatccaacagtattttgaatgaaaagttatgtttttaatttaatcaaaagttttaattaaacaacacttttcctaaactatttaattataattatagattaatttataaaagcacgcacgtggcgtccctgtaagtcggggtgttacattttccttcttgaccttagatagagcaaggttatagtattcccgtgtaattaatttcctttaagacagcctaccccacttttagttgggaacttgacgcacagatgaaaaattaatgtgatagcttttaaattatatagggttggtcggcctaacatgacattaaaagttgacgggacattgattaccaagaattgtgctgttatagttatgcttctcggagcttgtccaattgtaagtggtcggcaaatttgtccaagtggtgcgacactctggccagcgaacccgtatacaagttgagtgtaaggaatcaaatctttaagctggagtcttatcttctcataagttgttttaaatagaatattagaggaagctccattatctaccatagtttgtgttgccatcttgtttacagtctgcacttctacgaccagaggatcgttatgtggaaagataacatggttggcatctacctcagtgaatgttattgatggttctccccacacgtagtattttaggtttcctttcttccacggccagaactgtgtcactttgttcgtgctgcaaggcacgagcatacttttctctagctttgcctgagtctccagcgaggtgtggatccccaatgattacctttaaatgtccgtccactagtggaggcattaattggttttggttattatctgcctaggcagcccgttgctcttagtcgacctcgaattatttttgtaaatgcgggttattctttctgatcaaaaattcaatctcctgcttgaagttgttacattcgtttgtatcatggttgtagtccgcatgaaagcgacaaaacttagttatatctcttttgcttatgtccttcatgggagatggtttcttgtatggcaccatagactgggtgggcgcataaattgtctctatgtcatccgttagaactgagaaatcagtaaatttagaggcattttccctaggatgttgttcagcgttgccagtgaacttgcttttctttctattatccagtctattgccgttattggaccttttttttcatttgaattcgaactattgggatattgtgagttttgggcggtcataccggtcgtagtggtgtgctgttgatttttcttttgcctgacagtatgcacacgccgtactgctttctcaagcttaatgaatccatttgctcggtcctagaaattcaaccatcgatctcatagttaatcttttgatgtccttccataactctctcagaggctcaatgccccctgtattgctgccaatcttccctcctcggtcagtcctttaacttttcttgcttcagtcataaacttgctaatgtaggcccttagaggttctcctggcatttgctttacttctaccaggttttctaggtgtgagggaagttgacgagaggaacaaaattgtgtgtggaattccaaggagaaagaaatccacgaattaaactttcttggagacaatttgaaataccatcactgggctgcctctgcgagtgtggccaaaatttttttgcaccgtacatcacctcttaccccttgcagattcatctgcatttcaaagtactttaagtgggataaaggatcttcttttcctatgtaaattttccatgtgggcattttgaaatttgggagtaggtcaagagcttcgatttcaggcgagaagggtgatccacgtgcctggtcgagtttgagatttatggtttttggccggtcaggccttgtaccatgtttttaagttgatctatttgtgcttgcacaagtggatgaacttgtttagcctggtgatcgacctgtgtcacattgggatctctttgaactggatcttgggcgtgggtatctggctggacagttggtagaatgttttgtctgtccagtccccttttgcgattttaaatcgaatctgaagtcgtgcacggtgcctagccattcgaacactgaagcaccgggtggttttggcatttgacttatttggccaagggttggcctgagacctcttcacgagtatagttgtttaaatgtgtaagtcctcccaaagggcagtttggacctgtggccttggattggacagctgaccactatgagtctacgcgatatgtccagctacatacctttctgacccgctcagggggatactagattcagtttctggttgttgactaatcacttggtaggcccttatgattagcagggtggtcaccctagaacgatcatcaatggctacctgttgtgccctcataatttccatctctcggttcctccactccataaattgacgtctttgctcgttgaatgcaaggttaatggttgcttagagatcttcctgatcatgatacaaagtgttgttatggccttgcatgagcctaagtgcttctcgcagattttgaagttcagtgtaaagctggcctttgagtattattagtgaacaggacctcagtcctgggagtggtctgatcggcagccgtactggtgtttccagtctcctgtacgcctggtgtgaacccaacaagaggggaagtcactctatggcctactgtaggtggttgtgtattaacatgttcagggtttgtccctagtggtcctctcgtgtttccaggagtttacacaattagacatgtcaccattgggtcgccgtgatcagtaaggcctctccttcgagtttgtacaaccatcctgttaatctatcaacactaagataaaagcttgtgtttttgctctcaatgaaagtaccaaaatattgacctcacttctagctaatgacagtgagtcaagataaaacgatcagataaaataaataatagaaagcaaaaacagtaaagtaaaaaagaatactagattttaaagaggtttggccccataagaatggtaataacctactccccttgtatttttattgacttgagagaaagaataaagtgttcttcttctctgaagctcttacaattgatctttgagttattttttctcttagatcactattctctcttgagtgtatttctagattaattctttcgtcctcctcaatagtgagattatgccactatttataggacttaatctttaataaataaatagggaaactatattaattctaaaattacaatgtaaatagaaaactaaggtgtattgactttattctctggctaaatcccacgaatataatgattgtcttcatgtcttggaagcgatgagactgatctatagaattgccaacttatacgccttgctcggtacagatatgtctgtatcttggtcgaatgtcctcttgattaacctgttcggacatccaagtgacatatattaagattaaccgttagtgggttgctaggaatacttccctccacccaagtagcaaaaatgtgggacatgtgtcatccattcttattgctatgtcaaggtgcaaaaaataagataacaagttgctatatgaatttccgtgaaaataccaaaaaaaaaaaaactgttttgaagtgtataaatgaaaaaaaaaaactcgtaatttttaatagtagttcaaatataacactagctcattttttggcaaaaaatataaaaattgtatgttggagatagtcagattttatttttcaaagagagaagtactaattacaacttcaatttccgcacctgaaataacatgttagaatattttttttatggtggtgttcgttatagttacaatatcaatcctgtaaattttttgaaattttttaaataatttacagtagtgaaatcggagttcccgttattctagtttaccaagcgtgttcaaaaaatttcaaacttattttcgagaatgtaaactatttaaatttttttaaacatttacaaagatgatattgtaactataacgaaattgtcatgaaaaaatttggaataaatatttttatatgt

SEQ ID NO: 29757 - DNA, 3242 bp, Cannabis sativa
gttaacgacgatcaagacagtgtggaattagcggatttggtagaataaaaagcggtcagtggaagatgtggtttcatatgatgttaaaactcttgatcaatggttgatagcttaaaaaagaggaaacattcttctactgcaccctttacataaagaggatggcaaagagctttggtctaaacccgttcatgcattaagattaacgtagatgcaactttatttgatgggaaagggaggtacagggctgggtttgttattcgtgatgtgttgggttgtttggtggtggcttgtctggaaagtcatttcggaagtagctgaagcagtgggcatcaaagaggtattaaatttgttgaagacataccctagtacgccggtggtggttgaaatggatagtttggtggtggtagaggctattcgtagtttgttacaaatgtgctctaattttgggatttcaattgatgaatgtacgaatttgctgggtcaatttgtgatgtttctttactttttgttaagcggtctgcaaatcgagctacacattatgttgctaaaattctcgatggcttgctgatcgtatgtttacgggagattcgaccttgtttgatttattgtctatcatgttgagcgattgctctaattaataaagatgattgttcaaacatatatataatagtgtaaaagattatatgagcgtacataattacatatgatattaatcttttttgtgttattattcttctttttgtttataaatttttgttagttattattttatttttcttattaactttgcttattagtagttaatgagagagaaaatcagatgagcttacatttagacaaaatgactggcaatcttatcttcaataagcgaacttataccacattatgtcttagtttaaatttaaaatttttatataactatttaaatatcattgatagtaagagatataattataacctctaggtttagagaggtgttaaccacttgaaacaagcttaagtaaccataaaaaagtgtatgtttttaaggcatttcagcatcggtagtagcgtcaattttggtgaaattcgctaccgacgctatcccaggcgatgctataggggtaaaaacaaccgacattgtagggaccctatggagtcggttatttagcaatacaaaaatttaccacccatctgaccgcagtatatttgtagaacttatttcactacggatgaatatgtaagatattcaaactcatctaacatgcatattatttcacccatctaaccgcagtacaatatatcgcagaacctacttcactatagataaatatttaagatattcaaactctactaagcattcatgattaattaataataaaaattagtaaatgtatacctcgagctagctagaaaccgatcaacaccaagtaagttgaatccttgtaaattgacctcacaacctacaatgtaaaaaaatactacaaaattaaaaaattctttatttaactacttattatttatataattaatgagtaactagttaatttattactaagttactaatgagtaactagttagtaataaaaatacatcaataggaatgaaaattagtaacttgttaagtagttgtaactaactatttactagccattgaaaaaataaaaacacataaataaaatcgaaaataaaacaaaatgataaaaatagaattaatttgtaaactaatttttagaaattaatttctaaaattttttttttaatactctcctatgtcattctcattcacaatatttaacaaatttttttttttaaaaaaaatattcaatatatgcatatacaataaattaaaagtatacaatataattataatatttgtatgtatacatatataatactatacatatacaattacaaaatatgtatacatgcaatacacatttaataaaatacaatatatatatactattaaagtttagatttttaccttattaccgaaatccgaccactactaccgaccaaaatccggtcaccgtgcacaaccacaagaacacaatctttataatatgggaaaatcctaaaaaaatttacaaaataaaaaataaagcaatttacattaataaaattattagagattagatttataccttaatagacgttgagattcaacgatatctccatcaaaagcggcgaccagagctaaaaccaccacaaccaccacctctaagctcgatttagcctaaaagaccaaataaaaaacgatcaaactctggggatatgtttttgggtatgaaaaatgcaagatttttttataaaaaaaatgggtaaaaacgaatgaaaaatgaagaaataggaggggaaatggggtggttgggcgagggtttcatggatttgagaggaagaagagttgctggttattttaggattttcaggaagacgataacagagagggttatataaagacatatagcgtcggttattacaaaataatcgatgccataatatgtgtttttttattaaaattaaaaaatcacttacggagtcggttaatacaaaataaccgattccataggattttttcattaaaattaaaacagtacgtatcacttacggagtcggttataacaaaataaccgactctgtatgtgtttttattaaaattttattaatttactgaaaaaatcgcctctaaaaatttgttttatagtaatcacatgtgttggaagttctttgattgaatctcatattataatatataaaagcttaaaaaagtattacctatatttatttacgtagtagtgaaaaagaagaaccggaataattataattgtataaaacctccaaacgtccgccaaataagtagatcacttggaatatgagaagggccctatcataacaagtagagttttcaaatcaaaataattaacatatatgtatatgaatttccatgaagttgcaagcacatgcttcatctctcgatcaatcagagcatacatacatatatacatcttctaaaaattgattgatgatatgaatggcatatttctttttcctttttctctttaatatatatgttgcagttatcagaagagattagatttggagacagaaatgtcagggtccggctcaaaccatatgcttcatgcatttgacacctgtttattaattaggactagtcctggccaacttacactggtttttcccttacttttgttgccttgtgtttataatctttgcactcataaaattagttatcgttccat

SEQ ID NO: 29758 - DNA, 1885 bp, Cannabis sativa
ttaaacttgcgtttagaaaatcacaaaaccaaatggaagggttttgtgactcgatctatgcaagggagaaaaataaggtgacacaaggaggtgtcactaacatgaagaccaagatgtttatcctaactaagtttaaactgaacttgcagggataaacaaatggagctgaccctagtagggtcattcaagccctcatagcatcatcaactatcctggggtaaaaaagagaatctgggtgaaatttgttattactgattcactaatttatcctaaagttgtataacactactcacagggtttgacaaatatacccttacatcaaatacaacaaagatcaagactaaagaacataaaatcagttacaactgaaacaattacaagacagttacaaatatatcactagggctttgccctagatcagaatcacagatcatatatataaaaggatattttctctcttttgagagatacagagccagagagaacaacagagaaaaagagagcctttgggtgagagttgtcccctcctagtgagctcctcctagagaatcacttgtgtgttcatgtaaaagaaaagagagagtgttgtttgtatccaaagagagaaaaaaagagagaaatcatacagttgtaatcaagattgtaacctgttatttgatgattaatggattcaagctgagggcttgacgaagaagtagccagttgttttgggcgaactccgagatcaaattggtgtctccatctttaccattactgtttgtatttctcatcttaatctctatattgtttatatttgtatttgtgtgtgttagtgttcttgctattttcgagtgtgtagtgagtttcggccaagagattgtgagagtttttttaggttgattatttcgggtagaaaaagggttgaagaaagaattattttgaaaccctagaaaaacctagctgctgccattaaaatagaaaaggtagaagctttgtgtttttctcggtttagtttcgggtaagtagagaagaacaaagaaaagcttagaaccctaaccctagtaagaagtgcaactataacaaagaaaagagaaatagaaaaaccctaaaaaacccatttaagaatcgttactgcgattaaagagaagaagagaagagcaagataaaagaaagcattagaaccctagaaaccctactgtgttcttgagagaagaagaagagaaagaaataaagaaaccctaaccctagaaattatttttgtgttgctgccgttagagagaaagagaggaaaatgtttgaatgattttgaattattttgaaagaatagatgtggctgccgaagtagtgatttagggttagtaaagttaccttagaagagaaatttacgctgggagacgaaattttgaaattaataccacgattaccactttcttttttatttcagtcataataccttctctttttaattttttacaatacgtgtatacaacccaaaaagtaagcagcacatcaatacaaataggctaattgtgttgttctttgctttccttttgtttttttcttcgccttttttttatttattaaatatgaaacacacaaatattaatggttttctttaatattataaaaactttctctcttctttctttatttcttttttaaaaaaaaaaataaaaagtttttttagtcacactagtaattatttaagctaaaaaattatactatcattatctacttttttaatacggtcgttttaacatatgagaaacacatattttttcttttactattatcagaaaaaaagatcaaaatcaaaagtaacattttagtttttttttttcacttagtttattgaaaaaaaaaagaagtaaattttcaaattcaacaaaatttaatataccaatta

SEQ ID NO: 29759 - DNA, 2927 bp, Cannabis sativa
atgaatcaaacccaaaatagaaacaaattttccaaaatcaaacaaaactaaaacatacccactaacaaaaaataatcaatcccaataatatatataaatatatataattctctgaaaaatcaaaagggcagaacctgaataacttcagcaaaccggcgagagaggcggtgaccggaaagagaatcacggtggctgataggaaatggagaaaagttgagaagaagaagaagaaaaaaagttgagaagaagagatcaagaaattctcaaaaatgtcttttttattaattttcttaatacttttttttaatttttaatttaatttttttaaaaaatatttattattattaattatttaataagtagtatttggataaacatgcatttattaaatactattttaaatttcttagacaagatttgtgccaaaatggttgatcaaacctttgtctcaaatattaattgtttttcttcaactgttttttttttttttttaattcaatcaaatataatgtttttattggtttttttaggtgaaaatgacactaattttaaaactaaaatctattttgataaaagtgtctccatgatctatttttaggtgtgacaaaaatattattttaatgttggactattgtataagcattattaattatttataattattaatttgaaattaattttctaatataataaaaagttttaattctattattattttagtaacttcatcatgaacataggggaaacttgctaccaaacttagtgacaaatttatacttttttcaaaagaaaaaataaataaattatttagttctcaatgggttgaacaacccaagttaaaatgtcaaacactcaattcattgtagtgtaactatttttatttttcacaataagaaatattgtttattttttctttcttttttgaaaacaatattataaattgcttacttgtcaaatgatttttgccaagaacatcttaaaaaagatattgtgaattgtgttgctgttttattagttctcttttcaaaatgatatattataactttatttttttgtaaaaaggaaatgttttaggttttctaggagaagtttaatttagttaattaaaattttaaaacaaataatatggttgtctgaaaatttgtaattatatttgggtgtgcaagaaactatttagtgggattaaatactaattaaattaatattagtttttgataaaatcacactaaatatatcatttaaatattaaattaatattagttgatcatatgaattcgataaattaatgtaaaaagtcaatttaaaaaatattaatatactaaattcattgcattatgatcaaagaaaataatctatattttggaaggatatagattaatatggtataatattacttcatttgcatagtaattatttttccaaacttaaaataatatctcataccaaacaatgtgttctttaaatttatatctaaacttctctaacaaaaaatgcacataaacattacataatttgtattgtttgtaaaaaacattatataatttttcaaaagctaattatatgatatattatatttttaaggataaccttatattaaagtgtatattttggttgtagatattttacattaaaaaaatagggacattaaataagccaacggtaaatgagagtcaaacctacttggcacacatataagctataaccatttaagccattgaaaacataaagcaacaaaatcaaataaaaataaataaattatccataaattcaacaaaattattggtaacagtccaatcatatgacattttaggttcatttttgtgtttttactcacaaatttctactttctcaaaatgttacattttagtggaaatggtcaaatataaagttaagaagaacattagaagtttagtcttatgttattttgattcttatagatttgttttattataaactaaagtatgagaatatgctatagaaatctaagaatattctgaagaacctaaaaattccaaaaaattatgctcaagttacaatcataataggacccttttattattattatcatatattcagtgggattattaatattgaacctttttcttctaatgtttgttcctttcaacttttcatgttttatttctctttgagaaaacatgatcctatttctttgtattttatatccatcccaatgattttttatttgaacagaaggaaaattctattgaaaggcaaaaaaaaaaaaagtatgttcaatacaaaatagtcaaagattagagacaagacggtaaatcagaccactaaattcgagaaaatttcagagataaagccaaacgtataagagaaggagccatagcgttttgagtctttttacaataagagaaataaaagataaagaagaccaaatatgtaaaatatcataaactattattcttgtcataataggttggataagaagaagacaatctaataaaacaataatgaagttgtaccccaaacaggacaacgacccccactacatgagaatgaaaggaggtcgccgttggatcacttgaagaacacgaaacgaaaccacctcatcacagtctattaccactgccctgagacccacacaactgtctcattgatactggtatccacaaatagattaaaattacccaacttcaaagtctcaatcaaaccattagaaaattcaaccgcaatcgtcgccaacttcattagagaatagattattttcatgaacaaaagtgttgcgtcgatatcaaatcctccaacataacacaagaaattcttctatatcctactttgaataaacatccatacaacccacaaacaatcatagaaacaaaaaccctctaacaacccagccttttcgaaaattatctaccctaatgattaatttccaactttattttctattagaaaaa

SEQ ID NO: 29760 - DNA, 1187 bp, Cannabis sativa
tatatatatatatatatatatataaactagatgaatgttacttgccgagccacgtaatgttagttttagtttaaatttaatttagtcttttttttatattatttaaggaatatagtacattttatttgaagaaaaaatatttatactcaaaatattatttttaaatgcattaaaagcgataatagtgtggttattaaattataaataaatttaacattaaaataataaattgttcttagttgtaaatgatgaaaagttgtataaaatgttatgatcatatgaacaattggactttgtaacactaagtaaaacacacctattttaaaaacaaatattacgtatattattattaataatagtatattaatttcaatatatatactcatataacatttattaagataatggtggaacaatagtttcagaaaatttattttttaattttagaaaattcaaaaaaaaaaatgtacgtgtcttgcaaaacttaaaagaaacattggatgatatattaatttttaaactgattagttacgtgcaattcattccctttcttctgcattttttttctttctcttttgcagttgtttacgattgaatttaaaaatacagttaaaattacctattttagtgatagattatattttgttattaacttttttattaatatttattactttataagtttttccttttttattttacttttttaataatatattttgatgtataattttataaatctaataacgtgaatagttaaaagttaacggaaataaaaaaaaaaatcaggtgaataattaaaacttaacagaaaaaaaatattaaattaagaattattttttttaataaaaaacttaaaaaaaaattacgcaacaatttctcataaactaaaaattctgttatataaccacattttatatagaatagatacatatcttttatgtataaatcaataattagaaaaatcgatttatagcctagcaaatggtacacaagttatataatatacctataaaagaggaagactaaggtttgtttatcaatatacactctatacaagaaaaattgtttttaatatgaacgaaaaagtattacatatcataatactttttgacgtgtatgtacgtacatcgtatgttatcataacttaagtactttgcataacaagccactgaggctagcttagt

SEQ ID NO: 29761 - DNA, 1583 bp, Cannabis sativa
aaaaaaacagttttcaaacataaattttcctaattgttttatacaaaaattaatttgaaagacattattagtactactcaatagagtatataaactacgtgttgtgtggtatagtagtaggcatatttttacggcttccttcattgtttgggtcaagagtttaaatttcaccacaatccttcatggaaaggattatacttggccttaaatgaaagatgaggtacaaaatcctataactcacacgtgatgccttagattatttggactattgaaactatgaaaaaataatctacaccacgtgattctttttttctagcaaaaaaaatagttaaataaaaaaactttagtattgtctttgactccattgttttccacctaattcatataaatataaatgtagatatttaaattattgtccataaacattattcatattcacagttagtaacagttatggaaaatggcattctggctacaattacttcctatatttaatactggccacaactggctatgtcaagatggtactaacatcatcatgtaatttttttattaaattaataaacacacttattttgcattaagtgtcataatgatcgcatgtaattttatatctgcatttcactcaaatgtagtgttaagatattacttttatacataaaagaaaaaagaaaaagatatattttgttattttaaagccattttaaaactttatttatattttattcatattattggttgtttttacaatgtatctctctaaaaattggttgaactaatacattcatttctatttcgacatttataaaaagttttaattaatttttttttttgtataattgtatatgttatagttatataagaaattttatttgaattttgttatcaatttttaaattgtttcgaattttttaaacttttcaaaaatatcttatataataacaaagaccataaaaaattagactaaaatataaaactaatatggatacaccacttaaaaaggggtatattctaaaattttccttttatttagttatttattaaaaaaatcattatttattcaaataacagtaaataaaagatgaaaaagtaggataagtttaaaattaattaaaaatatttaaaacatgtatataatatttttataaatgctaagactgctttagtagacaataaataatattattttatttaaaaataatatattgtattaattattacgattaaattttaatataatacaaatagtttgtattagcttatattataatatttacaaaggagatagaattaaccccaattttcgattcagatttagggacctagattggacgcagacttgaattccggttccgaaccggacccagacaggactcgatcggacccgaaccccaaattcgaactcgatacccaacccgaacgcaagacctgagactcgaacctaaaccccgcctcgagactcaaacttgaacccaacccatagtagatataatataatattaaataaactaatacaatataataccacacaatacaatacatttccgcatactaaaggtgcccgtactactatagctctctta

SEQ ID NO: 29762 - DNA, 1929 bp, Cannabis sativa
aacttacccctaaaaataataaacttcttttacttattttataatttatttatagttgtattataattgtcatgatattacttttttttattattattttggatattttataatttatttatagttgatttatagttgctattaggttgatttttcgttattttttttgttattatttttatattttttactgaataaagtatatttttataattctaaaattttacaaatgtattttttaaaataaaaattttagacagtaaaattataaataaatatatatatatataaataaaatatttttgaaaatttctcaaatgataaggatgatatgaatatgttatatcttcatcttatatatgtgatatttattcattttaagaaatcataccattttattaatatcaatttgtaatttaatcggaacatccctctctctctctctcgttggaaacacacaataaagattagaataaaaaaaataaatcaactaatcggccgtctgattctcagatcgttttacaaagtaaactcaaataaggggttaattagaaaacacctcttttatttatcaattaactaaatttacctctaatttatatttaattgaaatatacatttttttatatgtactatacccaaaataccctgacataagagacaggggcaaaattgataaagtgtttaaaaaaaaaaggtaaaagaggacaatataaaaagggtatagagtctaatttcctcctcaaaaaaagttagatgaaaaagattgtagccttaaggacacatatattcagtaaagattgcagcaggtttattcaacttcttagcttgagcattgcattaattgtgaaaggtacataattaaactactaacaactccttcagccgcagagaacttgttattttcaaccactaacaacaatttgattgcgagacattgaagaacaaaaagacaaaccaacaacgaaataaaatcaaacaaaatcacgttacagagacaagatcaagtgcattaacctaaataaaagacactaaaaaccatgttatagagacaagactaaccacagtagaaaaactacaaaccccaactcagccatgcctaagcccagggaggacggagaaaaaaaaaacaatctcaagcagctaaaaatttaaaaagaaaaaccctagccgataatttaatagagaatggaaaatttgatgattgacatttatctcttatatatgtaatagtaagtttctattgttacaagtgtttcttctttggcgcaagctcttcttactgacttgacccgtgctcaagatcacagtcgaatctccactgtagctttccttactgctgtagacgggttggaaaaatgggtaaaacctgaagccgtctgcttgaagattaatgtagatccagccatttttgctgaagctgcaacctacagctttgttggggtggctagagatgctgcaggtgatatggtggaagcttttagctgttgccgatcgggtgtgctgcaacctgaaatggtggaggtgttgggagtgaaagaagctttgagttaggttaaaaagaagtcatggaagaaagtggtaattgaaaccgatagccttacaatgtggtacaagctttacggagttcaatcccaatggtttcttactttattgggagtattatttcttactgcaagttgttgttgaatgagttgtgtgatgtttttgttcattttatttgacggtctacgaatagtgttgttcactttttagctagagcatcttatttagttgttgttgatcgtgtaatcagaagtagtgatgttactctagatttaagccatataatcaatataaattgcatttaaataaagatgatgaatgttttcaaaaaaaaaaaaaataataaatttctatacacgatttttcattgcaaaaaaaaaaaaa

SEQ ID NO: 29763 - DNA, 2612 bp, Cannabis sativa
ccctctattcttaccatcccacaccacttcgtttttggttttccacaacatccaacataaaatagtcccccttcccaacccctccaaatccacccacttacacacttactccaaccacccacgaaaagactcaaactcccttcttggcacatcaatccctaaaggcaaccaataactccaagaatactcataagaaactaagcaatggaaggtagtttcaatataaatattacaaaaaggacaattaggactaacctccactttctttctccttaaattgaccatagtcgacaagcaatttgacgctgccctccaaataatatctttaactttagaagggaccttcaactgccaaatattcttccaaaactgagtattatcatcaccaaaagccataagcttcaattcttgtaaccatttatacacactcttaatcgaataaaacccattaatttcctttgcccaatgccatcagtcttcatcattaaagtttgaaagaggaattcccaaaatgatttcagcatctctagaactaaatacatcttgcttacccaaaaattgcccctgatgacatggacatcgatatttgacacgtgacaagaagaaaaacattcatagagttaatttccctcgggtcatagcagtccactctgggaggatccctagccctgtacctaggttgactttgggggctccaaaatgggtatttggatcccaccaagttgtttccaagtcacaatccttcggtattctgaattaacaagtcaagacgactccatgtccaaagcttgagaactgaaaaatgtctaatcaacatcccaaaagccaacccaagtgcctagggtttcagctagtgccgagggtgatatccttggccaaggtttcaattttttggtccatcttagtacaaatttatcaaaacttgcacttagacatgaataatacatgtcacaaacatgctagaagcaccagaatcagaattggaacacttcttgtttgaggcacttgggcatccagcgcccttgttgacctaatgatgcacctaacacctaggttgacatgttgtaaacctggggagcttctaactaattttttgaagatgtttctcgggaattttctttgttttcatctaaaatgaggaaacaagtgctttcagggagaaacatattaacctagaggccaaacaagtgacccagtgcataggttgacactaggcctggtcaccaacatctgggttgacatgttgtgaacctgggccatttccaatgacaattcttatgaagtctttcaggaatattcttttttcatcaacaattaagatacaagtattttcaagaaataaacagagctatctggtggtcagaataaggacccagcaactaggttgacctggtgctggggtctcagcgcccgggttaacattttgttaacctaagccaaatccaagcatttttcttaggaagtctcccagacattttgtatgttttcatccataataaagatataagtgttcttaggaagtaaacaaggccatttgagggccgaaatagggacccaacacccaagttgacatgggtgatgggtcctgcgcctatgttggcagtcaacctgggtcgcatgttcttgctgctcaaattcaaattatgctctggactttcttcatcttggtccaaaatagggtaggagacctcgttcgcaatctcaaatgccataaaagtaccaaaataagtctcaagaagctcatcaatgagcacccaacacccaggttgacatgtgacctcgtgcactgggttctgcttcaccaattccagttctgtctcgagcatctggctatttttatagtaagcaagatctatgacttgtgaaaagtcaaattccaactttgatatgtcaccttaaaatattgataaagtggaatattgagaaactagtcgcaaatcgagaagttttgagtctacctaattttgcaaaaaagcaacatctctaaaagctggtgcatgacttcacccgaactatgaagttgactaagtgatatcaaaatatcacttaggcatcaaaaaaatacaagtccagcaaattttccattcatatagtgttcaagttgacatcaagacgtcaatctaggcgttggatgtcaacctggacgttggatgtcaactgggcattgattgctaaataaccttcaataaaacaaccataactcactcaatatttctttgattgatgtgattaaagttgcgtgtgaaagctcctttcaagatctttctacgcatctctcacactcatatctcaattttgaagatttcaagttgaaaatttgtccacaagtcaagtgcaattttctttacaaaaagcttaaaaaaaaatcaaacagacacgattcgagctctaaaaattgacgatcatcatctagagccaatttaaccattagaccaaatttaaccattagaccaccatcaatggttaagatcaccctagaatatttttccatattgtttgtattattttattagtattttaatggacttccttgcatataaaaggagagctccattcactcatttttcacatttagaaagtccccacaaggttagagcatatctctctagttt

SEQ ID NO: 29764 - DNA, 2405 bp, Cannabis sativa
atttataaattttaatttctaaaataggtcttcttaaatatttatttaattacttaaaaaatagttaattataattaattaattttaaaaatcgaatttttacctattggtaacattctattataggtaaaaaaaaatgtaaccatatggtttcaataaaaatataaccattgaatagtcacccataaatatatatatatatatagatataaaatttaataatattaatgtgagaaagttacaacattagcacaaaggaagttgaaaaaatatatagtgaagtttgacatttttttgcttaattgaaatactaatttaaaaaatgttcatgtagtccctctataaaatgcagttttttttaaacttctttccaatgcaaacaaatgaattattctgaaattttctagtgcaaaacattgtgtaaaaggaatgtttttgagtgacgtagaactcgtctgggcttcaaaggaggcttttgtgttgaggtccaagtccgtaaaggtgggttggactttctgtggagattcaatgaggaggtccaatttctaggtattctcgcaaccatattgatgtcgaaattagaaccccttaaatagtagtttggcgtcgagctagcttttacaaggagtctaattggagttttcgtttcaagacctagcaaaattattcaagttctttcctttgattctaaaatctcttggttctttataggcgactttaataatatcggtagccaaatggagaaggagggggcagaccttacccctagtcattgatagttggtttttaggaagtcttaagcagctaatatttggtcaattcagagctccgtggccatccctacaattgggaacgaggtaagggtactgctaatctagttgaaattcatctcgataaagctcttatgtctcctatttggcttcaatctttttcgcaaatcaccctcagcaattgtgatttttttttcagatcactctcttatatttctcaaaccaaaaaaacctgttacagctggtcatgtttatcacatctattttgaaaatgtgttgacttgagaagctctttatgatcagattgttcagtcttactcagattctcacgcttatgtatcctttccacaaaaattaaaggtttacagctctaatctggaagaatggtggaggaatctaacaaataatttcaaaaataattttcattttagcaaagaaaaattatcagctctaaaaggtaaaaccgatcccttacctgtccatgatttcagtcaagagcaaaataattattttgaggttttagctcaacaagagttatactgaaagcagatgtcaaaataattttttttacattgaggggataaaaattccaaattctttcaagctatggccaaaacaagaaagagaaacaacaatatctagcagctttaaaatattgctagtacttggacctcctagaataattgtatcaaagatgtaaatattgattattttaatggaatttttagcgcaggggatgctagttaggacttggttgtggctagtagtaatcgttctattgatgcatctacaaatgtttagctggtgaagacggtttccaatgatgaggttcatttttccttgttctaaatgcactcggataaggctttgagacctgacttaatgggagcagggtttttccaaaaatattggcacattgtggggcggatattgttgaatttgttcgtgaattttttgcttcaagtgcacttccaaggggtctgaactgttatccactatgacgtggaagaatacaaaggtgacacgtgtcctgcattcttcgcatctggacggaaatgaatgtcccgaacagacttcatattattcatgtgcttgttacctaagcaggctggaaggtagattattcgagcaggagcaagtttgactttccagactacatattaggacttagctactttagaatgatctcctaaagtccaagcacaaagacaatccctacaattgtgggattgagtcagaggaatatggcaacctattccaattttctattttttgtattgtatttttgtaatgaatattctttcctattttatacattgtaagcaaaagggaaaccttccctcatgtaataaggccctataaatagtgatctagctccactgaaaaaaggatcgaaagaattgcttcagagagagatctaagagacttactcagtgattttattgtaagagctttgagagaaaaacactttgttctttgttctcgagttaatacaatctaaagggagtaggctattaccatactaacgggaccgaagctctttaaaatctgctgctctttattacttatatgcttttgctctattttaattatattcttaatcatttaataattgactcattgtcgttggctaaa

SEQ ID NO: 29765 - DNA, 2149 bp, Cannabis sativa
aaccctaactttgacccctgttcgggtctggggctaaggtttggattcgagtccggggtccaagtctgggttcgggattgaggccatgtttgggtccgggtccagggtttggggcctgaggtccgaggtttggctagggtttggggccaggcccgaggtccggggttggggtccgggtctgggtttctgatctgggtacgaggttttggtccaagttcaaggttaggtcttaagtttgtggctggatctagggtctggggtcagggctgggtttgtgtgcgagaccggggccaggtctagggtcgaggtccccaaccccaaaacactttttaaatgttataatataggctaataagaataaattattatgtattaaataatataattcacattgtattaaaatttatgatcgtaataattaatgcaatattttatctaaatatagtgttacttgttatttagtacaatactactcttacacgacccaataaattgtaatttttgtataggagatataggtactgacacataagaatctaccactgagtgaaggagaatccatacaaagtatataggcttggcaaacatcatcaatgtgtacaataggtacttttccaagcaatgcatattagaataaataattgtgttaaaacgctttggaaaacgtttgtactctaacaacaagttagttagatttattactctttcacttagtttttctgttgattttttaatgttgtattgtcttatacaaacatttagtataaatacatgaaaggccaatcaatttaagattgagcaattcaatacattcatccattttcttcttctctcttttgctcctgcaccatcattatacaaagtcttacatggtatcagatcgatgtctaataatggcaacaatgtttccaacaatggcgcatgataacttttagtagatctcttcctgttggagaatgagttgcacaacaaaatccacaagtagaagcttaaatcacccttccaaacaacaatctccttcccttgatctcaggttggatctcaccaattactcaatctatagatccttagttcttgttggtgttagagcctatgatgttgatcgatacatcctcgaccttaatcctccaccacaaatctacagttggacaacctttacagatgatgatctggttctatacattcttggaggcctcatattatgaagttgttgttattaatctcgcctctcgcacaaaatcactcactcttcaagaagtttagtttatgcttcgaaaccaaaaaatgcgcatccaacaattcactattaatactttcacaaatgttcaagcaagcatggttgctactaatctcaacaatagtggtcgaggatctgattgaaatcataattttagaggactatacagaggaggtagaaaaaatttcaacaataggggaggtcgtggaaatggacctatgtgtcagttgtgtggaagggcaggtcacacagttgtgaagtattttcatcgatttgaaattaccttcaatgatttgagtgttagttggctttggaaagcatttgtattggaacaaaaagttaattagatttgttattctttcaattagtttttttgttatgacaattgcttttttgctgattctttactgttgtattaatgcacgaaaagccaatcaattcaagattgagcaattcagtatattcaaccatctttttcttctctcttttgcttttatactctgctttgacagagtctttcaatgcctaaatatttaagggaattataatgaatgagattggcatggtttgtgagctgagaaaccattacagttaaagtaggtgatgaatgatgctagcgttaaaagtaagactgaacatttttttcgggatttatctggacatggtccacccacctggacttgacccgtagaacctggctgtgtaaaaaaacactttccctacgagtaggttgagtccaacccgatcagcttcatacgttaattcagggttgttttctgcacatgctcgggttcgagttggacccataccacccgcaaacctgaacattttaatttttctaacttgtttaaaactaaaacattaaaaacaaacataaactaaacttttacgaagacccctctccctctccct

SEQ ID NO: 29766 - DNA, 2117 bp, Cannabis sativa
ttgtaaattttttttgttatttttgtatttttttaaattattcttaattaattattttgtacttattttacatcgtgttcattgaagcataattataaatagtagaccaaatataacacaaactcatttttatgtctaatttagcacaaaagttaaatcttgcattggagatggtttgaaaattatgtcaagtttgacacaaaatatagcataggctaaattttataccacaataaatatcaatttttttatttatttttttaccacttattaatgtaattaataaccttttatattctatttacatatttaataaggtttgtatatactttcaatacaaatttaatacttttgttgacttttttttatacctttttataagaaaatattaattttaccttaatacattagcactattataaaatttgggtcaaatatatcattaactcaatttttaagcaaattttagctcaaaaaatactaataaatttttctttcatcttcttcaaaatagataattggcattgaaactcctttatattttaatatttatgcaattaactccatttttttgtaatactaacttaacatcacttttatttgtaaatttgaggcattagttaaattctatcgttaaatgttaactgagattctcactgtgtacacgtgccaccaaaacctcaaagtcaatgaaaatatgccacgtatacacttgtgcaatccaattagcatttaacaatagaattttaactgacacctcaaatttgtaaacataagtgaagttaaggagcatttctaccaaaaaaaaaaaaaaaaagaaaaattaaaagatcaataagttgaagtacataaaaatttaactttttactttattaaagccacttacattgccatataatattattactcattttaaggcaaaattaattttaaggacaaaatggtaatgttatcaatattcttgaaaaggacccaaaatggactctaagactcaagaaactcaagacaagactccatgaagatttatttacattttctacaagttcacacttaaaatttctaagtacgaaatttagctcactaacttgtgtgacaaattatttcacaaaaatgatatctaaaatttttaaataattttttaagatcgcatatcatttaattaagagaacaaatttagaatttctgaaaatgaataaacgagtaaagagttatgatcgttttaagacggaaaaagtggcattttgccactatgctattttcggctagccatttggcaaacagtgaggtgacccatttgtcctagtaaacggttactcgtttgtgaaatgatgaaacgtcttccccagtatttctctcgaaaaatgcgctaacagctataaacgactactttctttcccaactctatataaactcatttgttccatatttttgagagttgactgagcatttattgagtatacctaacacattgaaagtggttttgagatctccctagcattaaatcctattaaatatttttcacacattgaaccaaaatttgtatttatttatttttaagtgtacttgctaatcactctaggttcttcattgcattactacatttctagtgtgaatttacttgtaatcattaatacatttccacattgtgttgaggtgatgttgatagtccttggcagatatggcactttgcagatttgattggatcgtgcagattatattggattgactatttgatgaacacccatacccccgagggtgagataggtaactaccccgtaaagttggttagatagtcacctccctacctccccgagggtaggtcatctacataggggtggtaagttagtctaggggttaactcttacccctacactcttatagtcttggtctcacaccctacctgcatatgaacatgaatagtgaaataattgctctaagtatcaagactatatactaccaagctctgaatataacatgagaatcaagagggagaagtcctaaggatacgaccctggagtaagtactacccaccatagggtcaatcagccaaactctatcccatgaggtaccccacgtagcttgatacatccaacactctcccagcatcatctaatcac

SEQ ID NO: 29767 - DNA, 2154 bp, Cannabis sativa
  modified_base (961)..(966): a, c, t, g, unknown or other
  modified_base (1912)..(1917): a, c, t, g, unknown or other
  modified_base (2010)..(2014): a, c, t, g, unknown or other
  modified_base (2094)..(2094): a, c, t, g, unknown or other
aggtataatatgtattttgaaaaaaatttaggtatatactagtataaaattattaaggggccattttttgatatggggtaaatttattacatgaaaaatataaattgacactttatttacaaaaatactccgataaggtgtggacaatatttataccttttatgtgcttttaattaccaaaatacattttacactatcacttacacaatcaaatgacggttgttcggtggttgcttggtggttggtcgaaggttgcatcagaacaaggtttcaatcagacgaaggttgttgggtggttggtcgaaggttgcatctgacgaaggtttcaattagacaaaggttgttggatggttgaccgaaggttgcatcagacgaaggctgctaggttgttgaccgaaggatccatcagacgaagttttcaatctcaggaagcaatatggatcgtgggttgctgttgaaactgtaatgcaacatttatatctgctgcgagccaactaacgtgcaacttaattgcaactaaaaaatgtaagaaaagtgaaagtgcatatgtaagaaactatttgtcaatattttttgtcactgatccataattacttgaaccttaattaatggtaatatgtggagaaataactgttagcaaaatgtttatgcaactataatgcaactgtcatgaaatattaaaaatcaaaacattattttcacgtacgtaactctatctacatgtctcttcatgatttaatatgaaaaaattcatcattagaaatttgaaaaacaacgaaaatacactaggataaatattttactatattgatgtaattttcttggatcatacttgagttggattctttgggaactccagtttaactttttgagatctacatttcataaatctgaaaattgaagtgaggacattagttttatgcaaattaaactggatttttagttgaattttagtttcgtnnnnnnttttctacactttttttttttcatgaattcgaaatagtccatgttttgattgattttggtcgtcttctcaagtagaattaatggtggttctctttctggttggattttgattttggctgcgttgggttgctgcgtggttgcccgatggttgcctaggaagcatatatcctaggttgaaggtgtgtaagtggtatttgtgtaatttttttatttgggttgtatatttatttatttggccaactagaattatttttgtaatattgttaccttatttagttaaaacttaaaaaacccaaattttaattgtatggtttattaaatttccacagtaaaattaattatctagttactgtgtcttgctatggtgccaatatatatttttttttttgtttttttttttcgaagaacttttcattgatttaagtggacatttaaaaaaaaataataagtattaagtgggcccctaaaaacaaaggaatcagaatattaagcaggtcccctaaaacaattataaacctcacttgcgttagtgatgactgatgaccttatgcaatcaacgccttatcttatctagaaatgctaggtgactagatatgtatcaatattgtaattggtttaattaagtatagggtctcatataatttaatataatatcttttacaaacaatcgcaacgacatgtcgagaaggtgctagacaccactactgcctaatagtaatgctctatcttatctgattgacaatttcacaaaagtattaataaattaaaactaaattaagctttaagataattttttttttaataattcgatagatgccatgattaaaatttaaattacgtacgaaaaaagaaaatagaaaaatatcagtaagttaaacaagaatactttgatatgttaatgttgagcagctatagacttttctcgataataataataataataatnnnnnnaataataataataataaggggaattacttctactatttttttaagtttttttttttttttaaatttactgtttaagtttctaaagtggttgcnnnnntagttgcaataggagtttctgtacgatttttcgttgcaatctaagttgcagctctatttgcaataggagtttctatgtanaattccgtaaaaatgcaaaaaagaaaaaaaaaaaaacaattttgaagtgtaaaaatgaaa

SEQ ID NO: 29768 - DNA, 2523 bp, Cannabis sativa
  modified_base (38)..(46): a, c, t, g, unknown or other
cgctcttccgatctttaataagtaaatctgattatatnnnnnnnnnttttatttagagcacaaaacccaatagtaaagttgcaaaaaagagctgactgttgggccccttggaaggatttgtgctcgtgcattgaagcaattggacaataagagaccattgtacgtaatgaacacgtgtcgccaaaaggtttaacctggaaaagtaaatgcctaaaataactattttgcaaaaaaatgtgtgaggtgcacacagtaccatgtcctagcataggggacaagatctgatcttgtgttagaaaatgcataacgtcgctgggcgatctgggtttgtatccaaggtagatgactgcgactctttggggcacttagcatccatgataggcccttcgagtatccatccgagtatcatttgggcaaactttgagtttgggccactccgagtcccgaagtggtaagaagtcttccgtgttcaaaaagctaaagtaaggcgaggtagacctctgtatatcttccgatcttgatcgactcccggatcagtgaaacttctccgcgaattggtttaattgacggagaacaggcataaatctaatgtttaatattagcagcataattacccaatgtttgtaaaactgtaattttcctccaatttcattagtacagacttcgtttttaatttattaaaagaacatttgtaagtatattacatgtttatgtccagacaatagcagagtctgtactgataaaatttaagaaaaattacagttttacaaacattgggtacttatgtcgctaaaatatatattgagtttataccgcttataaattaaaattttaagtatttataccactatttaccctattgattgatattggttatatttgacaccgcattgtagttgaatgaaactagacataattaaacgtacattaaaattgataaaaaaaataaaaaatatatatatataaagtattgaaaggaaagcaactagtcataaattatgttatgaaatgtttaccgtgttatataattaagggattttttcaataatatacattattatcaaactatttacaaaaataaccttacataaaaaattacataatactaacaatccataccgtgtatatatattcaaacttcttaaaaatcaaagaatcccgtgcactctttcacctttatatttatttatttaaatttaattttttaaaactgaaatatgtatcttttttcttaaaaaatatatattcatatctttctcttaattgtttgttctttttttttttaaaaaaaaaaaaaaacaattacaccgttagttattttagctcaaaaagaatataattgcaacctactttttaagataaccattttaatatatgggaatcatatttttttttatcattaaaaaaaataaaataaaaacatccttttaatttctaatttttatttagttaacgagtctattttttttttttcttaatatctaaagagtaactaaatgacttaaacaaagtttattatatcaaccaattctaaaataattttatatacattaatttttgtcaccttttttgtttagttacttttaaaataatgtgatcattttttaaataattattttgtttgttgattatgaaactttctgattacttatttttagtaacatttgtgttaactacaaacttatttaagaaactaatgtgttacaataaaataaaataaaataatttacaggacttattagcaagatttgtaaaaaataatatctatgttatcaaaaaaaaaaaagaaaagatttgtaaatatctatgttattaattgttattttaaaattatagtatggtttcataatattatttatgatatacttttggtaactttaagtttattatagacgtcgataattgacatataatataatattatatttttattgtagaaactaattagttgtctaattaactaaattttaaaaataaatttgagttgttaacttaaataaaaaaaaaatagtaagagatttattttaagataaaattatctcatatacattttggctactaattttgaatggttacttttaaatttatgtgttcatttttatattatattattctgttatttaagatacttttatattacttttattttatagcaatattaatgttactttcaaatttatttaaaaaactaatgaattacaacaaaataaaaataaaagaactcgcataactttttaataaaatttgtagacatctaaattacttattacttattttaaagttatattatgatatgttaatattatttagggctatttacaaaaatatgggaaaaaaatataagttatgatatatatggcataaaaacttaattatactaaatatggcattcttctaaaaaaaactttaaaatatgagaaacaataagtgaaaattacacaaaatatggtttttttaaaactttattacaaaaatatggtaaatttaggtttgaccactttgtatggcatattttaattttta

SEQ ID NO: 29769 - DNA, 1654 bp, Cannabis sativa
tgtagataaaatttccttgggctccaagaaataaacattcctacgccactcaactatggaatctgagtttatagcactcgcaacaaccgacaaagtagccgagtggttgagaaatctcatggctgagataccactaattgtggtagatattacaactacatcaatacactgtgataaccaagctgtcttggtgagtgcttataacaaagtgtataattgaaagtatagacacattagtctaaaatatgagtatatgagataattgattccaaaagaaatcatatcaatctcatatgtcaaatcatgtgagaacttagcaaatctatttacaaaacctttttcaagagattgagtaagttctacatctagagagatgagactataactccttaaataatagattcactaatgatggcaacccaatttgttgtccagccgagtaagaaatttaatgggtaaaaataagtcattgataagtgaataattttaacattaacaaacacataggtcacatctaaggatggttaatgttgatcgctatagactagaaggttaatcgaaaggttttaatcaaatttaattttcgagaaacaagtatctctaaaagtagcaaagatgctgttagaatttcacctatatgaacttagtggtggtgccgcctcttatgggagtagagttttctcctaagaaagttcatgaatggactagcacaaggccataaaagtgttaagcatgtgaaaatgagatgtaactcaagagaacaaattaaggtatgtggaagacttgaacgtaatactaccggtcttatcaattaaggacttggagctccaatccataggaatagcgactagcccgataagactttatagtgtttccactaaggaaatattcaacgcaaaagagatattattttatgtgatggcattgtatacttagagatgagaaaggcataagaatttactcaagtgggggaacattagaattagttaaatacttaagattagtaaagactaatctatgagaaatgtataacctaatgatgcaacattaagagaatgtgtactttaaacttgtacttgtagaacgtgttggaacttgttctaaggtcttaaaacttggttttaagtaaactaagccacctgagaaattttgggtcaatcaaaagtttcaaatgcatgttttagagaaaattgcacataataggacaacatgtcgcctagaatatttccaaaattacaagataaaaacattgtcaaggtcccatgagatatgtcaccaagtttgggtgacatatcgccaggtcgcaacatgtctcctggaacatgatggtgattcgagttttacatttttttatttctcgagcatgcgacataagggtgttcattggaccacattcaatatttttaggcctatccagatcctatataattatttattggatgttagattttaccatccaatttgatccatttcattttcatcatccaatcaacccaatatccattggatgttgaatttgatcagttctatccattaaatgtattttatgtatatctattgtagtaattcaggtttatcaaatatcttagacctagtattttttgtattggatcggatccatctaatattttagatacagtattttattggaatg

SEQ ID NO: 29770 - DNA, 1185 bp, Cannabis sativa
agaaaatatatgaaagataagaaaaatggccaaattatatgattaaccaaatgttggtaaatgatatttatatataatactatagtttactaagagtagtgatcatgtgtaggatgacttattaattattttttttaacaaactaatttggcaccagtacaccctataaattaataactaattaattaatcaacataagtttctttcatcgatttaataactaatcttctaggtaatataagttagtattgattcagtagctttaaattagctttgaaaaactctaagaggcataacaatctcatatgcatatgcaaaataaaatatattgaaactagaaagagatttactactacaaatatgacattttatgtcgttatgatgttgctaaaatttcataactgacgtgattaatttgtggtttaattttgtatcaattatagactgacacaattttgtgtcggttgtaaagacatttttcgttgattgtgaactgacgctaagttgtgtcagtgtccaactgacacaaacatactcatttttgtatataaaaaaggccacatttcaggcccatttacacaataaaattctactatataaaatccttatgcatgcactcacaactacaaaaagacttatttatgtcagtttttaaatcgatttttttcgagaatcgtcgctaacaaagttacgtgactgtgtaaaaccacaggctataatagtgaattattcccgacaattttaaatagtcatgaaaaatcctagactgtttaatgtagtcacaaaaaaataagctcgaatttttaaaacggggtatcttgatcgtttaaaatcgtcgggtatactttaaccgacggtttaaaaccattaggtataccttggccgacagtattaattaaaatccctcctcacaccaattttaaaaaacccaatttttatagtatttcatttcacgcctcttaagataaaccctctcaaaacaatcatatctcatttttcaaattcactctctcgatctattctctcctcaaccacaagccgccaccacctccctctcctccattctctctccacgaacacaacccaccatcattgtcctccccggctctctctcctcgaccacgagccgccaccaccatctctctgctctctctcgctccctctcctctgctctctctcgctcca

SEQ ID NO: 29771 - DNA, 2367 bp, Cannabis sativa
agtttacaataccgaaaataagttcgaaattttttgaacacgcttgttaaatttaaatatcagaaaaattatttttggtactgtaaattatttaaaaaagatattgtaacaaatagcactacgaacaaaaaaaaaaaaattaacatataatttcaggtataagtatagagattgactaaaggttataattggaatttataatttgcacacttaactatataaaggagtagtttagcaaactagtaggagccgtttaggaggagcagctatctgaaattttggactatttcaggagtttttgtgttggtgaccagagattagacaatcatggaggtgtttcccatccaggcagatacatacaagatagggtttatcggagcaggaaaaatggcggagagtattgccaggggagtggtccgatctggcgtcttgcccgcttctcgtatctctacatctcactccaaaactgatcgacgccaagtctttgagtcctttggagtcaaagttctccctaagaacgacgacgtatagtgtccttctcgtgctctttggtattgtatttttgtgatatatattcgtttggttgctgagaatattttaggaaaactgaattcgaatccgaaaatgattgaataagtgtgaattttactctgcctctgctttataaagggtgtttcgattttgaaaagttggaaagcaaaatctttattcttttttccttctcagcaaccagatagagtttctaatggttttccccgttgttttcgtttgatgctctctattttatgtgattgtcgtttctgtataacaggttgttgaagagagcgatgtggttattttctcagtgaagcctcaagttggtatagctccatccatatttttcaacttcctctagtttattttgtttggatatgtatgattaatatgtcttggaactgaactgaactgaagacgagaaactgtaataatcagatcaggattgtgaaacgttaataaacattgtgtccttttcaaattggtctgatgttagagctatggctactttgattatgaggatcattgttacaaaacgttttgcctctttctgtaatcgcagttaaagatgtggtcttgcaattgaagccacttctttccaagaagaagcttctagtttcagttgctgcaggagtcaaattgaaagacttgcaggtgtgtgtgcttgtcgttgtaaattttaaccttttctggtgaattgggactgtgaatgcctagtgttgatcaatatgataattgaacagttggtttttatgctttactttattattatgttacactacaaccaatttacaaattttgctctatttattttaggaatgggcgggtcaaagccgatttatcagagtaatgccaaatactcctgctgctgttggcgaggctgcgtcaggtattattttcacctatgcaaaatctttctttggatagtgaacccattttatgcattattttttttatatgcattttaatgtctcagtattttaatgtttgtgattgaggaactaaggacctatcttttggttcattgtgttactttccaaattgtgagtttgagaatataaagactaacatctttcctgtccctcatgaagttttttgactggaatacattctaagatttatagtacttttacatgtaaaagttttgacggatgatctgttgtaactgtaaatcagtagttgttcttgtcttacaatggtattttgaatttggagcacataaacttatatatgacagttctataatttgggctagaaggatgataatcattttggttttaagaatttcttacgtttacagaacatgtacaattttaaatttactgaacagtatgtgtgatgtctagttaagttttatgagttactgatgtttagcactcattagtatctatataagatacaacaaatggaaaacatgatcaatatcatttgattgaatagttgatccagttccttgtttgaagaaacccttagcttcaatcggtatttttttttctttcatgaaaccatgtcaaatttgtctcaagattctgtacatggttcagtaacagaacatagtgttgggaaagagtaatttaattcaactaaaacataattttagtgattttttttaatgaagatgcaatatctatgtaatgtagtcaatagaatgacaaaggttattcctataattaaatggtattaattgaatctttaatctttgtgacatttttatctttttcaagtttgcaccttatttttccaaatgaaaatgttgaaagtctatttttcttcctttcaatagtgatgagcctgggaggagctgcaacagaagaagatggcaatctgatagcc

SEQ ID NO: 29772 - DNA, 2346 bp, Cannabis sativa
gcaacattaaatgctatttctgatctatattaaaaagtaaatctgattatattgaaatgagtattatttagggcataaaacccaacattgagggcatagtagaatgcatttaggagtgctggggtactcaaagtgttagtggagcaattactcctcctacctctagttttggtagttgtggtagtagctcaccactgatcaaaagaggaaagttccatttgtgcccaatggctcaagtgagaattagaggttccgaggaacgaagactatggtaatagacatagtggttctaagagctgttactcttacccgaaatgccccagctgtgaaaagcatcatctgggtaagtgtaagggtctagcatgtttccattgtggtgtaactggatattataaaagagattgctcatagttaaagaaagaatagcagaggatagagacaaagccagatccatcaacagtgtttgcccttaccctggccgatgttgaagctagtgcttcaattgtgacaactcagcttgcattcaacaactctttttactctgttttgttttattctagagccacacattcttatgtggcagccagagtaattgataagttgggtaggtggtatgaaagttatgaaatagggtttggaaccctacttcctggcggagaattagttatctccaaaaggtagattacgtttatgccaattaggattaaggatagggagtcgattactaacctatttgaatttcgtttagtagattttgatgttatacttggaatggattttttgtccaagtacgatgctagtgttgattgtaagtagaagttggtgacttcacaagttgaaggtgaggaaccatttgtatatgtggggtcaatttagagttcttaaattccaataatcttggtgttgaaagctaaagacttgttgcaagaaggatgcatagggtttttatcaatggtgttatataccactcagcctaagtcaatttggctagaagacattaaggtggtacaagagttcttagatgtatttctagaagaacttccagggttaccaccgtcgcaaaaataaagtttattattgacatagagcatggagctgaaccagtttctaaggcaccctattgaatggctctcgtaggactgtgcaaaaagtctccaatccaatcccaaccgatccaatagaattggatatccaatcataattgcattagatcagatgaaaatttttaaaatccaattggatcggatcggttgtttgatgggacatccgatccaatagataactgaccaaactgctccaattatcatccaatggtcatctaattatatatttatatatttttaaaatacatttataattttttatatttaatatattttatttaaaaatatatattaattgatttaaaatacatttaacacatgagattaaagaaaaaaaaactttagatctaaaatattaattctcatcttcctaaacgttaataaaataattaatgcgtattgaataaattttattttttagcagttttattatgcgatcataagaattaggttggactaaactaatatttattatgtatgttggattattaagttttaaattatgtttttatatatatatatatatatatatctttaatataatcaacttaaatggtagctaaaattgattggatacatcctatccaatcaaatccaaaagaaaactagtcaaagaatttaatggttggaaccaatccgatccaatacatccattggttttcatcggatcagatgactcaattcaatcggattggatcggatgacaaaattcaatatccaataaataatttgattggatcggttgggtctaaatccattggatgtgatccaatgaacaccctcctactgaactcaaagaaatgaacatacaactttagaggatgcttgacttaggattttcccgacccagtgtgtcaccctggggagcttcaatattatccgttagaaagaaagatggatcacttcgcatgtgtattaactactgagaactaaataatgtgacaatcaagaacaaataccatttgtctttgattgatagtttgatcaacttcagcgaaagatagtcttttctaagattgatctccactcaagctatcatcaattgagaattcgataggaagatactcaaaagactccctttcatactaggtatggccacttttaattcctagtcatgtattttggactaaccaatgctccaatagcttctatggaccttatgagtagggtattcaaggatttccttgatatatgtgtcatagtatttattgatgatatccttcttgttggaaatttattttac

SEQ ID NO: 29773 - DNA, 2764 bp, Cannabis sativa
  modified_base (1185)..(1210): a, c, t, g, unknown or other
acgttacaaacctctacatgtggttttcttgcccatattcccatgtaacccaaaactaatagcaaacacccctaagaaaatttcaaatcaaggaaaccaaacttgaccaaatgaccaatcaagtggtttagtacaattatgttgaaaactaaattatgtacaataatgtaggctagctggtaagggagggatggaaaaaaaaaaaaagaagacatggactttgactcaaatatttttaagatattaataaattataatactattaaggtacactaaaaaaaattgaaaagataatacaataataataaacaaagaaaaatctcatattagtacaattatgtagagatattatattgcagcagattcattatcaatattatttcaataataatttaaattggtggccgactatatacaatattaaagttgttgcatctgtaatgtagatgcaaataagtcaaacaaagttaaaatataattgacttagattatctttaatacatgatgcatatttttagttaaatttatctaaaatatactatgaaattatattttgcttaatttttatatttgtgttctaatacacaaagtgtaaattaattataaaagtgaagattactaataaatataaaagtcaatactatcattaataaatatacaaaataattagagtaatttgcggcataaatatataagtttaactcctaattgcaaataaatacctaaatttaatttttgggtaataatacataagttatatttctggaactacgtaggtctaatttttttttttaaaaataaaaatttaatgacttggagcaatcagggatcgtcacatggtaatttacttaacgcttaagatctaggtacctacaaaagttccataattataacttatgtattattaccgccaaaaattaaatttaggtatttatttacaactaggagttaaacttaagtatttatgctgtaaattacttaaacaattaattttatttatattattttaatatcttatcttaaaaatataaaaatattttttattaatggatcattatatataaaatgtggctagttaaccgtttttgttggtttaagaaaatattttaagaatataaaaatattctattaaatttaacagtgttagtaggattagttttataatatatatataaatattaatannnnnnnnnnnnnnnnnnnnnnnnnntatataaatattaatatatttttattattattatttattgttatttttaatatttggagtatgttcaattttaatatttttaaattttgtatttattttactcaaatttttaaaactttaagtattcattttttaaaaatcaaaattaaaaaattaattagtttcttttaatttataaaattttaaaaatacacataacaaaaataaaaactaaaaaaataactaagtatatgtataatatacgtaacaataacctagtagtattaataagtgacaaaaaggaaattaaaaatagatgacatttattgagggttaaatttgactcatgctatcttttgtatcaaattaaacacatattttacatcaccattggagttaaggtttagcaaaatattttaaaaattgcaattaatagttctccattagagattctcttagaaaaaatgtactccaataatgtgccaaaaggttatctaaatttggcacttagcaaatattgtgtcaaataaatgtacatttttatttttaatttttatgttatttttattattttattagtatatttaattataacattaattatgaactattcatatgtttttcattttttatttaataataataacaatattagtgataaagttattttttatatatatatttttaatgaaaatattaaattttataattatgtattagaacataacatatgcagtatattactaatttacactttgtgtattaaaacataacataacttttgcatctctcattaaaaataatattataaaataacaaaggaaattagttaacgatcatctataatttttattaaaataaaataagtattacttataatattaaattgcacaaagtcatattacaaatttacaatgtcaacttggcatttctcattaatgagaaacaattaccattgcggcttttaatggagtgaaataaagacactttgaaggtcatatgtactgtgtagctaacaccattaaatttgagtttgacatcaaaattacataaataatacacattgaaaaagcattgctattagtatcaccttgttattaactaaaataattttttttaagttatatgaaactcgcttattaattacaccaataagagtttaactgccacgaaagaaggtacttcattaatgcattttaacaattaaaccatatctcgatcgatctatttctctctctatatatatttatatttatgtaaacaccaccaaattaaatttaatttacatctccaataatggcttccacctccaataaagacatagtcactgagatccttccattcatccggatctacaaagacggcaccgtagaacgcctcatcgaatctccattcgtcccaccctcaccttataacaatcaccacccagaaaccggagttccagtcacttccaaggacatctccatctctctccaacccctgattggagctcgcttgttccttccattactcccaaacaccctcaacaacaacaaacttcccatcttggtctactttcacggcggcggcttctgc

SEQ ID NO: 29774 - DNA, 4573 bp, Cannabis sativa
  modified_base (3047)..(3056): a, c, t, g, unknown or other
cttgttggtacaaggaatacaaagagaaattgctaaaagccaaagtaggagaaaatcattcttttattgaataattttggattggttacaagagtgttacttatacacagtgcgaattataaagattttttttttttttttttacaataaaaaaaataatttggtatgtattgtacacctatattttgattggtcctttatctcttttaacattcaaaaaaaaattatttttttttcaataataatataagttctaattatttacaactaccaatacatttttagaaattgaatagtttttagaaattgaatagtttataatcatgacgaagataaagtttgaatattttactgcaatcatgataatttttttatatatacctagtaaacaattgtttgaacaatattttcgataatatatatacaatttaaattttttaaaatttacaagtaatcctaaataattacaacatgcatacacaattaataaaaaaatctacgacgtacaactaatcctaaataactacaacatacccatttaaaatctaccaagttgtaattttagaaaaaataaagtaagaacttcaaataattaacttttaaatatatgtataataatcaataccatatatattttttactagaaaaatattgtatataaaccacaaattaagttacaattaggagaagccatgtccctatagactaacataatttcgcctacgcttatacaagtatgcaagtggcaagaactattaactagttgtaagattcaactatctcttatgacaacaaaaactagttcatgtattcaattgtaactaacaactataatttaactaactcttataacaaccaaaatcattttagcttaattattttgattctcaagatgaagtgtatatactttgcaaccccattaaaaaattatgtttttgcatatataattttatttttttaaaatctgcaattaaaatgcgagtgtaacgacttcaagcaagagattgaaaacttgttactgtagaacacagacttgctgtaaaagaacaaaaataaaaataaattatgcagaatttaaaacttgacacaagaaattatacgtgatattacggggccatgcccacagagtataattaattagtaaagtatcaaatattacaaaaacaactgacttgaataaaattaaactttgtctaattattttttgcaaccttttgtagttcaccttgctaatattgatctctgaaacacacgaagtagtgaacttccttaagctattaatgcatgctcacttcctcccgaaataagtctttgacagatcttctcacgaagacatatgctcacttcctcccgaaatgagactaagaaaagtcttattttaagacccacacttattcaaagcttctcttcaacttattctatgaaaactaaaacctagttgaatgctctaggtttttacaaaagaaacactcttctcaataaattaagttatgaaaatatgagacaagactagaagagatgtggacatttggctgctctgtatgttctatttataacatatacaaacctaaagacaaccacaacatgtacttttatacctatacaaaactttcctaaaatataccttgattaatttgcaatgacagaatcgcgtttttcagtgacaaattgagaaaattttcaaataagtccaagataatgatttggactttaatacttgtcatataaagattatacaatattctacatttatagcaaaaccgaaaagagaaactagcaaaagggaaagtacatttttctaaaaataactcatttaatcaattttttcataaaaatattacttttcttttataaaaacttttctaaattaaaagaacaaccataaaaacgaaattacacaaaagaaaaaaatatttacttcacaataaattaattaatattttgaaaactaaattactaaaaaaggacaatatttagtactttagattatcaaaatatgttttaaatttttaaatatctgcaaaataaagttagcaagatcacagaaatagactccccctagaaagcacaattaacatataatacaatgctaacattaacaaaagtttaacacataaaccaaactcaactatccctgaaaaaagggtccagagttgaacacacaaaccaaaaattaaaacctttactactcccccttttagtttatctcaaaggccaaagaactcaaagataaaagaaatagaacatgttattatccaatcagctgcaaagcaaaccacctcttttaaagaacatgttatcaacatgaatttactgaacttggagcagctgaatatcaactcaattaaactcaaaagaactatttccaagcaagttaagataaactgcaccttttaggatggaaaaagttcagctcagttgagtcacttgagaattttatttttgatttttgaagggcttgccaatggagttaaagatttcaagtagatccaaaattattaaactaagcttcacaaaggagaagaaaaaaactatttcgaaaaaaaataaaaaattttgggaagaaattacttaaaaaattggtgaacacctaaagaacactagaaagattgatgaagaaagattctcaagctctcaatctctattttgggcgtgtgaagccgtgtgaaaagagaatagaagagttctacaataccctgatacttaggcgcgctagagtgatttttaaataattgtccccatctttgctaatcaaaggattttcttaaaaatcgtgcaaaattaagatttttatttatacttttaaactttataaacacacacatatatatatattaatcgggatcctgtgtttaaactttacaatcatattcaaaataacttattacaaacatgtcgcacaacgactacaaaatacagcccaactcgtcccgagactgaactctctaggtcgcaccgtttcgatttgtacaataatcccttgagctcagaattcactactttaatctttgacctttcctttacctacacatgaaagtaatatctgnnnnnnnnnngactcagtaagaaaagtatataatatacaatatattatcgatttgtatctaggtgcccatacacctatccacaaggcttaatagatgagtaagaatattctttactaaggtatgaccactgtaccacatgcattacgtaccgctactatatgagtgttggtagggtttacacagtacctcgagtaccacttagtgttgtaccgcatacactacgtactcaaccgtactaatgttggtaacaacgtattgtactcgttgaacatcatacactataccaatgcactcagtatcgctaccgtgctagtgttggtagtatacgaatcacaaatagcatgcatataatacacatacacatattcatatataattacattctatgctagttttaccttgtttccaaattcaagtgtgctgagcgacctgaacaaagaatcacgtgctggatggatgccatatgtcacattcacataaatgggtaaataacttgttaaaacacgatccggggacctaaacttacaactaataatttctttgtcgataactaacaagtcaataccttaattattgaggaaacatcaaaactaaggctctaagaatggcccaagtcgataaattggattttttgggatcctgcctgtgaaacgattaaccggttcaagagtacctgtagaaccggttaactggttcatactagaaatcccaaatcagttcgaaattcaaccaattcttctccaaactctgtcaaactttccagaacaccttcactaacatctagtaatagtttccaagtagtaataacaagaagaacacacaaactaaaagtgccattaatgaatcaagtttgagttttcaaactcaaacttgctcattctcctctcaaaccaaccttaccagcaacaagaaacctaattctattcaaaacaacctgagaaataacactagaacaatgttaaacctaaacagccactaattcttagaaattacatgataaaaccaaacttaaagcttaaacaacataaaggctagagttctagggtttaccttgataaaatccttccaaaactgctaagtaacagtctgaattccaacaagaattaatcagagcaaaagagaagaaccctaggttcttggctccttcttggttcacaaaaagagggagaaagggtaagaatttctaattatttcttgattttttcttaattggttaattccaaaaataaacaaacttaggatgaaataataagtggccaactgtcaagccaaaaactagccacctccctctagctaaaatacccaaaatgctcttacttacactttaagtaacctataggcgtaggggtgaaatgatccaaaactataactccgcctaaacccgacattcttatctcttatgtttgtatcactaagaataaggttctaaactgaccaatgtgactctaattgtaatatcccgataagcctaatggtaaataattcaagtttatatttatactatgggttaatcaggtaattagtgg

SEQ ID NO: 29775 - DNA, 6083 bp, Cannabis sativa
  modified_base (45)..(54): a, c, t, g, unknown or other
aacgaccttaaaagttcagggggaatgatttagtacatgtcaaannnnnnnnnncaaaaatcctaattaaccttttttgaatctctgtttctctttatcttctctatgtttgagcttgtttgagacattgctgaaacctcattgacgaacccatcaacttaagactgaagaacatcgagcttagagtactccgccttaacaccgtttgatcaatctctgcgcccccacccacttttgagccatctctaaaccttcaaaaaagaatcttcaatgttagtgtgacatataaggtttcaaacacgtttaaaatttggttttttctcttgattttaggaatttacaacctagcattgaataggtactttgatttttttgttttttgtattttttttatatatataattttgttcaattgtgtttctcttcgatctagttttggaaaaaattaatctaggttaaaattatttgaattatggtattttttgtgaattttactacaaaactcgataagtattccacaaccttgatactggtttgataagaacttgatgcctataatgtatttttctaaatatattttgcttcatttgctcgatggagcttgatataaactcgatggtttaacaattttttttttttctgtttttgcaaatggttccatagccaccattgagttcaaccgcattaacatcaattccactgatgatatcatcgtgttatatcgaattcgtatgagcaagtaccatcaagtttagatcaacaattattgattctatcaatttgtcatccctaacctttaaaagactataaaatatcattatcaaacttaatcacattgtatgccaagaaaacccataaaaatacatattcaatattttcttttcaaaaatcacaatgaaaattataataaatagtaagagtttagggagaaaaaaaaaagaacaatgatgtagaataattggtgccgcaatctccgtcttcttcttgctctctttgagtttctctctcaaattcgtatttcaacagtcgctaaaagtgaactctaaaaatcctatatataatccttaaaaatatctcattaaaagaaagataaaaattcgaaatttggcagaattcgcgtcctcaccgcgacggtagcttgttgtcgaaaaattcatgtcacgtgttcaaattagtactgtggtcataacttcttcaatacaacgtaaaattagacaattcaagatgtttcggaaagatattaatgagatctacaacttttatgttgagctttaagtctagttttgcttccaaagttatagaaatttacaattaaattatgtcttgtaaaactgagcttgctgactttcactattttttatcaaaatttgctaaaatctctccaaacgactctaaatgcatgattagtctttaaaatatcctaacaaattacaatcacactaatcaataatttaaagaatcaatttaagaatattaatatattaattcaccatatttataagaaattatcggcttatcaatgggtgtgctcagcatcacatgcctgttcaagatcaacagcaggtgaaaaagagccagaatcctatcattaaacctatcacacttcaacatggcttgaatgaaatcccaataacagcatgatgtgaatgaaaagatggacatttgacaccagagacagaagccagacccttaccatgcaccaaagggttaggctgagcatcatcattactcaaatcaatattgacattgatgttactggaaaaattaatgataggcaaagaagcagcaagagaatgagtggcaagcagagcttcaaaagtacccaagattggactctcattgacaataatagagtgtgggggtaagacacgagttgagatgaagtactaacagagaaaaagttagaaacaacagttccatttagaggtgaggtcataatagtaacatttgggcatgagtgggaatcataacaataaaggtattttaggggggcataagatgagaggcagacaccatactagatctaaggagagaggtgaaacaaagggattgattcataagaggacgcaagggaagaattggaccatagaaaaagttagcaagatccaagtcaacaacaataatagcagattgatgaggatattgaaaagaaagaggcttgtcagaagatctctctttgcctctaagcagaatgtcataagggcaaaaaggaagagtgatattctcatcacacttttgcaaatatgtatgaaagtacttcctggtacgctcaagcttaccacaaaagtaacaaacattaagaagcctttcataattgaaatccagccacttaacaatttctctacccatccttaaaaacctaacactaattccccttctaatagacttgttaacatctagaaagatcctaattctcaaatatggcccaattccctcttcaacagtggtattatcaacttcaataagatcacaaacactcgtagcaaaaatcttaagaagatcataagatttgcacataaaagggataccataaacctgaatccaaaaaggcacataatgaagggttttaggagtgataggaaaaaatttatcagggggcggcaaaaatggttagactttgtgcaaaattccatggttgaccctttaagattcttcttttatccctctcacacccaaaattaacataaaaaagctcatcagaatgttgagacacagtcacaagaaatcaacattgcaatttctaaatttcaaaaagggttttcattaggaattcatgattaaagtgttcgacaataaatagtttaagcaagagactgatattactaggattatcatttaaagagttaacatcaaaggtaaaaacatcattttcatcaagagttaaagcaagagcatgtgagacattaataagaaaatcatccagtttgaaggtaatcaaataaaagactatagtgataaagattatacttagttcttgccttaaatagaatgaagagataccccttcaagacgtttcttgaagatctcttggccacatccccttccttatcccctttcctagagtcagtagacttgataattacaagtacaatcgaagctccaatcttcaagtctccacctctattttgaaagaaaaagcattttgtatgaaggtaatgatttgggttttacattgggagaagaaggaaaaagaaagaggaaactaggtgtaacgattataaaaaaagaagacgaatagaaaacaataaatgggctttgagcgagcttcaagattaaaaagggaaataataaaagactcagagatattaatggagtaataaatgtaaaagatagagtaataaatagagaaccactaaggctagtttagcaatcagggagagatgggaaaaaatgagaaattatggattcatgggttcgaactcaaaacttttaagagggagaagtatcaatatagcaaacgtccaatggaggaaggacaaacaagaaagactttttatttttatttaattgaaattaaatcatgttttgggagttatatgtaccaattagttttattctcatttaattacttttttataaaagttttacatacatataaaactttaatcccagaggttaatgttggcaagagaatggtgatattaaatattaccttgtttgtttggaaaatgtcattcccttagtagggaaattcaatccggagaggggcctaagacaaggcgaccctttgtcccctactctttacatcatggcggctgaaactttgtcacgtcttttgattgagaaagagcatcatggtctccttaaaggattcaaattgacaaggagaggagactcggtcactcacttgatgtttgctgatgacatcattctgtttggagaagctacagtccgtgaggctagatcctttttggattgtttaaactactactgtaactgcttgggtcaggccatcaacttctcaaagtcttccgtatacttttcgcgaggtgtggcgggaagaaaggctcaagtaattgctcagactcttggaatgagaaagatgaacaggagagcaacgtatctgggaatccccctctttagatctgtcaagcgaacggaggatacgaaacatttaatcgacagggtgcttaaaagaatacagggctggaaagttaggcttctgtcaagcgctgggaaaacttgcctgatcaaggcagtcggctcaagcctttcaaactatgttgcctcctctgatgtaatcccttctacgacagctaacaaggttgataaacttttgtgggatttctggtggggtgataccgaattaaaacggaagctccatctggcaccttgggatcttctttgtaaaccgaaaagtgctggaggtctgggattccgcgccacagagactatgaacagagctttcctcatgaagtgggcttggaagatccttatcggcgaagactgcttatggcgcaaagtaatgaatgataagtacatcaagaatcagaacttccttgatttggaggccaaaccgtctgactcaatcctatggaaagcgatactccgtatgcggacggatcttggaaaaggcatttgtcggaaaattggagatggcaactccacctcgatctggtttgacccgtgggttccaggggatatccgtcaaccaataccttgtgtagatgatgcggaaaggattagtttggtaagtaattttattactaatcatcagtggaatgccgatttgataaggagatggtttcgacatgatgatgccaaacgtattctcaacatctcacttcctgggaggaccgtagatgactcttggttgtggctgccaaatcctagtggagagtattcaatcaaatcggcttatagaatgctaaaaaatgttaatcacagcgaggaaggggacaggaaatggaaatccatttggggagcaaagattcacaatcgccttaaaatgttctggtggaaaattcttgctaattgcatcccaactaaagaaagacttagcctgtctgttcccattcaagataccatatgctcattttgttctgcctctgttaaggacaactttcacttattttgggagtgcatatacgcaagagcaatttggttcggttgtagttggagctttagagccgatgtcgtctcggtttcaaactgggatgattggcttggctggttttcgaatgcaaataacagaccatcctatcttggcttcaatcaattattgggaggggctgctattatttttgaaagcatgtggagagagcggaatgggcggcttcatgacaaaaaatccaatcccattgcaatctcaatcaactttatcaacatcagactccgagaactctctcctccgaatgattccttccactcctttcaatcagagtggaagccccccctgaaggatgggtggcatgcaattcagacgtggctatagggcagaatcagtcatcgggggcagctgttttccgagacaacatgggcaccatcctgagaattgcctcctttcgtctgaaccattgcgatccactgccgggagaggtgtctgctgtgtgtgaaagtgcagcagtggcagtggaacttggatacaaaaacatagtctttcagtgtgactccttaaacgcagtggctgccttgaaaagcaaatccaaggacattcacaatttgcaattcaatatccaagacaatgttcacaagtttctttcatttgcaggtaagttaaatctctgggagatcatttggaccccaagaacctgcaatggtgtagcccattcggtggctcattgggcaaatcgaaataacaagttcgggtttattgatttggccaattttgatgactccctgcagctgttaagtgcagatggtcatgggtcgatttagtttccttagttttgttttagcttatcttttgttttagcttttctttagccattcctttttaggttgttatttggccgtctatggcctttttttctttgcttgttctctgtctgtttgcgggtgtggttcccagtttaaccactaataaaaaaaaaaaaaaaaaacccttaaagagggtaatgtttgtgaatgttggaagcaattga

SEQ ID NO: 29776 - DNA, 2702 bp, Cannabis sativa
  modified_base (1103)..(1104): a, c, t, g, unknown or other
atacaaaaaatatggcccagaatcgttttgccatcatagtttgggctcaagcacttatgttgataacgtcaataatatcatatgggctttcatggtgactaataaagacatcaaatttgtagggaaactcacaaacaaattttagaatttaggttaatttttataaaaatattttcacatagaatttttttaaaaaatactgtattttaataaaacaacagtagaacaaggtataaaataaataatcttgaaacacagtatttaaaaaaaaaaaaaaaaatctgcctcatagtgtaaagtaaaaaaattagaaattttagtatgtaatgtaattatctcaatttttattcttctattttgaaaaatatgggaaaaaaaagaaaattttgatatatatcatatgtaaacttaattgcactaaaaatagtatttttttttttatataaaaaaataacttaaaaatatgggatgaatcatcattgataaaaaagaatatcataaaaaaattaaaaactcgtatataaattttacttctacataattaaaatcaatttcatgatgaaaaaactagtttcttgatgaaaaagttaatttcctaatgtaaaaaccaatttgttaatgaaaaattcaatttcttaataaaaaaactagttttctaataaaggatttttggtgagtttcgttctgattgatcgccgccggatgggtgaaaagtttaaaaactcgtatataaattttacttgtatataatcaaaatcattttccttatgaagcaactagtctcttaatgaaaaaattagattcttgatgaagaaaccagtttgttgatagaaaaactagtttcttgatgaaagatctttagcgagaaatttatctaacaattaaatatgggttttgaaaattaaatttacaaaacataacatagtaaatattgtaaaatagtgtaaaaattaaaaataataataataaaaaaagataaattgcggcataaatgcttaatgtttcacattttatacacttaaatatcttatcttcatttttggaaaaaaaaaatacccaatgttacaattctcttacacccgttactaccacttccgttaacnnataaatatggacacgtggagggtctagatacattacatttatgaaatcaaattatataattgtaaggagagtcgctctttaaccttatcaaatcaatttcttttataatcaatgtgagaccctcacatgtgattatttattgtattttattttttgaaaaaaaaaaacgcaattcattaagataaatttgctcttacaaagcgaactcaaaattcgtagacaagcatctgttcatacacattcttctaaactagtattaaaagttgtcaatgtgtggtcaacaccattcgcagactgcggaatagcactgcaaatgataggtattaggtctttttcgagacaggacaaatctctaaaatgcactattcgagacggtgtcaatctcctaattgaactaaagttctattttctcaatctatattgctaaatagttatttatacaattacatatttataggctttcacaccctttacaatttactaataagctcttctagtattttcatagtctaacagtaagaactaccaccaataacaattaataaagaattaatatctaataaaatagattgaaaaaattgagtgaggattattaacccaaccaatagccatagtggaataactattaataatggaaatacagaaactaaattaatgcgcaagagtcaaactcagtctaattgcaaatagcaccactacattaacagaaaaatcacctaacacaccaaatgactaagccagccaaaccacacccccagcatcccatatcactcaacccaatctgacaaagccactcccaggaaccactgaagcatcagccgcaagaacaaatgaattgacaggtggtggcatccaccgagtaggtcgctgaccaactttgaaaagcatagtccctgcggaagatctcgtcgaacatgctctttgaattctgacaggtgattatgggctaaatttggagctatatctaatcttgactgcttattactaaattatactgattttcaatcaggccaaagccaccataaagtaaccatcatcaattcgaaagccgaaaatgtattgttatttgagaatgttatgttttaaccagatatttcctttgagcaacggaatacccaaaagaatggagggaagggaggaaatagtttaatttattttgtcaaagtcttgatttggaagccaagtatctaaaaaaccataacttccttgacctagagattaaagccttagactcacttctttggaaggccatcatgcataccaaaactcatattctcaaaggcctctgccgaaagattgataatggacgatctacctcattttggttccatccctgggtcttgaatggaaaccttcaaccacagcctcagctcgacgcttcagtaggtattagtcttgtgagtaattttataataacaacaattagagggaggatatggttagacattggttttgtcacgaggatgctaaaagaatacttaacataacatgctacctaaccaacccgctgaggactcctggatttggcttccaaaagccaatggcaagcatcaaattgttggaaatattttacttggatctagatttactaacaagta

SEQ ID NO: 29777 - DNA, 909 bp, Cannabis sativa
aaggctactcttacttcctttggatctcagtgtgctcatgcagacaatttttcattcttcatgcacaccttagatcattccacaattgtactcatatatgtggatgatatcttgttacatgtagttcaaatacagctgttacatcattaatagaaagcctcaactctctgtttgcactcaaatatttaggttatctcaattatctcttaggcatagaagttactcattttgctgaagggttacatctatgttaaaagaaatacattctagatctcttggtcagggctaaaatggataatgcaaatccattacttaaacataaggtgaaaaacttacaactacagcgagtgatgcctattataggaacattattagtgcactttagtatgctattgtcactaggccaagaatatattatgcagtcaataaagtatcacagtttatgcaaacatcccttgaatcccattggaaaattgcgaagaaaatacttagatatctcactggtacatatgactttggactgctcttgaaacctccttctaccttgtctttcactggtttttgtgatgcagattgggcctcgaatccagatgataggatgtctaccttggtcctaaccttgtctcttggtcctcaaagaagcaaaacacagtgtctcgctccagcattgaagtagaatatcaaagtttggctctagctactgctgatctggtttgggttgagtctttactcactgaagttaaagttctttttagaagccacttacaatgcggtgtgataaccagagtactgtactcatgtctgccaatccaattctccattctcggaccaatcacattgaattagatttatactttgttcgagaaagagtgatcaacaagcagttgctggtgaagcatactcctacct

SEQ ID NO: 29778 - DNA, 2051 bp, Cannabis sativa
  modified_base (616)..(617): a, c, t, g, unknown or other
aatagcccattttgtagtagtgccaccacccttcaacaactccacctatccactttcgttcaccagttccacatctgacaaacggcaaacggcgatctacccatccgacgacgatcagttagagcgaaactcaccaaaaattcttcatcaagaaactagttttttcatcaagaaaactagcttctttatcaagaaattgattttgattatatagaagtaaaatttatagaaaacaatttaaagttttttatggtatttcttcttatttatgatgatttatcttatatttttatttttttaaaaaatatcatatttgatataattaaatttacatgtcatatatatcaaaattttctttttttttccatatttttgtaagtagtccttaaattatggatgattgtaataaataattttaagactacttgtgtatatattttgatgactaaataaaatttaatgtagttaagcactaactataaaaactttaatttcttccatgttatgctttaattatgagaaatgctaagatcgtaccagcggtgtttagtaccctcctatgtgttaatatcgctattagtctaactaagcatcgggtcctatataatttaatatnntagcttttagggagtatcgctagccaatccggtgcctaatagcaatgctttttaattatttcttcatattttcttaaataaatgactttgaaaatcaaacttgatatggttagttatataagtgatattagattagctcattcaaataccttgaaaatcaaactttaaatatgcttagaacatattaaaattctatacaagtgatattggattagcttattcaaataccttcaactcagttaacccaactcccccaacaaccctataatcaggattagaagatttacaaaaaaccagacaacaaattatacacatgatcatcacttcaagacttctaggttacgattatataagaccaatatattacgagacaaaatgttttgttatataattaaaagtattatatataagaaagatattaattatgcccacctcatagagtgatctagcatttccgaatataaaatcgatagagccttggatgaagcaatccttataataatgtctaccacggtcatcattaagggtgtcttgggcgccgtagaatccacacccataaaatgcagcttcatctccagctacccgaatcgccaccgcctgacctcccactactcccggcgacggaggaggggctgtattcttttaatttcaaatataattaaattcatgcatgcacaagatactaattaagattatattaattacattgatataacatgcatgatatatatgtagttattacctgaaagctgatattgtaggcagtgaagttaggagcaaagattgaaacagaagagctatagactgttcctccagtcgaattggctgtgtcgttccatgctatctttgtttttagatacccttgtccttggaatatcaaatttgttttgttagcgttcacaactaccttttctctgaaaatcatttatatataaatcattatcatactctacatgaggtcaaatatataaaacgaaatatatcccttttatttagaaaaaaaaatagagggaagtcttttaggatttataattaggggtcttaccacatctaatgtttatgtttttatgattattaaatctgatctaattatatattggatgttagattttattattcaatctaattaatttcagtcatccaattaatctaatatccattgaatgttagagtggattggttcggatgtatttcatatatgtttattagtttaatttaagtttatctattattttagagctaatatttttttttttgtatcggatccatagtgcgtattggattgaattagatccatctaatcccaaaaaaagagtaaaattttaatttgaatttttatataaacatataaattttaagtataacaatataaaatttaattactcatcttaactaaacgaaaatactaattgtaaaacaatgtccatggaagaa

SEQ ID NO: 29779 - DNA, 1587 bp, Cannabis sativa
atttaactttcgattaaaaaaaatacttataaatttaatttttaatagtaataatatataagttatattactaaaacttcagtaggtagctaattagtcaggtcaaataaggtcacatggcagtccttgattagccaggtcatcactttttcattttttatgtaaaaatttatttaataccaataaaaaaaatgacacgtagatattaacttgagacaaataaaacttagatatatttattataaaaaattaaatgtaaatatttactctacaaattacttaaaaaaacaaaaagttatagctttatatgtgtggtggacatttgtatttttacatattgaatttcgttaaatgcatcgtaaaaaatgtattttcaattaagtattagtattattattattattattattattattattgcatcaataaattaagtattaagaaagtatgtaataacagtataaattagtatatatgcatataaattgaatgtatatgtcttgacaatatgaattaattctatgaattagtagtgtattttgatatggtttaaataacaatatgaattgtaatatagataaatttaaatatttatttactatatataaatattatatatatttatatatataccttcttctgatgtgtaagcaacacaaatgttgaaatgggaataaaatgacaaaaaaagagaaaatgcaaagagaaaaatggagtaagtactcatgattatattgatgatgatgatgatatttgataaaaagttatagcatatatatacatatattttttacacaattaaatgtatattgtatttttttcttaaatatatactgtatttagtacatattgttgagaaaaattaacatatgtagataaggttataaaattgactctagttatttatatctatagttaatgtatttactatttagtttgacatgtgaatgagtaatgcattgctgaaatataaattatcttatgaaaaatctctaatggtgtgctaaaaattgtgttaaattggacacataataaaatttgtgtccaatttaacacataatatactataatatttaagactgactcaagagtggggcagtaagagctcatactttagccccactcaagctaaaaatattcgtaagaaaaatattttaaatttattttttaaaaaatacaatatttaatatttttattattatttattaaaaaatataactaatttctaaaaaaaatacgtaatttaatttttaagatactacataattttgatattttattaaaaaataagatcttatattttatatttagattttatttacatacaatacggtcttttgatgtatttttatgttgcattcttattattttgttgttgattttttttatatttgtatattattttttttatgttgttttgttgttattttcttgtgtttttataaaataccgtaaaaatataaaataataataataataataataataatttgaatgtaaaaatgtaaaaaatttacaaaacttattgttttgtgcaattatctaaaaaaatatattatttttttcatataaaaaagctaattaatt

SEQ ID NO: 29780 - DNA, 1702 bp, Cannabis sativa
tcaacacaatctaacccatttggcacacacttatctttaggcccactaggcccatcacccctcccaatggacaaagtgtccgttggtttctttcctttctcaagcccagttgggttttccaaaattgtatcatcatttacaaccaaaaggtcttcccctttatatcccacagtcatcggcattattttaggcaaatgggtaggtgactttacccctattttcaaattatcatttagcttctttcccatttcagcaaaacctcgaccaaacacagcaggcttcttcttgggaagccattttttctgccctcctttgccgtgcccagaaaagccacgatccatcactttcaacttttgcctcggtccacgttccacaacattttcctcaagaactccggcaccggctacccgatacacaatcaacgctccttcaccatagccaacaccttcgaccggcacagtcgcaggagccagactcttcttgttcgaatcactagagaagacatcatggaacctagaggccgtggacagccacgttccgaacagaggagagggagtttcatcaagattggccaccgtggacggagaagacaaggaacatcccctcctttgatgtcccaaacacccacagaagtaccaaaagattccaactttctcgtacttgaactgcaaccagcgtttgactccgagggcaatatcaaagaaacagcccgaagttaaaggacgctctaaatcaatctccacaagaactctgagaaagagttcccacgaactcggtttgtcctcttcaagttccaatttaataaccttaccaattaatccaccaaggagagtgccattaaccaccgaaaaatattcatggggtaagttgtgaatctgcacccataagtcaatattatccacagttgtaatgccttccttactcggcttccatgcactaagggcaaacgtatatcctttaaaggaccatggaccttgttccagcgcccattgcctatcctcctcgctgtcgaaacccagtttaaagcagttgggttttgacgaaccaacgtccagaccaaatacaaccactttcttaagccagttttttgcaacaaattgcttgatatcatccgcatcaaccgccataggagccaccactcttccatacaaacacaaagtcgagagtgccttgagagatgaagcactcgggttaagagaaatagttgcttctacgcaggagacagctttgccacttgtaggggcaccaggagcattaactatctccataaatgagagacaacaaccgacaaaacacaataaacaaacaacaaacactaagcaaagaccccacactcacagaaaagacactcagagaatcaccacgagaccacacaacaccacggacacagaataaacacaaaacacacaagaggagggaacaaaggcacaatacacttcgagagagaaaacaaaccagtagacaccagaggagagacgcaaagaataaaaacacacacaggctagagattggtgaaagaccaagctctaggaagagagaaccagtttaagaccattctctctaaaagccaaaaccatttttcaattttcacatttttcacattaatctcacttttcaaccgaagcaaaaataattagcttcacctttccaccgatgcaaaatataaaagataattttgaaaattttcacatttttcctcggt

SEQ ID NO: 29781 - DNA, 4129 bp, Cannabis sativa
  modified_base (191)..(196): a, c, t, g, unknown or other
ttttgataattttttcaaaccaacttgtatgtttttttaatttttcaaactgcactcgcactgtaaaattaaaaaattacagaaaccgcaccgcaaaaaatagtgcagtgcggtgtatttttgcggtttctgtagttaattaaactatcacaaatataacaaagtttgagcaacacttgtcaaaaataccnnnnnncttgaaaataaatatgaaaaaacaaatttaaattactcataaatataaaaatagaatttttataatgtgtggtgcgatttgaaccacatactaacaattcaaaatcgcaccacacatcgcggtttagaaaaaattcaaactgcgactgtaccgtcaagaatttcaaactgcatttttatatggtgcagtgcggacagtttgagcggtttgatgaggtacccttaactgtcatcatcattcataagcaacaggaggtctaatgcaatcataaaaacaacctccctacttggtttgttgcgagggatgttaattggatttttagacactccaacatccaattcgatccaattagatattcaaaaataacatttaatacgatccgatcacaattaaatatctaatatttattagttagttataattaaatcgatcaattatcattaaattgaatcaatttatgcatacctttgtttatagctaaaactgccatacatctcttctcccatcttaatatcacaattaatctcaattcagtccataaggagagtataagagaatgttttaccatagatgaactttttgtgtaccttattactttaagcacgacaaataattagcatgtaccacaataggatttattagtattggcacttcttttgtttaattactaaaaatatctctaatcatgttctctaaatatattctttaactaaaataaagaatgagtcttaaaaaaataaactctaactatgaaaaaaaaaataactctctttaataaaaaaatatataatgagctttttatttttatgcttaaatttttttagtaaaaatattattacatttttcattgttccaataagttaatttatatttaataaatttaaattataaaatattattaaaacacaataaaatactaattaaaatagaaaatatgttagagtaagaataataaaataactttttatttaatatttcagctgttttaattaaattttaaataaaatatagagagcatcattagaaattgctctaataggctttgctctaagaagaagatggccaggtggaaagcaaggttacagtgtaggactattccttgtcattttccatattatatgatttatgacaaataatcattggagcaatcattatttatacacagagaactgaaaatatatctatatcaaacctatgaattcgaggtctagactagttctggacagttgcataattaaaaaaaaaaaaaaaaaaattattgtatgaggttgtgagaatggatggatggttgggttgggagatcaaaggtggaatttgatttttgaggacatgcttctaaaatggtaagctcttgttgtcaattaggagaagtgtgtgtgtttggttttgatcaattaggagaagtgattaaaggaaggatttaaattacaaatatttaacaaaaaggaatattgaaaaaaaaaaaaaaaagagtaaattaagttaaaagttctaaaagttcatgagaaatttttctttttaggttaagttttttcttttttctttttttttaatatatatgagttattgtaaagttttagtttttttaattattgataaaatagattagtaaaaaattagttatttaacaaagtgtaagtttttatttaatgttactactttatgtggagaagaaaatggtgagcaaataattttaaaaaatactaagaaagtcgactagtatatgttatgttaatttttctttcttatagttatagtgttggacctcttgaatagatgaagtataatatgttaaattaacttataatttgaatagatagagtataatttattcttaatgcattgaacatttgactcctctattaagttaaatttagctcaaattatactttagattattctaggcaataaattaacaagcctaagtaacctatttaatttaggtcacatgctttatcacaattaaaaattattttgacataatcaatattcatagaatcattaccaacaatttacaaccctaaactattaggtgaataacaattttaaaataacaatcaatcactatagtatcatattaagtggtcattcaaataagaacaagacaataatcataaattttaaatccaattactaattagattggattggatcgaattttaaagtgatcagatgatgatttttttaaatttaattactaattgaattggatcaaataaagaaaaaaataatcaacattgcatcaaacacacaatatcaattttcctagcaatgttttccattctctttcttactagttactcctcaaaccctatagatatcacttagaagatttatgagaagtcttctctaaaatctgaaaacttgtaaatgagaatattcttttttatttttttttttgagtgtagtctgtaatggtattctacaatcaattaatagtttaaaggtcttaagttcgaacccatgacctttccctcttttccatccgtccctcatcaataagttaactttagtggattcttctacagaccttcagtttacaagactgacgctatgggccttgtttgtaaatgaaaaaattgagtctcaacaaaatgtgaaaatggcccattcactttttatttatttcgaatttaacattgaaatattgatacatgtattggtgggaaaaataaataaaataaaaatggtacagaactttaaactttttaaaaagatactattactaaacaagggtaaaaaacaaaacgaaagctaaaaagtagaggagatcctatcctccaaaaacgagactttcaaacatcactatcccattcattaatggacaaggacaaagggtggattcagtttcaatactaggaatggcccacacatgtgatgtccagctttataaaccaaaaaagcccaacccaaaaatattcaaaacacattctggcttttacccaaaaacgacaaacatccaatttaatccaatcaaactgaatcatcatctttacagaaataccataacaaagtttgtcctaaaaaccattcactcactcaatctatcttatgatgttgttcactcacaatagaatcattccaagagcattcatgaataaaatctacacataaaaatttataatggttcctaagaataaagtgaaatgattgtcagatgactcagatcctttgttttcttcaggaaatggttttttttcactgtagcccccacccacaggtgttgtttttacccaaaaaaaaatgttaataaaatgacataaaagaattatgcaaaagataacgtatgccgcgggctggctggcacatgcacaaagctgaaaaatcatcaaaccaagtcttcaaattaaattattaattgctcactaaacaagttctcgaacataacaaaataggagacaaaattcaagtctcatgtactcaacttcgtaaaaaagcttaattttatctaaacgaaacgaaaaatttataacaaagctcaatctattattgggttgctacaaacacaaaacacactctgccctaaacccaatctgtaattaaaacaaagctcacaacttttttagtccacttgaaaaagtagcccccaaaaataaaagggttattaagtaacaacaacaagttaaaaaaggtgacacaatttttatgacactcttcactcattttcaatatcattattgtataaacttttaagctcttaatataaagtgaatatatatatcttcttgatacaaaaccattttatgtatacagatgaaatatgatatatgatcctcaacaagaagatgcacataaacagagaaactttccctctttactcgaatagcccatgaatcaataccaacaacaataactttttctttatataaattaattaattgattaatgaacttgatcaaagcactaattttatagattaactcactcaaattt

SEQ ID NO: 29782 - DNA, 1677 bp, Cannabis sativa
atttcctaaactcttctgtcacaccgttgaagctttcagcagtgttgtttgtcattatgttgtaccgatcacccaaccaataaggtcgagcccacttcttaaatcctatactctctacatatgcaacattggaaaatttcatctgtctaagcttcttaaattatctatcacaatcagtcttcgaccatgagtaagctacattctatacctcattgtgaaaaacaacagtcttgaacttagaattcatgttcataataatgtggtgatagcatgcatagtgggctacttcagggaacacaagctatacaacacagtcaatgctttgatgcatgcctatcaaacacaaacactaagttctcaaccacccctattgcttccctcaacttttgtaagaaatagatccaagagtcattgttctcactgtcaatgataccaaaagcaataagaaacaattggttatttacattgtatgctacgacaactaacattatatctccatacttcggcttttagaatgtgccatcgataataacaaccaatgacaaaaagtaaatcccctcctacatgcaccaagtgataaaaaacaatatttgaattgttcatcctctacatacagatcaaaaatggtacctggattcttatgtagcagcttgtacaagtatccgagtaacttcatataggataattttggcattcccctaacataggtaagtgccttttccctgcacctcctgccttcacataactaatctagataccatatgagtcaaatatgtctttctgtatgtcttaaacattgtacttagttccatcttgggtgtactttcccttaataaggtgggcaaccactcacggttttggttgacagcgatttgaatatctcgcatttaggttacatgtgtgttcattgtgaaatacagtaatctttaaagttttcagaacacatcttcttcttccctctcaaatctccatttgcaatatggatacttgcatgtaacgtacaacacatcgatgtctgacttcttcaccatccattcaaaattgttattaattataaacctagcaactagttgtcttgattcttcatattatttttgtacaaattgccaagttgtatctcccctgattccttactttgtgaaaaaagtagtaagttaatgactttctgttatatcttcctttgcccacataggagcgttgaacttggtacaaacttcaaataatgagaacgttgagaacggtgcatgacaaggaggaacatgttcttttgatctgccttgttgactactactagttccaggtgtattatgatttttattacaggattgtcattctcgttgtgtaccacggttgctcggtgaatactctaaccttaaggaagatacctctatgacttcatccactcccaaatcatattcgtaatccatattcaaatctacaatataatcattattgtagaagggagcatcgaactcctaaaactaaccaaatcctgtagcttcttgctctacattggtaagaaccttctcattaacaccaatctgttttaaagcaaaaaccatgacaaaataaggagttttgaataagaaatctagttcaaaatacatattattacaactaatagcagagtacgttttaaatacaggctttgcatgttgctctattatggtccgaact

SEQ ID NO: 29783 - DNA, 3336 bp, Cannabis sativa
ctcttttgggttttcaatttcagaagcttcttcttcacttcagtatacccatattaatggaggaaggagccctttcgaaaccactggcggcggtggcttgcgccgcaatggccttatcctacgtcgccatcctctatgctcccactttagtccttcgtcttccgcctccgccgctctacaaagacttcatgatccgacggttcatatgtgccgctacttcatctcttgtatctgtcgtcttctgctatctaattcttcccgtaagcttctctactgtatttcatgttttcacttctttgccattaattttgaggtgggaaaattgtgtcttaaaagctttagatttcaagctcttttgcttactatttttgttatctatgatgggattcttttgaaatatctattatttttagaattacgcttacatttttctcactgtgtaaagccagatgagaagcagggaaatctcatattttcttggcgttctgggcattcgaatggatcatattgtgagtatctcattgcccatttttatcattctttatgattcaaggaattttcaaattggaacactctttttcgtgataggggtagtcttgttattgtagtattatgtcacttgaagagtgtaattgcttgctaaaattgaaattttgtgtttgtgaaacagtggcaagctgtggtgtttcctctctcattgacttgtttaatgtatgctggatcattggtcctcaagactctgttattgatagattcctttagtagatacgcgaattctagtggggatacttcctttggatgtatcaaatatgccctgaaaagtcttcttgattggggactctcgattacttccaatattttggcttggcgcaattatgttgtggtaagtgtatgtatatagtatatcattttaagtagctaaactataatggttaaatgtttaagcgcggagaatttcaattactttgatatcacaaatagatattctaaagctgcttactttattgttattttttaaaaaaaaaaaaaaattatgtatatttgtatgcataaatatatttcttcacttcaaataataaatgtaattttaggttaaaactctagagctgtattgttgatcctttgggcgattgaaatcaatttcatgggatttatcttaggagatacacctggttatacaagtatgatttactgtaatagcatatgtatgagaaactcagtaattttatacattttctgatattttataaaataagatgaagagtcttgcctgtcttctttttctgaaagtgaaaatcctaaatttcatcagtcttaacttgacttattttttgaaatagtaaccaatcaacaaatttatgagtctaccctgaatgttctatgattatattcatattttgtttttgtaaagattgaacctttaagagtagcttcctttgtatcaaatcttgttattactttatgaacaggctccacttacagaagagctggtgtttagagcatgtatggttccgttgcttctttgtggaggtttcaaaataagcagtgtcatatttctctgccctgttttcttcagcttgggtgagttagtgtcataatttagctgctgctacgatttatagtactttaagcactaacacatcaaaatttacaatagcacagtgaattttgagttttcacctgtttatttacacagagtcttcaggccttaccaactattggttaaagttgtatagatgatgagcaagaatgtctgactcgatacccttcacttacattgatatgtgtattatatatgcattgatttgcttctatagtttgagcaagtttggcttaaaggcactcattttcttctttgtaattacatgttgcaatgagtgaaaaactgaaacaaattcaataggtgtacttattttcattcatagattttcttgaaaaagttatatattacaagtcttagctttagtttatatggcattagattgcctaaaatgcaatccatgttgtcctctctttattacactgcttttgactttttaataatatagtcctgctatgtcattaatatcttccctcttttattgcagctcatttaaaccatttcatggaggtctacagcaagcaaaactataacttcattaaatcttccttggctgtaggtacaatcctttcacttcctgccctcagtgaatgcttattttttattttagcttagaggatgggttgcaattcaagatagaaaggaatttaagttttgaaataaaattaaataaaacggccttttacttctctctctcttatttgtttgtttcattctttttgggatcttatgtctcaaaatgcttgtgtctagtgacacttgatgatagctcaagtggttggatgggttagaatctgaagttcaagtctttgcagccacatcttataataatgattcaacaaaaacgtactcatgtctgacagaccgagcttcttattgcaggttttcagctgggctacacccttatctttggttcatacgcctcttttctcttcattcgtacgggtaagtgaagtggcatacctaatgtttgttcatcatcacaagtgtggacttttgtagcctatcaattatttgttgacgaggagaaagaaactaaatgtgattagcttgtttcataaagaaacagagtagttgagttaattactgctgtacaaaggttgatgactatattaatataattaagattgttttggtggctcaagaggagtgatgaaatgattaggcctgcagtttggtctcagaatgcctaagcttcaagttcctctttggcacatatatagcaattactgcagtttacttcaaaagaaatactgcaggcagctagtttgaacatgggtctgataagtgatttctgggcttaaaaactattgcttgtcttgtttcatctatgcagggaatcttctggcgcctttagtagctcacgtatgctgcaatattatgggattgccagtgcttttctcaagaagcaaaggtatgactaggaaagtcatttggaacctttgcttacatggctagctaatgaataaccattctctattggttatctatttccgcgactttgtttctgatcatatgcatttgcacatttcttcttcctgctcgacggggtggtacttaacatagaatgtttaattctttcggttctgatttttcaattatttgtttcattactttttcaggcatagtcagtgcggcatttctagccggaatggttggtttcttgtggcttctttttcccatgactcacccggatttgtacaatgatagaacaaataattgcaaatgttggcacg

SEQ ID NO: 29784 - DNA, 1472 bp, Cannabis sativa
tgattggtggcaggtaatttcctcaaattccaaacatcatttgattactatggaatatagttatccattaatttcttttatactaattgggtaatcatcagatacaaaacgtgttgataccagatacatcagacccccatggctactggcagaaatgcagacaaagcattctcaagtgcaatcctaggcagattgaaatactacatggtaatagctgaaccaagtcacattgttgtagggatttctaataaattttatatgaaactgatgcaggtgtgtaagtcatgcacttacatgcaagcaattttctgaaacaagtgaatgattcgaatacataatagttgccttaccagaaaaaaaaaatacatataatagttacagatcctgtggaaacataaaaatatatgaataaaagttcagaggttcatacataaaattcggtccacttcctggaggtatttttcctaatactccattagaaccctcatctagagtcagttgctgaagtctcatttgattattttagaattctcaagtcctttattacatctggaaaaacaggaatttgtgtgtgcttggaacaacttgtattgctgttagtacccttagtagagaaattaaaaatgttgttaagtttagggtgttgggttctttttgtaaaaatggaaaaggtaattatgtaaacaatatcatagagagttggtgagtggtttgtttggtgttgagcagcagtttttctgctgtcgtcttgtttgtagcttgtttggcaatgtatgtggtttactgtaattgacatattccatgtaggtttcagaaattcacttttgaagggcctgagtgatttccagaaaaataaggatggtggaatgtttataaattcttgttttgctcactgccagacatggttgactgagacatggcattcacctaattctcctagattaaacaataaggtgaggaaagtttgtttgagccttatctgttctatgaaaatctgatgaaacttcttgtgttggattcttgttaagcatttctaatatgcaattgaatttatcaatgtggaacagagtattgcggaatctgttggtgattggtacttcaacaagagagtggttaaacaagttgattgtccatatccatgtgatcccacctgcattcatgtcgacttctcacagacttaagtaatctacatgggatcttgtcttccttttttttttcttttttcttttttctttttttgagagagacagagagaaaaatgttcctatgtggtgttgatatagtgtcttgtccattttttactttgtcaacgtacattattgtgtagaccctatttgactcgacagacattagttggataaaacatataggctatattgaggcataaatatctaatgttttagattttatacactgaaatacttaatgtttatttttgtaggtaaaaatacttaatgttacaattctcttac

SEQ ID NO: 29785 - DNA, 3009 bp, Cannabis sativa
  modified_base (2919)..(2923): a, c, t, g, unknown or other
  modified_base (2977)..(2980): a, c, t, g, unknown or other
ttaatcttaaatggttaagtgcaaataataaaacgataactgagagggtttagccgctaaaaaagatttaggagtttgcagtaaaatttaaaaaaaaaaaactaggagatcaaatgaagtcccaacaactcatgccgatacttatggccgaatataattaaagtgtgtttggaaagccataaaaaaaattagatttaggtgtaatttaaggtaattacactataagtgtgtaattgaaggtaattgagaaatttatactccttaattcacatgacccataaaaattaaaacttatcattttaaatattaactactattttttgtgtgtaattactatatttattaaacaagtgattagaaatgctcctggtctcttatacattacaaaaaaatcttacttttagtcacaacaaaatttgtgagtaaaaataaaaaaattatgactaattataaatcattattcctatattgtaactaaaaagtccgtgactaaaagtattagttacaaaaatcatcattctcatgttgtgactaaaaagtctgtggctaaaagtatttaaatactatattttaattacgagtaattttttattataactaaaagtcatacgtagtcacaaaaaaaatatattataattaaaaaattatcaataaaaataacaattttttattttttattttttattttgttttctttgtaataaagagagattatatttctactataagtttctagaatgaactatatacacacatgcatttatataataggacaagaaactattttgtcacagactttctatatatatatctcatatatggacttctaataatatatatatacaatataacttcttcttcttcttctcttctattataataattttcataaatatatataaaaatggaagaaaataaatcagaagagataaagcttggagggtcactaccagtgcctctggttcaagagctagccaaagaaatttataataataataagaaaatagttccacaaagataccaacgtccagatcaagatcatgccattgtaattaatacttcttcttcttcaaataatattccaattattcacttcaacaacttgttttcttctcataaattcactatggaatcagaactccaaaagcttcacttagcttccaaacactggggttttttccaggtaataatatacatatacatatacaattaacataattatatttaattatgtattctcacttttagtagttattaattgtagagtaagaaattaaattaatttaattatcgattattaggtcggtaaaatgggtcagacatcgtaacataactccaaatgaaatgataatgttaagtttttagtttgagttgtaatcgagttgacatgattaacccgtttattaataaacaacaaatcattttggggttaattcaaaagaacacgattaacaactatttaaaagtatatatttttatatttataacatataaagtgtcttatgttagttaaatagaacttagataccttaaattgctcttatatttgttaaaattaaattcatgataataagttagtaaattaaccattaattaagtatagttttttatataaacattgttaaattggtcggattaggtcaacttgtttatagggtctgggtttaggttatactttttgatacgattaatacattagttagatataagtttgagagttgtttgtaacagttaatcttgacacgataatagcacgaattgccactcttatctactaacaggttcaaccttgagctaaggcgacctaggtccgtgcctagagtttacccaaatccagagcttaaaatttttatgtagtatattttttatgcactgaaaaaaataatattttttataaaattttgtaaaataggcccaataatactcacactccaccttagatataacactcaaaataatttttttgtgcccattattaatcagggtcggacctatctattaacacttaatatatatatggtttaacaccatatactgaaatttctaaattttttactttcttattgtagggtagaatttttttcaaaaatattgtgtaagttttatattgtgtactatgttaagttttcacagttgttttacggttattttttagttgctcaactgttgttttaattattctattttgtttttttactgttattttataaaaagacagtattttttgtaaaaaattgcttgtgacagtaaaattataaacttttgctcaaaatccaatttttatgtaaaaatctctatatataaatgtcttccttatgatggttttgagatcaaataccacaaaacacaatagggtgtccaagagcttgtatcaaaatattggtgtaaaataacttatgagtgttgtttgaatgtcataattaattaatcaaaatttgatttgagttattagatcacattattcttttgattattatgaattaatattaattaattaattttataaatatttcagttggtggatcatggagtgagccctttactaatggagaatgtaaaatcaagaattaaagaatttttcaatatgccaatagaagagaaaaataagtttaggcaacaaagtggggagttggagggattagggcaagcttttgtagtgtgtgaagagcaaaagcttgaatgggcagatatgttctatattgtcactcaaccaaatcacttgagaaaatctcatttgttacccaaattacctctccctttcaggtatacctaaaccctaattcaattattaattttattgacttaactttcaatataaatatattatttttcaatgatttgaaatcgatatttacaacccatgaaacagctacatttagtgacaattttttggctacaacataaattttttgtgattannnnngacttttaatcacaacaaaaaattatttatgattaaaatatagtatttagatannnnttgtcactaatttaattttagtcagaaca

SEQ ID NO: 29786 - DNA, 2837 bp, Cannabis sativa
ccaccgatactatccaagccaatgcttggagaagtattgtcaatctacctagcagtatctgaatacgcgattagcttggtgttaattcaagaccaaggtagacaacacccagtgtattatgtaagcaaatgcttactagacgctgaaacttgttatccacaaatggaacgactgacatttgcactagtggtagcttctcaaaagttgcgaccatattttcaagcacgcattattgaagtactaacaaactatcccttatgacaagtattgtccaaacctgaagcataaggatgactgctcaaatggtcgactgaattaagccaatttgacataagataaaaaccacgatcgactatcaaaggctaggcccttaccgatttcattcttgaatttccaaatgacgaggttgctattatcacagaagaatgagttgatcctgaggtaccatcgggagaaggatggactttgtatgttgatggcacatcaaatagtgaaggttcaggcagtggaatcttattaataagtcctaacaaatttaaagtacacaatgctttaaggtttgaattccctgcctcgaacaacaaagctgaatacgaagctctaatagtaggattaaagcttgctctggagatgaaaaggcgtttggccagaagaacttccacaagttttatggtcgtacaatacaactccttgctcaacaactggtgaaacccccttttcaatctcttatgggttcaaagccatggttccaatcgaggtaggagctagatcgctaaaaagaggtgttttcaacatcgaaaccaatacagaaaattagctgctacaactcagtttgttagaagaaaagcacgcttaggcccagattaaaaatgcagcctattaacaacgcacatctcgctattttaaattgaaagttaaagaaagaagtctacaagtaggagatcaagtattgcaaaaagtcatgcccaatacacacaattctatgcatggcttattcagcgataattgggaaggtccttacctcatcgctaaaaaaattagcaacacaacttaccgattatctgatcttaatcactcagtcttcgatagagcttggaatggagaacatttaaagtactactatcaatagtacccgcatgtatatacttagttaatttatttcataaatatcctaagtataggaggtataaccatatattgtagtattgattatctaatgaattttcaaagtacaatttttgaagttttttatattcttcgcatgtttatacttagaaaatttttagaaatttttattcatgattacaaacatttaaatgttcatcactccatgctgtgagaagtaattcaagggtgagcaaaatagccttgggaagataccatggatttgctgtcgcgcacctctagggtaaccaattctgctacttcttcaaccatcctgtctatctcatccatggacagcgagccccctatagccctggctatagggggtgtcatcctcagacagtgaggttggtatgaagttgtcgctcttttctgactcatctacgaaggcccccactcttgagtcgtacatttggctgtttgataagttactcatctaaaagacagaagatctttttagtgtggtgcgagtgcgattttaacaagtaaagtgttctcacccgagttataaaatacaaagtaaaagttcatagaacttgtcgtatatctctgaagtggctgggtgtttcccagtatcctaagggtcacgtcgctacatgaacattaagtaacggggagacacgcaccacttcaagaatctagtcagtactgacaatgaataaaatgtaagaaaaatggaaactaactgcatgcctcaagaaatggctgggggtgccacagtatcccaggggacatgcgacgattacatggacattaagttaatgtgacacacccatcattttgagaacttagatagtttgcacatcaaaataacctaaggctaaagatggcctaagagttaaaactctaaaaaatatggtcaaaaaggatagctctgggataagtattatatgcaaatactcgaggtgtttctcaagaaacttgcaaaaatttgaggtgttcatcttgaaactcgcaaatattcgaggagttcctcttgaaacacgcaacaattcaagtttcaggcacgtatttgccagaaaaataccatatttgcctaaactatagaaagcaattcgtacgtcctatcatttcatacattttctacccctaaaatcacagaatacatataaatactcaagggaaagaaagtgattataggaaaaataaattactaacctcgaaatgcaattcttcctaagtgatcttgcaagtgatgaaacctttggaatcgttctttgtaggaaagaattttgaaaaatcaagaagaattttgaaggtttaaaattcagagtgaagaggggagaaagatgaaaatgggagggaaatgagtaaaaaccatttcgtattacggggtttaaatactagtatccctcatttattgggatggagacatgtggaaaaggaatgcctaaggtctcccaatccaacggtcttcattggcaagagattgtatgattctttagcatttctatgtagctaactttgtgctcattctctactacgccatgccttcatgtaattcatctttattccgtatttgtctttcatttctccctttatatctgcaggactgactttgtttttaggttcaagaactttaattttacaaaatcttctatcaactttgcagttgcttgtcgtagatctccaaatcttattggaactccacatgtgtgttcttcttgataact

SEQ ID NO: 29787 - DNA, 2221 bp, Cannabis sativa
  modified_base (1663)..(1669): a, c, t, g, unknown or other
  modified_base (1758)..(1763): a, c, t, g, unknown or other
tttgagctgagaaatacaattactctgttttcaatctagggtctggggtttgggtccggatttgggtttagggtgtggggtccagtgtcgaggtccgagtctaaggtccgggtctggggttcatgtccagggtctggtgtccgagtctaggtccaagtttgggtttggtgtccgggcctgggttcggtgtctaggtccaggtcctgggtcggggtctaggttcgggtcgggcctggggtaggatgggctcatgtcatggtatggtgtagaatattaatttcttttagtaagaaacaatttaaaaatagttttaaaaaacttgtgccaaagaccattaaatttttaaaatgacaaaaaattattttctattctgacttttgaacacaattctgaaaactgaaaatacaatcaaataacctctaaatgttgttggaggattttaatagtaacacaaaataatacgagcacaatttattatgaattgaatagaggtttgaagaagtatttaggggctgtttagaatggattaatgtgaggggaggagaggtaatctcaataattatcctgtttgttatgtagttttatattttttaagtcatttaatatttttactgtagtatttcaactactctaaaaaggtataatgttaatcccttaaaaaaatgtgaaatttaaacattacataagttatttaaatgtttgatgaaaaattttattaaataaaacaaaatattttattttaaaagaaaaaatatgatgtttataaaaaaaaaagtcatataatatttatttatgcttattcttactataataattttacataaataaatataaaaatactatatagaaaaatgtatgtaaaccattattcattttagttaatcacaaatataataaaattaaatttattaattaataaatatatatttttttttataaacaataattttattttatttataattaacttaaaagatatataataatagtttttattttattttattattctaaaataatatataagattcttgtgctcaaccaaatattataatttagttaacagtaatcaaattaaatattaccattgataaccaaacacaataataagttttgagattatcatattccccttcataatattccttttaattagattattttgaaccccttatactaaacgttctcttaaagtaaaatatgtgaattacctcgacaactatttctaatagagctccgaggaagtactcaagtgaaaaaatgttaattaaatatatgtacttcatagtgattttaggtccgaggcagagctgtggtaatttttctttttttttttgtttaatctctataagtgcgttattatgtaacatttagaaaaaaaaaataacaaaatcaaaatctggcactaagtttagttctagtctgggatttgatatggggtcggagtttggtccgggctagggtcttggccaaaggttgaagtccaagttcaggttgaggtctaattgcggggtcaaaatctaaaagggtaaataccattgtggaccctgtgctctgcacaagttaccaattggactctctgttttgttaaatgacaaaatggaccttataatttccaaaatggtaaaaaaaggacccgaactcaattttcaacaattttatnnnnnnntataaccaactttaagacaatttttaacacaaataaatacagaaaatgtaaccagttttatcataatatctctagatcaaattattatnnnnnnttattttgacaaaaaaatcagttcagagtcttattgtataattttagaaaatacaaagtctattttatcatttaacaaacgaatagtccaattaatgatatttgcaaaacacaaggtacaaaaaagtatttactcaatccaaatattgatgagaaagcataaaaatggacttttagttttaaattgattttaaaagtatttttttttctaatatttttattttttttaattaataaaataaaaactatttaagtaatggttacattacataacataaatttctcacatcatgcatcctctgatggaaaatatgtataattatacctcacaagaattggactatttttaaagtaatattaaaggtaggggtgttcattggatcacatctaatgtttttaggcttatccagatttgatcaaatcatatattagatgttagattttaccatccgatccaat

SEQ ID NO: 29788 - DNA, 1570 bp, Cannabis sativa
  modified_base (26)..(34): a, c, t, g, unknown or other
  modified_base (61)..(69): a, c, t, g, unknown or other
  modified_base (99)..(107): a, c, t, g, unknown or other
  modified_base (135)..(143): a, c, t, g, unknown or other
aagttcttatttaggatgttaataannnnnnnnntttaggatgttaataaacatacttttnnnnnnnnntaggatgttaataaacatacttttgagtannnnnnnnnttaataaacatacttttgagtagatctnnnnnnnnngtaaaataaattccaacaaaggcaacaaccaaaatgattcttcgaggaagccaaggaaggaatatgaacccaaatacactgagtatatcagtttagtagacacatgggagaatgtctatagagcaacctacaatatggtccactacagaatacctttgtgaatgtcccatagagggagaaataagcaagatcagaacaaggagtgtgaataccacgacaaaaaaggccacaccactaatgaatgcgattatatgaaggatggaattgagactttgatcagagcacatgatccctacaccataaatcctctgtaggggtagctcattctgaagctcctagatcacaattgcctatacgccctgctcggccagcaccagttagagtagtgttactcgctctaagacccgaaaccctatatcccctagaactcgctccgccttcagtagatggatatgtggccacaatctcaagtggaccacaccttgtcaaaagtacaaggaatttacaaaagagatatttaagagaagtataagaagaaggggaaatgtgtgcgttggcgcagtctccaatccaacgtcctagaataatgaacatacccatcaccttcatgagagataatgctaagaatgtacgattcccccataatgatcccttggtaatagaagctcaaattgccaataaaatagtatcccgagtcctagtgtataatggaagctcagtaaatattctcttcaagtttacgttctaggcgattggactcacgaaacctgatctaactacaaagtttcaacagagatgccttaatgtctatgggaaaaatccaactgtcaatcaccatcaaagaagaaaacgatgcaagtacttttaagcactccacttttatggtggtggattgcccaacaacatacaatgcgatactgggacgtcccctcctagttgattttggggcagtaacattgatcaggcacatgtgcatgaagttctcctgcgataatggatctattggcccagttaagggtgataaaaaaagtgcaagcaattgctacaatgtctcgacacagactttgttcatggtctgagaaaaggaacccattgctccataaatggagactcaaatggaaattgaagtcattcaagaggattttgaagacaaattagatcccagagttgggacaaaaagaacataagaaccaatggaggaggtggaagaggaaagcatcagcgatgtggaccccatagaaaccatcgaagtgggaaaaaacctaccttcgtttgtaaaagagaatattgtaaacataattatgaagaacctggatgtgctagcatggagccattcagacgtgatgggaattgatcataatgcgattttccatgccttgaacattcaagaagatacgacgccagtttcccaaaaacaaaggccctta

SEQ ID NO: 29789 - DNA, 2849 bp, Cannabis sativa
aaatttggtacataaagtacattgtcaagatatagatttggtaagacatgtattattcctaagcaaataactttggcattggctacattgtcaagatatagatttcgtaagacatgtattgtgcctaagcaaataactttggcattggctctatttggcaacttaacagttgtgatagaaggatcaaaatacttatcttgaaataaagtaatgtcataacaaacatggtgtgtagcacctgtgtcaatgatccaaccagatttaggcatttttataatcttaccagagaatcgagagaccataggaggttcagtaagggaaagtggcatctctggaaccctctgggacaacaatgccattaacctttaacactgcacagatgatagactagaaaccaggtcttgatctctaacaataactttagtattcataccaatacttctttttgattaaacagtagcattagctgcactaggtttatgaccatgattgtttcttgaagaattggcatttctatttgggaactttccatgaagcttgtgtccaagagggtaaccatgtatgcaaaagcaccttgttatggtgtggccagtacgtaataccacaatgagtgcacactaaattcaattgatgtggctgcacagctccaacaaattgaccatggttggatccaaatccaattttatcactttcagtggaaacattcgacaaacatctttgactctcttcttgtatgatagcagcataggctttgttgatgttaaggatgggatcttgcataaagatctgagatctagctccattatacaattcattaagaccaaccaaaaattcaagaacccgatcttcattttggtaatcttgaattatcttcatagcaccacaagtacaaataggttgtggtctatattcttgaatcaaatcccacagagatttgagtcaagtgaaatatgtggttatactattgaaccttgaacaagagattgtttggttcgaatggcttcaaaagcacgagtatcatttttttggttaaacctttctttaagattagactagatcgtagtagaattatccatatacatgatgctttcagctatttcatttgatatagcatgaagaatccaagaaatgacagtgttgttgcatcaattccacaattcaaattcatcattgtcttcttcaggtgaagagagcttgccattgacaaatttgaacttgttcctcgtgattaaagccacttgcataacttgacgccatgagctgaagttttctcaattagctaagatctttggaacctagctggctctaggatgatcactgctagaaagaaaataaggatttcgagcatcatcaaaaaatgatcgagtctttgattttaaaatagagaaacaattggacgtgtttgaagtgttttgagtctgagctcctccacgtcaagccatggaggaaagaaataagaagaagagctacaaatgaacctgatgtgtcaccatattagattgagagaggagagaaataatgaaagaaaatactctattttcattaatgaatcgttaaatgtacagagtacaataagaaagttataaatagcttatagatacaagatacaatttggttactattaccagaaactaacaactaatatctacacctaacaacttgcctaactgattctaattaattaactcagtttagcttctcaacttgatacagttctcggttggtacccatgtgacacactccattgtacgtgggggtgacctagcttagaaggtcttgatgaacattcattggcatagttggagctctcatggttatgcctaagaaagagtcaccagataattctctcttctcgacccttttttcaatcccagaaaaaagaaaaagatgaacatgatgagttgaataaaaaacaataaggtggtgtttgactttataatttaaaaattgtatttgttttttaaagacagtaaacaatttttaaaaataaataaagggcattttgtcaaattttctaaaaataatttttcaaaaactgagttaaaaaaaaactaaaatttagaaaatatcaaaacactgttttctattttcattttttttcttattttttaacacatattattttttttttacattttctctctcaaaactgggtctacgtttgaggttgaggtccgaggtgtgggtcggggtcggagatttaggtttagatctaggtcaaagatttgggttcgtgtttgactccaagtttgggtctggggtttggagtctggctctaggttcgagtagaggtttgggtctagggctaggtccagatctttggtatggggtttggggtggggttggtttcatgttgtttggattttataccctaaataaaacttatttcaatataatcttatttactatcaataaaatattagaagtcatttaagtttacgtgtaatatttatgtttatggttttaatataaaatttcttttaaatccaaaacatatagttattcataaatacagtgacgtcatcacattgaaaagtaattgtgattatatgcttcaaagtttttagtcccatgatttatcagtgcattggatttacattgacataataattaacgataaagtttacttacacaatgatatgtggaatgtcatttctagggcattagcaaagtatattgttggatgtattggctatacatcagactggactaatattgacagtgacaaagatatcataaacttactattatatattttctaagttaatctcacttagttgatcttagctcaaaggatcttaatcttgagatggttaggttctgacttaactgtattacttgtgttcttt

SEQ ID NO: 29790 - DNA, 2706 bp, Cannabis sativa
agcaattcatttctctcagggagtgtctagaaggaaatcccaagccatttcgcaactactgggcatgaaacaaatggggaggaatgcaacctacttaggattacctctctttaagtcacccaagaaaacaaatgacaccgaggagatcattgacaagacccttaaacgagttcaaggttggaaggcccgactactatctagtgccgggaaaacatgcttagtgaaatcagtgggttcaactatctccaattacgtagcctcctctgatgttatacctgtgtcggtggccaataaaatagataagatcctaagagacatctggtggggtgacacggaggagagatgtaaactacacacggtggcttgggaaaagctttgtagcccaaaagtggtgggaggcctgggtttctgatcaactgaggcaatgaataaagcctaccttatgaaatgggcctggagaatcctaaatcaagaagactgtctctggggacgaattataaatggaaagtatatcaaaaatgagaatttcatggaggtggaagcaaaatcctcagactcggttctatggaaagcaattctcaaaacaagacccctcctttggaagggggtgtgccgaaaaataggagatgggaactctacctctatctggtttgacccttgggtccctggtgaagtcactcaaccagcccccactcgaaatgccacggatggcattagtctagttagcaacttcatcagaaataaccaatggaatagagccttaattagaagctggttctgcaatgaagatgcaaaaagaatcctgaacatatcccttcctaattcacccaaggaagatgggtggctttggatgcctgaaccaaatggcatgttttctgtcaagtcggcctaccgtataattaaaaacgtgcaagagaggaaagacacagatgaaaagtggcgaatagtgtggggagccaagatccataaccgtcaaaaattgctctggtggaaaattttgtctcacagccttctcacaaaggaaaaacttgctcacatattccctggtatcgacaaaacatgcccactttgctctgcagcaccggaagactcactacacttattctgggattgcgattttcccaggggcatctggtttggatgcaattggcaaatgagaacatctaccgtaaatctcacgtcttgggacgagtggctgagatggttctctaacccccaacataggcatggtatacaacaattagactccttcttgggtggggcagccatcatatttgaaagcatatggagagtgaggaacaaactctgccatgaagggaactcaactccaatttacttgttgataaacgggattaaccaaagactcaaggaaattgagttgctgaattccaacttatctgcaacactccacgactcacaatggtttgctcctcccccaggatggataatttgtaattcagacatatctattggaaattctcaatctgcaggtgcgacaatattctacgatgaggacaataggattgtaaaaattgttacatttatatcaaactattgtgacccactccctggtgaactccatgctattagtaaaggagcggaatcagcagtttcattgggctacaagaatgtaatatttctcagtgattcggcggcagcgatcgacgcaattcggattgcacgttcagattgcaaaaagttacactacaatttgagagagctgatgccaagcttcctcagtgcaactggttcgttatgcaactgggagactcattggacttcccagagacataatggtgtggcccatgctttggccaaatgggcaaatcaaaataacaactttggtacctttgatttgtccgattttgatggttccctgcaatcttggattgcagatggctgtgtaggagacattcggctgtagtttgtttttcctttcagtagttttttatttttagttttcttaacagttagtttttttcccaggccttgttttgctgggtttttcggttgtttgtgtgttttccctgtttgttctgtttcgttctgcttgtttggctgttgccagtaatcaaaaaaaaaaaaatatgaaactattatataaatattcatttttaaaataaaaagaaaatatcaatataattttaagtttacagttcaacttcttgtattcaaatataattaaaataaatatataattacaaaattcaaattttaaatcaaacaccacatttaataaaaattaacttttgaaaaaattataaaaataatttaaaatagaaaaattttcatttttacactttgaatttctttatttacaaaaatacctcttcagtaaaaataataagccgtttttttatttgttttttagtttattttgttatattatagtcgttataaggttattttttttttgttgttttacaatttatttgtaattgatttatagttattgtaaggttgattttctggttgttttttagtttttttttgttaattttataattttaaaattttaaaactatatttttataaataaaaatttaattagtaaaattataaataaaacataaaaataaaataattttgaaaatttcgaaacatttaaagtatgataaatttatgttaaactataattttttcttctttttttgacaaaacgataattaaagagaaaattacatttactatgggattttaaaagtt

SEQ ID NO: 29791 - DNA, 992 bp, Cannabis sativa
ttgataattcttttcgtttaacaccacacactttaagaaaataaattatggaaaataaccgtaaaacaacactaaaaaaataaaaaaaaaataaaaaaataaatacaatatacttcagtatataacttataaaaatacctagtaaaaaagtaaattctgctgttagtattttttgtaaaagaatagcaaaaattaatatacaatgtatattaaacactaatcacgtggaagtgtctttgtgggctacaatatttatttcaggcccaaaaatactctatctgtccctaagttaattaggctagcatgataacgttgcaagcccaatccatcttcatttgattcgtttaagatgggctaagttctaagtcgagtgagagtagcatcattcaataatgccccttctaacagagccatgtcatagtcattcggctcaatcttcttgtctaccacagatcaagtgctcccagcctcagaaattgagatattcaacacccagtgggctcgtcgatcaaacggactccttcacaagctaatctttatgccccaactatcaacaacctaaaattgttcttcacaatatttgcatggctcttccttcaactcatagacgtggccactcttttcagcatagcatttgaagccgttttcccctcttgttaaagaaaaatgtattctataaatacttaacatatgtattgtgaaaagtcatcagttttagagtaagaaaacagttgtggcatgtttacttaaagggaatgagaatgaatggtatggtagtgattcccatacaattgtttactaaattttgaaaaaggagaaactagtgggaactacaccaattagggagaaaacaaagggaaatgttctctccatttttatagggaatgcattttcctttccttacttaatttattttaattttaattttattaattaaaaataaaacagacaaatataccccttaaaaatttataaacagaaaataattacat

SEQ ID NO: 29792 - DNA, 1594 bp, Cannabis sativa
tgacgaggtttaattcggagaaaactgtcagttttgtgccaccagatggtgaatttgaattgatgaagtaagcttattatacctttgaaaattccgttcgttccttttatgagctatttactgatttatatacagtcacactagcacaaaactgtgtttgtaccaagaaatttagtcactttcggaatttagtcctgattcagtataggtcacgatgccaaatatttttagacaactattatattctcatgaagaaaatgtatatataaatatatatatatatatatctgtatattgttagccaactacattgcttgtattggaatctgaaaaaaaaaaataacccataacatttagttgcttgccacagaggagaaaacaaatgaaaaatggatgaaaagtagaactttttatgggtttctcatggtatctgttgccgagtttactgttcacttgatggataattctatcatcttgaagatctttcacttagcatttattcatcagtgtcgtataaaatgtccttagagattctcctttttctgtcttatgttgcctaatctacaacattgcattatgtactttattttctttctaatttgacttgaaagttgtaccttgaaatcatctttcttattgcccagtatagcctttcttgccatagtacctcatcaacacttatataaactgatgttgcatgtgtatgaatgagtaaatgaataatgttacatttctacttaaagattaatgattgcatgagggagaagctgaactcgccctctcgtttactaaactgtagtaaaatacgcttgcagcagattcatgattataccaactataaaatagctgacagcattttgctatgctctcatctgcgtacgacctgaaattcttgtatcttttttatctctaaatttctaatgcttctactttcatctttgctcataggtaccgtattactgaaggtgtgaatcttccattccgagtgttgcctactatcaaggaacttggtagaacacgcatggaagtaaatgtcaaggtttgtaaattgtaaccttagatgtcatgtggtacacgttcttctctattattcttctattaacttgttttggtgacctgcaggtgaagagtgtctttggtgcaaaaatgtttgcccttggggttgtcattaaaatccccgtaccaaaacaaacagctaaaacgagttttcaagttacatctggtcgatgtaaatataatgcagctattgattgcttagtctggaagtgagtattttactacacccccatgttttatttgatttgttttgctgaagcaatagatagagagatcttaaatacccggtcatacctgcatttttgcttatcttccatgtactttcttctatttttgctttttcttcatctctatgtttggaactttttaggataagaaaatttcctgggcaaactgagccaacaatgagtgcagaggttgagctgatttcgacaatgacagaaaagaagtcctggaccaggccaccaattcagatggaattccaggtacttgttactagttcagtactatgcaaatggatagtgcttcttttttttct

SEQ ID NO: 29793 - DNA, 4554 bp, Cannabis sativa
gacatttgaattaaagcatacagtggagatatataatattaattatataattagagttaggatttttgtttgagactttcttttcattatatcgttaggataactttctatagattttataaatatgtataaaggaagagatagatatacattttttttatttagatatataggaagagctaaatacgtttttgggttgggatgatttattttttaaaataattacatttacaatgggattttaaaagttgtttacttaaatatggtatttttaagtttgaccaatttatataatatttttttgtttttaggtatttttatgctatttgatatgtcatatatatgtaaattaggtttttaaattccatatttaatgtatttatttatttatgcagttttatttgttactaatgctgaaaaagccactggagtttgctgccagtgtcggaaaaatcactagagtacctgcaggtgccgaaaaagttgttggagttgctgtcgatgcttgaaaagtcatcggaattggcattgtcaccagaaaaattactagaaaaatcaccaagaaactggcattatcaaccagtttcttgatgaagaaactactttattggtaatttttccgacaacaatgccgattccgatgacttttccgacacaagcagctactctagcgaatttttcggtaccgacagtaaacttcagaaaagttgtcggaattggcatagttgttggaaaaatcaactagaaactagtttaacaaaccagtttcttaatgaagaaaccagttttttggtgattttttcggtaatttttccaacaacaattctaattctgacgatatttctagcgccgggctgcaactccgacgacttttttgacaccgacaactactcctacgacttttttgatatcgatagcaaactttaaaaaagtcgtcagaattggcattgtcgctgaaaaaattatcaaaaaaattgccaagaaactggtttcttcggcaacactgccaattctaatgacttttttggcactgacagcaacttcagcgactttcttggcttcgatagctacttcggcaacttttttagcgccgacagtaaactccgacgccttttttggcaccagtgacaacaccggcgatcactgtagtttcatttgtcattgttgcaaggtacaaccatcaaggtacttagcacgtgaggcccacatgcctgccaacacccaaacatgtatctaaagtccccatccgtacagatgtttgtacagtgacttaggaggaaatattatcctaaagtttgcacaattgacgtggctcttacatgtgtcatgatttagccatctttttgacctggcaaaggatctctgggtagaaatatgcctgaaagatccatatatggaaggactgctataagttggcaatgatgtcccctgcagcatcttgtcggatgcttaacctaccggccaaataaaatgggaccatcttttaagagtgattgtacaagccaattcataaagaagacaagagccaagggatctgtcagatgacagacatgccatctagtgctagggacaccgggcagagatatgtgatcttttatttcgtcttcaacaagcttccacaaaaatttgcaattgaactctataaactcagatttaacaaatatatccgaaaataaaggagctttaccagatcgtaactacaccctaaaacatagggatacttattattctgtttactccttttacagagccatatgtaaaaactttctccttataaatagtgaaggtactcacaaggggaggggatcaaaaaaatgagagctatacttatacttacgcatctaaaagcactttattaagagatatcagtaaacactctgagagctgtagctaaaaatcaccttgtcttccttgtgatctgcccgatattatctcacaagtaatataactaaaggggagtaggtcattactcgtatacaagaggatcgaacctctatgaattatatgtttttttttatttaattattattctaacctcattacaagtgattaatcaatatttattagactccgagtcagttggttgtttttccagtcaacatgtatcaaaaagaacactttattaaaaaactctaagacttgatgattctcaaagttatttctgtgagagttctcttagtgcttagagataggaaaaataagcttttggactgaggtattataccttgttcaagttatactgatcctcactaatctacactcctgagtgagaatacttcacatctctttcatctatatatatatatatgtgttatattacatatgttataatctctcttcttctacctttatatatgtaatataatacctatttaattaatgagaattgctaaaaagcgtacttagcactctcttcgatgtcatattgctattggtatattaagtattaggtctcatataacttacaaaaataaatttcagagaatatcgctaactaatcgtagaacgccaccaataaaaggtgatgggcaccactgatgcccaataacaattctcttaattaatcttttagcccttatactatgagaattgctaaagtacactattggtgccgagcaccctgctactggtgtaattaagtatgaggtctcatataacttaacttaagaaaatacgttttaggaaatatcactaaccaattatggagtgccacctatagaagatgttgggcactgttgtggtattttcaacacacaagtatacgtagcgttaacaagtagtagactcaaaagccttctaggtcatttcttttctttgatttttgaactccctaagtgcttgttttaagatatataagtccacctctttttatagccaaaaaaaagataaaaggatatgaaaaatatcaatttttgaattttcaagggggtagaccgcgacactcaattcttatgctgcggcccgtgtgtacgaatgaataagacatttcccaagttttttgaaaacacaggccgaaacactagattttagtgccgatgcataacaaccctaaatttgggcagtgggctctttacgagtttctgcctcaacactaagatctagtgtcaaggcacaaccatgccttagtccaattcgacattctttgctaatttttagccttttaatgccctggcatgtgtttttagtgtttaggcgctcctccaaattttataatttcttcgtctcaagagcactaattgcaccgaaacttttggatttttttctcgaattaatttctaggtgctcttgccctgcgagttgatttatttgacattattctcaattttttttttcaatatttatccattttcttctatttcaaacctgcaaaataacaactaccaaaagcgtaaaattacacaaaataagagtaaaacttatttaaaaatacaccaaaattaacctaaaaatagtaccaataataaccaaacaaattctcccaaactaaacatttattcgtcctcaagtaaaacactaaaaatacacaacttaaacaagtcaatcaaccgaacatgagtgattttcaaataagacaaataacatggtcatgaacaaaaatttcacctatgtataataatataaaattttagtttaatcacacccttgactcactttaatttttcatataattcacaaaaccataaatagtacttaactaacaattaaaataatttatgcatgccaataacaactatcaatccaataatccaaattattccataaacttgtaaaacttactattctccactaatataaatcaacgcacaaccaagaatcaaaaaatctttttaggtttgtaatgttaggtttaagtacaggtagatgaaatggtcatttaggcttacctataccgtaagcttctcactcaaatcacaataattttttttcacaaacaatccctataccctcttttttcttattccatgagagaattttttttcgacaacatcgcaaaaattttatttttatttattttttattttcgaatttaacacttcttatcaattcttttttcttttcaagttgttgccaattaattttttcacattctctcaatttacactcttattcccacacacaataacaaacttaccattcaaattcttccaaattaaagatccacttatggtataattagggtcaaattttggatattaatgggtttattttgtttaggctaatgtgtagaaataaagaataaagttaagactcaaaaagggtaactaagataagaattacaaggatagcttaaaaggcataatcgatccaaaaaatgccgaaatcactttcttaatcatgcattatttattatttacctcaaatagcaagcaagaaagttctagaatttttcaaacaactttccatatttcacatttagcatacataaaccaattcaattgctagaaatttacatattatgattttatgttcttttaaagcacaaaattaaaattagtcaagaatgtcatatcaccaagcacactaatttttcgaaaaataaataaaattttcaaa

SEQ ID NO: 29794 - DNA, 3078 bp, Cannabis sativa
  modified_base (623)..(629): a, c, t, g, unknown or other
attcagccaattgttgtggcagaactcatggaaccaattgaaaagtcagatgtggatggttcgatgacgatgtttgttcattgatggagttttgaaatatttttgatctgttcatcataaaatatgttacttttttttgttcttttttataaaaaaataaataagtgattacttaaaattaattaacaaactgaatcgttttcgtgagaataggaaggtttgatttgaaatattttaaaagcattaaaaaataacaaaattggttaaaccaagaataaaaaaaaaaaattaaaaaagtcacccaataatttttcataaaccaagaattttgttatatagccacattttatatagaatagatatattccgtccgtgaaacaacattattttcatagactatattgataatgtctaacggtcgcactgcaaaaatatgactaatgtccagtggtagttgattttcttaacccgatcgatttgaatttttcatttaattattaatactatatgtttgtattttaatgcattgccatgtgtcatgagctgtcctttcaaacagcggaacatccatgcagtattttaattttcctaagccaaggtcaaccttccaaccattcgagtannnnnnngctcatttttcacgcgaccgtgtgcctcatgcacacttccgtttctcgaacaactcccccaagtcatgctcgcaaacattaatgagtgcatccatgtattgaggctctctagccaagatactcacattgtccatagattctcactatgataaggcaaatctcaacaccgtcgctcacctagtcacccgtgaccaaagtagcatgtgtggcaagatgccagcactaagccaacgtcccaacacttctaatcatgccacattcgatattgtttgaatagtctacctcattgcacaaggactcccatatgtatatggtctgatcctcaaggcaccatgcctccacgcatgttggcaggccctcgagagaagccatcaaactagtagtgtaacgccatgtccaacagggacgccacgtgtgtgcttttataaaattctcttttaataatttatataattataccaaaagtgtggttaattaaaattttgcaattaaaataaacgcataatatttataaaagataagtactaatctttacggagtcccctattaatacaaattatttacattcggttccaaaagtgttttacaaagtacgtttatacttcaaaatacaatcaaaacgatttatcctgtccaccgggccgtggcaccgcggctgatatgtacattacttctacgacctcaaactcatggctgctcaactttggtctcccctttacctgcaccatttagcacctgtgaatcacagagacttagcaagaaaagtgaataaatgtacaaacaatataacatttacttaatcatatcgatattaacatgcttaaacatttacacgatatcataatcacacaatcttagtacttcataaagtaccattaccactcattacccacgagctatatatatcactatcgttacctgatacagcaaacgataagtaagaaacctatctgcggtttcaagagtaattactcgtaacggtaatgaccgtttccaaccctcggtcataaccgaggcttagcaaacatttattcaggttctcgatcataatcgaggctataacacaattgttaatcacttaaccctaagtaatgcataacatttttcttacctcagttcagaactcaagtgtgcaggtcgacctaagtggaaacaaagctgggcgatcccggtcctatgtcacgacaaccaaaactcaataaatgccttaaaccaaaattccgaaaaacaaaaccctaatcctaaaaccaaacataacctatcctccaacaatcctaaaataggctataaaacacaaaaataacctaaaagaggtactaggtttcacctcgagccaaaacagatttcgaagaaaaactcgatattttccccctatagggcaaccggtcgaccgattttggtgcactagaaccaaccggtccaccgattctagcagtacagaaaatcaagagctttctcccccaaactcgaaccaaaaccaatccatacctgtccaaacattgcatagaagaatataatacaacaaattcaactcatcccaagcatcctttaatcacaatttaatcatttactcaaaattacatactcaagtaaaaattaaacttcatccaactcaaaacaagctaaacatcgcctatttctaatcaatccaactcaaacaaacttaaaaacaaacctagaagcttactctaaccttaactaacttcacagtccctgaaaaaaacctaaaaccctaaccaaaattgattcattaccactagaaaacaaggagaagagcaccaagaactcaccttaaaagtctagacagcaactaggattgattcctagcaagatttggattgaaatgaagtgaaattttctgcttccctttagcttcttctagggccgaaacagaggagagagagagagagagagagagaactaattgtgagatgaacttagtttctaggttaatcctttttattcctatttcctacaaaatgaattaattaaataaataacttataagttaatattacctcagccaaaattaagtaagacaaaattagaaacgctacccttaaaatgatatttttccccttataaagcccttaaacataaaaccaaacctaggggtattatggtaatttaactaaccaacaaaacagacatcttaaaattctaaactagtcctgaatacttccaatacaatccttcatttattttcgtaaaattttttaccactccgctgagcttccacggccgtcgggcccgaaaatattttattttaaaaatagtatctacggtacccaaataatctaatataatctccgtaattaataaattatgctttatttaatcatttattacattcacactaattaacctaagtaagatcataatcatacttcttaccagaataattttcatatttaataaaatgtgctcaattaaataccataatattttt

SEQ ID NO: 29795 - DNA, 3703 bp, Cannabis sativa
aataatggataattcatagcgtatgtatcttggatatatagagcattttatgtaatcgagagtgcaattttaaaactatagtggagtcagaaggaattaataagttaggaaatttatttggtaaatttcagatctgcttattaggagcttgatttaataattaatggtccccatattatttgagataatatcatcttgtagactcacttgattgatttaattagtcaattagaatttaaaaattaactgtcaaatttgaaaatttttactaactttgggcaatttctgagcagaaaagagaaataagcgtttatttattaattaaaatactttatgtgtttaattaataataatatttaaattgtatttttgtttgataattatttataattattaaattaaaaaattaatttttaaatagtttagatttaattaatggtaaaatttgaaaaagatatattgaattcattcaaacttgattaaaataaaatggtaaaattttaattatgaactctctatagtgaatacggccatgagaatattttatagggaatttttcatatatatacgtgattatataattatttataaaaataacaaaagtaatttttattggttacaacagaaatataaataatatactaattactcatattttttatattgtgtcattgtcagtcacttttgttgatatttttttttttttgtttcttttttattttctttctcttttgttattttaacataaatttattctttcttttcctttttaatatttatttttatcaagaagctttttctctctcttcatcttcgttcagctctcgagctggggctatggccaagacgagatctaaggggcaggggaagcatgctacattgattaagaagaagaagggaccagactcaagggccaatgtcaagaagatcaagacattggatgctattctcggagtagagccggtggtattctcggatgatgaggaaattgaggaaataggggattttggagcagagcaagttgttcagcttctagaaatttaggatcttttccaggagcctttgacgcctaggtcttcgcttcgttcgatcaagcaacaggaggacatccaaaaggattttagattgctgctgggatctaattgtgcgggttgcaactctgttcaaggtaacaatactatccctactgatctgcgatatggtagtattaagaaaaaccttgaaaaatcctttgctaatgagaatttaaaaactaaagtaaaaattatagatgatgatattaatgacgaagttgaattttggaagccctcaattgtatgttatgttcttggggctaatcctcctttgcaagtcttggaaggctttgctaggaggatgtggagggatgaagtggaaagagttgggatgcttttgtatgggattttcttgatcaagtttaatacaatggaggatagagatgatattctcaaagggggtacattgttttcaacaagaggctggttgtcatgaagccatgggatccggaggtaaatttcaagagagaggacattcgaatggtgcctatttgggtgcatttggatgatttggaactaaagtaccggggggaaagatctttgttcaagattattgggcaaattggaaaaccgatcaaggtagatgaggctaccaagagaagagataagctgagttttcctcgagttcttattgaggtttcactacatcaagagtatcctaaactcattgagtttgaagatgaaaaaggatgtaatacaactgtggcagtcacatatgagtggaagcctcttgtttgtagtcattgttctggtatgggacatcttgcggtggactgtaggaagaaagtaaagaggaaacaagaatggatagttaaggcaccaaagaaacaagacaaagaagaggttaaagtggatgttgagggatttcagcttgtaacaaggggctggaaaccgaaagaaacagagaaagaggcagcagcaggcaccagtaactcattccagattttgcaagaaatggagagtagggtgtgtgacaaggtgaatgagcaaggaagtgaggaagataacaaaggagggggggagtaccctctcttagagatggataaaataatgagttggaatgtccgagggatcaacaaccaacaaaaacaaaattcagtcaagcaattgattgaaacacaaagaattgggttggttggtctcctcgatacaagagttaaggctcagaaccttggagccttatacttacgtatataatctggatggtgttttacttccaatagtgcttggcacaaaggaagagaataattgttagttggaatctggggagttttacagttaatattttgcaagtttcaagccaattgattcatctttttgttgaaactatagataggaaagcaaagttttttgttacttttatctatggtttcaatacagatgaaggaagaagagagctttggcttgacttaaaaaagttagctgtaaaagaagcttggttagtacttggggactttaatgaaattcttaacaaggatgagagaattggggctcgagttagatacaaagtggcaactaattttaatgattgtgtagaagtttgtcaattagaagatgtgaaatttacagaattttttcacatggagcaataaacaacaagacgaggatagaatttactctaagatcgatagagtaatggcaaatcaggtgtggttggattgtttcccagcagctgaagttttctttcagaaggaaggcattttttatcactctttagctatcctagctatctacaatatgcctactggtttcaagagaccttttcgttattttaggatgtggtccaagcatcccaaatacactgagattgtggctggaatttggtctcaacaggtgcctggtacacaattttttcgaatagtcactaaactcaagaacttgaaacatgcatttagagctttaaataaaaactcttttgctgatgttaatgctactgtcttgcaagcaagggatcagctgactttctgttaagatagattgcagcgtgaccccatgaattgtgatctgcagcaacaagaaaagttagcaaggggtatttatgttgaagctctagacaatcagcatacttttttgcagcagaaaagcaacttgacatggctgaaagagggggacaccaactcgggtttcttttactcttatctcaaagcgaggaggatgcaaaatagagtactctctataacaaatatggagggtataagagtggatatagcagaacaacttattgatgccttcttgggattttatcaaaagttgctgggaagtaagttagctcaaagaaagtcagttcttgctaatgttattagccaaggtgtggttgtctctagagctcaagctgagttgcttattgctgattactctattgatgatgttaaaaaagaaatatttggaatagcagggaacaaagcgccagggcctgacagttatgggagcttctttttccaggataactgagaggtaattgggaaggacatagctgaggctattatttcctttttgcagtctgggaagttattaaaggatcttaactctacggtgttgactcttgttcctaaaatcaagtgtgctaactcggtgagcgattacagacctatagcttgctgcaatgtgatttacaaggctgctactaaatt

SEQ ID NO: 29796 - DNA, 3523 bp, Cannabis sativa
  modified_base (2565)..(2567): a, c, t, g, unknown or other
ttctatttatagggattcattaggtttatggttaaagctaaatggattgatttgaaagatccagtggctcagaacaaatcctcatagtcgaaccccttatgaaggcccatgagttagattttagccattattttacttccttaatgaaataaactttcagtaatgcaatttttctgctctagttatttaaaacaaaacagattcaaatcaaatggtacaattcaaataataaaacaatttgttggtatttatgattgaactattaaagtacttattggtttgatctgttttaaattttttgtgtattagtttttacaatagttacttgtatgtctaccttttctagtaattttattttattattattttaacatcgtatagaaatgaattttcaattaagaaagaacataagtgagtcatgatttaaaaattaatgcaaatatgactcatcttccattggttacaaagaaaaaacaatttacagtaactttacgtcaatatatggagatacaaataagatgacatttcttttcatacttcaagtaattattatttattgtaagaatcgtataagtacaaatatgtttcttaaaagttctttccgtaggcacgaattacgtcaactaaatctttttagaatgatacatgctagcgactaagcttgtatagaaaatacttgtatggattggagaatatttagtattttgtgtcaccaacttagaactattgggggtttgaaagaaacaaaaaatgtggatgttgaagaaatggttgttatttttatacacattgtatctcatgacattaagaatagaattgtgagacaacaatttgtacgttcgggtgaaacagcgagtagaaaatttaatgttattttgaatgctttgttaagtcttcatgggctattattaaggaagcatgaaccaattcttgatggttcaattaatgagaggtggggaaatggttcaagaattatttgggagcactagatgacacacttattaaagtcaatgtgcctgccatagataagcctaggtatcgatctagaaagggtgaaattgctactaatgtattaggtgtagtctcacaagatatgcaattgatttatgtcttacccagatggaaaggatcagccgcagactctagagtgttgtgagatgctatatctaggccaaatgggttgaaagttccacaagatatatttttttttccatgtataatatcaaacttatacaagcttatttcataataggacaatttcgtcaatcaatttacaggatattactatttatgtgatgctagatatcccaatggtgaggcttcttagtaccgtataaaggacaacaatatcatttaaatgattgggatgtcccacctaataatcttattgaattttttaatatgaaacattcttttgctcaaaatgtagtggagagagcaattaaactattaaagggacgatggacgattcttagaggtcgatcatactatcttgtcaaaatttagtgtcgaattattttggcatgttgccttcttcataacctaattaaaagagaaatgcatgtagttcatcttgaataagcagtagaggaaagtgaggatgattcttctgacgcagatgaaagtttaggcaatgatcattatacacatattaaaaaatctaacgcttggacttcttggagggacaacatagctagagagatgtttgacctatggtgaggaaggaggcatacttagattgtattctttttttttttttacattatttgtgtttgatttgcttaaatttgtatagatatttatattgttggatattgtatttctttgcattatttgtgcttgaatttgtaagaatttttatattattggatatcagttttagacttatgtgttggatatcaaatttacatatctatgcttttagtttaatttcatatgttaatgtatttattgctatacttttgccacaagtagatgtgagacatacatatattaagaaaatagatgctttggaacaagcaacatcgattctaggaaaaagcaccaatggacttcaattgaggattcaaaattgattgagtgtttgttggagttggtaaatagtgaaagatggaaagcagacaatgagactttcaaacttggctatctacaacaattagaaatatggatgaataaaaaaattcctcattgtggattgaaaggatagccccacattgagtctcgtattcaaatactaaagaaacaatttagtgcaattccaaacatgttaggacaagcaagtaattttggttgaagtgaggagctaaagtgtgtggttgctgaaaagagtgcctttgatgattggattaaagtaagtgtcaccttgttgttcaatttaatttacaatttgatcatatcttaattttattcattacagagtcatccaaatgcaaggcgcttaaggaattataaattttctcattatgatgactttgttactatatttgggaagggttgtgcaaatgggcaaggtgctatagaattttctaaaacaatggatgagattgataaagaagcagataatgnnnagcaatctgagttcaatccatttggcccaataaatgatcttgttagtaatgcaattgatagtcacacaagtataggaataacttcagcacaatcaagaaagagaagtagaaagaggtctaggaatgaagattcattggttgaggtattaactgccatagtgaacaaatttggtaacatacaagctgctcctagtaatagtattagaagaattgctaattgtttctagtttgagttagaaggtccaagtagaagactgaaagtattcaatgaactaaaaagaattgatggactgacaattgaacaacgaattaaagctggaaaacttcttgtctaaaatcaagcttatacaaatctttcattcactttggatgatgaatacaagttaggatttattcttggtctgtttaagtaaggtgtgatttaatagttgatgacattttagaaaatactattggggtgactttatgaaatgtatgtattttattttcagatgaaatttttggtcaattaatttcatcttttggatgattttttggatgaaacttttggcaagacgccatcttttggattataaactaaataatatacaaatttttgacaagattatatgttatcattgggaaatagtgttattatctcatttgttttgtttttttttttgggaatgactgaaaattttaaccaatattttttttctgaatgattttaaccaaattttttgaatatgcaatatctattatgttataaagagttttattgttgttttaaattattatttttttgaaaaaaattattaacaaattaattatgcaattaattaaattaattatgctattaattgttgtgataagtatatatactttttagtctttataattatttattattgctattttttttataaaattatatgaaagaataataaatgaaaagtattgcactaagtaaaaaaaaa

SEQ ID NO: 29797 - DNA, 3266 bp, Cannabis sativa
agacataacaacttgaagcttcaaaccaagcttttgagccatctgaacaagctcagcatatccttcccaattgtacttaagaggtccttctttctcaaccaaaccccaccaagcatcaaccatgattccttcaactcctgcactcttcatggccatgagactcgcattcatggctcttggcttgttcaagtgccctccatggcccactgtgtccaatggaagcattacaaaaaccggaacacttgtgtcgtttttcgtagcatgaggtgatgaagaagtaaatgcatggtggtgcttctctactcttttctcacttgtgaagacagtctcatgagagatttgatgagcagcttgaatcgaattactctttgctctaacacgacaccccggcttcatttgcgccgagcctgaaaacaactcgtctgttgttttcaagccaatagtgtccttaagattaagaaaagaagttgaggaacgtaatgttaaagccataattgtttttcttttttacttctcttctcttctctagtttgatgagaagaaaaagagaagtgggattggattggtgaaggtgtttgtatggtttatttataaggggaatttaaaaaagttcatcttgtggtactttgaaggagaagacattggtggggtctagctatgaaaaagaaagaagagaaaaagtgcatacaatcaaagagtaattagctcacattttcattatcaatgtccttgtttcatttccacgcgtttagtccattttacccttctttcttcttgttataaacttcaaatttaaatgcacggtttagtttgttctcctcaattttttgttttatatgttatttacctctattcatttgaagaaaaactaattttttttttcagatctttatgtttttttttttttgcatggaagtttattggaaaagtgaaatatatttttgcatttcttatgtcggtattcttgtccacgtcttatatatatatatatatttaaataaatgtttattggtttatatatatatatataaatatcttttttttggtgtatagaaaaaatatcttttgacttaatagtttatatactttttgcttggtatgtaagaaatatctttgatattgatgtacatgttctgatatattttcttctatgttctgatattttagatgtagctgtcccaatcaaggatatatatctctcaacttataaaacttggttacatttgttatgggtggctagtaatagtttgtgaaaatgctgtaagttttttaattttattttaatgttcaagtttttcttcacatgtccttgaaatttataacttatttatgttgttatagttcccttatgtggtttgaatgtaaataacaaattactaatgggtagtgagagttgagaatgaacgtaccaaactctaagaaaaaagaataattgcggtataaatacataaagttttgtatttgtaaccttcataaacttaaaaaataaatttagcggcttaagtatctaatgtttgaaaactgtaatttttgcttagttttatcaatgtagactctgtttttaatttattaaaaaaaaatttagacgtaactcatactacatgttttcgtttagacccatgatttaaaattagagctttatatgtgtcctgtttaagatattaatggagtctgtactaacgaaattttaagaaaattacacttttactaacattaggtagttatgttgctaagaaaaattattggctttatcccgcttacaatctcaaaactttaagtacttataaaattatttaccctaagaaaaatagttgaacaaataggatttttttttctttaacttgacttttgtagagttttttttttataaaaatttctctcaaactttgttgtaaatattcacattcagttacattcggttcaattttaaaaatattttgcttattgtggtcatgagttaaacttacatgtatagttgcaagattctacttaacaattttaagtttaaactattcaaaatctagcttattgacattgaaaatacaaatgttacttctaaaaatacatacatatatatatatatatgtatatatatacatttctataatttgtcattagattgctatttttttatttagattgttgaactaagttagattaacgttatgttagtgttatatcaataaattattaaaaaaaattagcagaatgtaactatttttttttttctttcatatagttattgttgggaatattttagaataaataaaatttttgttccttgaactataatttttagagtttaattttttgatttttttttgttgcgaaaatttctctagctattttttcacagaacttacaaaagaaaaagaaagtaaaatcataatttatctacatgtaaagaagagaataattgcataggtaacacatacaaaatgtgcaaaaacattcttgaccatttttggggagtgataattagtgtgtggttttagttaggccacaatatgaatcccaaaccccacaaaggagctttggttctatttgattatacattagcctcttctctctctcacctatatgcctaattttattatgtggatcataaaatgcttacatttttttttattattttttttttttttaaattattggttttggatagttgacaactaaataataccaagcaagaattgatctatactcaacatacatatgccacgtgaagtcgagtggttagtcacgtgaaataattatgtcagctgtttaatagagaaacaggatagagtgagtgcaccggaatactactttctctttctttgttaattttgactcaattttgacaagtagatttttatttgaaaaaattgcgataaaaatctttaaaaagaaaaagtttattttatacaaataagtttttaatcttaaaaaataacagtaatagttcttaagtttaatatttttataagtttataggtcctctttttaacagatccgttaattctttcttaaaatatcacatgttgatattaaggtacgacataagtttttaaaaaatttattttgatgcaaataagttttttaaaaacttactttgatgcacataagtcctaatcttgaaaagtatggttatatttcttaagctcggcattctcgttagtctataagtacctaatttaacaattctgattgtagttcttaaatttccatgtatcaaaaatttattggttcacaacataaaaattatttaaataataaaaatatta

SEQ ID NO: 29798 - DNA, 3039 bp, Cannabis sativa
atagaggaatcacacccacaaaataaagtgaagtattacataattagccataaaggttatatgaaaatgttaaatgtatatatattacattgttgggttgggttgagcgaaggggtcggcctaagcgaaggagcatagtgggctgtcccaaagcaacttggcccttactttgtccaaaaatgggccaacttattgtttcatcctatattattatataataaaaaaggtcacatgtaggcactaggcgggtcacaggtgcttgttcttgcttggttgcttccctggctgggctgggctgggctgggacattaaatttgaccccatgatctccatgcatgcattgcattcatgccaattttggttatgcaactaaactaactgcaaagtcacacttttcctcatagtcaactttggcttggtagatctgttattttgacttatattaaaaatggtagattttgcttgcagtccatgtttttcgtatgcaacaaagtgaatagtgatagcatagcactgtagtctgtagttggtaaacaaacagattgagatttcagatttcagatttcagatttgagggtgagaatagtgagaataagtgagagtggtgtatcatgagacttactcatgtgagtgtgtgcttaattaatgtcagaggaatcaaaatcagttacattgcatgaggcctgatgagcctcaggtgaccagtcagggaggcatgaaagaattacatatttattagatgcaatgaatgaatcaaacaaacaaacaaacaaagaaaataactacatatacatacatatgccttctctctctctctctctctctctctatatatatatatagtaagtatgttacttgaaaattaatttgaaaaaggaaagaaaccatatttgtgctaatttgccaatgaaaaagggaaattgcatatggctgaattagatttggaaatggtgtgtttgggagtttttttctattttaataataataataatgataataaaagggaaatggaataaaaagagattaggattaggaccaagggagaagaaccttgggagacacactgccctcactttctaaaatgagcaagttgtttgtcagcaaatagaccccacttcaatttgggaattcactgaacccaacccaacctaatacctattctctctttacaattattattattattattattattattcattataatgtactaaaagtattatacaaatacactgcaacaaccccaaaaacaaaaccaaaaccaaaaccaaaaccaccaccttcttctcctttttctaaatcacacagcttcttctattcaatatattttctcttgctgaaaacatcttcagacaaaggcatcatcttcttctttcttattccttcccctggattattgaacttggttgggttgggttgggttgggtggatctagattaaatattcaattgggtggtgggtggtgtacagtaaatgaattttgaagaatcaaaaggatatcattgttgtattattggatcggtggtgagaattgcataaaaaatggatcatagaagaaagatggagtatgaatatcatcatcatcatcatcgtaatggaagcatatcagagggagggaatggaaaagggtccatagggattgggattgggattggattagggaaagtgggaagcagcagaagaagctacttcagcttggagtcattgctgttgctgctatgcctcactgcttcattgctcattcttcccttgatactgccgcctctgcctccccctccattcatgcttctactccttcccattgccattcttggggtccttatgatcttggctttcatgcccactgcatcatcttcttcttcctcctctaatctcacttacacatacatgtaacttattaactctaaataatgtaactaaattccatttatttctcatcaaatacaatttttgtatctttcagaatcacaatacaaaatgaaacaactacaactacagtttcattctaatctctcactttttgtatatatgtataatcatttttatattattaacaatgccagttggagcatccaaaaccactactttcaattaagtaattaatctcaagtgttattattattggttcatttatgcaactactaacatatatgagcaattcaagttttgggggtggggaaggggttaaatgttaatactaatcgaaacttaaaaggccattcatatatgagcattactaacataatgaacattggataatccaattttgtagagtataatgtttataagtgatggataaacatattcttagagtagaatttaataatttatcatgaggtgactctaaatcttaagttttctttattttgtaggaatttatttatgatcatgtgtgcaaatctcatcatcactatctttacctcaatgggttcatgactgtctataggaagaatcaaagaaagttcaacttcaagcctaatgcattttaacaatataaaaatatttatatctcaaccaaaccaagtagaccaatgatccatgacgtaacattcaattacaagttaaattaacataaacatcacttttacaattagtccatggatttgaacatttagtattgcacatgtcatgttgagaattttcatagcaaattgtagaaataattagtatttgttgcattaacaattagttagtggttcatagttgagatgtaattaatgtctatgcctagattatttcatcatactcttaggttcaatcttagaaaatcactttgaagtggtcttctattctcacctccagcataaggagattgctcagtcttcgatcagcaaaaccctggcgtcccacctccacgggcagccgaggcctagccccagatcctataattttagaggtcctcaaaaattaaaattgatatattatatacatgaaaattaaatatgttataaaataatataaaatagatgagaacaagaagaagaagataaagagataaagagaaagtgaatgagaaagttgtttattccaatggggtga

SEQ ID NO: 29799 - DNA, 2808 bp, Cannabis sativa
atttaattcaaagtcaatgaagtgcaaatatgtaaattttttttaatcacgtaaccaagaaaactattagaacaaaagacgcacatcaagaaaactatttttttttttttgagcaagtaaacaaacattaacatttttttttgatgaaaaacaaacattaacattattggttcgcttataatgagataatgtagtaataataaaaaaaagaattacacacacaaaaagtattatggagtacaatactaaatttaaaaaaaaaaaacttgttctttacaatctacactttgcacaagacaaagataattcgaaaatatcttgacatgagaatatcttcacatgacgataatgtatttgaagacgaagttggagaccataaagtaaagcaaacacttcaacaacaaaaaattcaaaatgatagattaaaggaacagccccgagaacaaatcgaatccggtagcagtagactgcgtacaatcccatgtctgcaaatatgtaactattgaatagagaaatgctattgatttaaaaaaaaaaatactaaaaggcactacaattaagtattgggtattagagaaatgctattaacacctttccataccaatccgtgagtgtcatgaacgttaccttggcctaccctcctattcgggtagagacaagaaagagcttttcagtaacattaaggaacgaatttggaaactcatgcactcttggagtgaaaagattttctcagttggaggtcgtgaagtccttctcaaggctgttgttcaatctatcccaacttatgccactaccgggttacttttgcaaccaacttgagagtatgatggctaatttttggtggagaatgaatgcaaatggatctaaaatccattggcgctcgtagaatttgctatgcaaaacaaagggtgagggtggaatggggtttcggtgtttcatcaactttaatcaagccttaatagctaaataactgtggcgtctagttgaaaatcttgattcactcctcagccaattagtcaaaagcatatactttccacataactcgttctttgaagcaagtatgggtcattctccttcgttaacttggcaaggtattaagtggggtcgtgatcttttgaccaaaggattgcgatggaaaattggtgagggtcgttctgtcaaatgtggttatgacccttggattcctggttatacatctttccttccaacaagatagattggacccccaaatgttgtggtatcaaatcttataactgatgaaagggagtgggatgttcctttattgcagcaattattttgccctcttgatgttgacaaaatactcaccatccctttgatctactttagtacaacagacaagcttatatggcatcaccacaatacatgcacatacatagttcagagtggctatcaccttgcaacctcacttgaagaagaagatcacagctccaactcttcctcatccttgtcatggtggaagttcttttggtccctccaaattcctcaaaaagttaagatttttgcttggcggatcattcatgatgctctaccggttgctacttcacttgtgcgtagaaagatcattaccgattccacatgttccatttgtaaacaagcttgggaatcaatgggacatgctctatttagctgcaagtatgctaaggcagtttggagagttcaaaatttcaagtttgattggcaaaagtgtacatcaatacgaaatggtgattacttattacatctctcaactatttacaccaagttagagatggaacacatcttttgtacactttgggctatttggactgaacaaaacaaggtggttcatggcggcaaagcaagaacatctcaggacttatccatttttgcctctgtgttcatacagaactttcaagctgcccaatggaaacccactgctgctactgtgactgcaccagcaacatcacaccagcaggataattctactgcaacactggctccaattccgtggtctccaccaacacatggcgcccacaaactcaattttgatgcggctgttgactcctcaacaaaaattactggtgtgggagctgttctgcgagatgaaaatagttttgttgtggctgccctgtcaatgccgattgtagacaattttaaatcacacgaaatagaggtcaaagcactttttcatagtctcaattagactgttcaacatcaattcccaattatgcaaattgagacagatgcgtttatggtggcaaacgctttaaaagctcccttcaatccaaattcttctttttcagatttattagtcgatgttaatagtctcttatccttttttcctaatgtaattgtttcacatattaaacatttggcaaataaagcggcacatggtcttgctaaatttgcattagggttggatgaggcttgttcttggttggagattattcctccgcctatttactctgttattgtaaacgattcactgtttgtttaataataacaagtatttttcctcaaaaaaaaagtatcgggtattaatttctattttaagaatagaatcaatgaattaatttaagataaatgaatattttatattcattgaatctggacgaaattaattcattaatattctatatatggtcagattacaatttatcaaatatttgatttcctgatttaattttctgaattaattgttaaaatattctaactattaattgtggcagagactttgatgaaatgtctctcctatataaatatagggtctcagtccctgagttcactactcattctgtgataacggtaaatgttgggttttatgctcta

SEQ ID NO: 29800 - DNA, 3140 bp, Cannabis sativa
gatttcattgtgctcggcggccttgctgcgcaaggctcgccgcttcactactagcaaactgagatggtaaatccaatacattagaaaaacccacctcagaaacaaacaattgcaccttcttctccccaagacccaaactgccatgactaccctccttaagagactcggccaccaaagaaacatctcccgaaacccccaccgttgacctgcgatttctccaactccgatactgtcttcccccgagagtccccattgttcttcgcaagcctagctctcgttttaatggacaccctcttacgctgccctgaagatgaggccggtcctctgggctcaccaatggacaccccaatagcaaaattctcattaccatccactcccaccggtacttgttacacttgctttcctttactcctcaaacgctggacttcctcaaaatcgatagccacagtcgctcctccattcttcctctttttcttatcgtgttcagtgttctcaacatcaggcaatatggagtaggtggactcagatgcaacattaggttccaaaacattagggtccaaaccaaagggtgtattactcacaggcggcccaacactaacttcaggcccagtactttgtttcaaatttggcccaacagctgtggctttgacttctttgggtgccacatggatattagtccccccagtatccatttgattattaactgcctcccccacgatttttgtaactccttctcccacacttctcataaccgtttgctcctcctcctcagctgaactcagaccaccatgactggccggaccaccatgtacaccattttcattccctgggcttcgttccagtcccccatgtcctccctcattaatatgaggaatggagttcactactccagccgatacaaacccattggggcagggatcatcatctttcagccatgatccatacttcagcaccaaatttccagcagcatcagtttccctcaacatcccactagtacaatccttttgttcatgtccccgaattccacaattgaaataaagcataggtaaatgttcaaatttaaactgaatccaatgctttttccctccacatggaataaatctccccacaaagatactcgcatttagcggaaacccgatcctcattcgcacataaccatttaagaacatgcgattctcgtctccccaacggatctccaccacttcccctgccattttgcctattcgagtcacatttttcttcgtaaaaagtttaatcggcagtcctttcactttgacccaacacaacaccttatcgagccgtgcatccccccaattacccgacaatggccatttctccaggatcaaaagccctccattgaaaagccaaggctgcttccccaacacactcttcgcatcctcaacactcttaaacgtaacccggaccagtttctcttccccgtcatcatcattcattttgacagtccactctgcaatgcccttccacattctattgaagatagtagtaaacaaattctccctgatgttcctatgagaaattaacttcccaaccaaagattttgctccgaaggctatcgctgcatcctcattctcttcccattcctcctcatgatcaacaccaagcttactagtcatattcactaactcatccacatcaacaggcctttcacccgtcaccatcaggccaaccaagattagaaactcgaacataccaatcagtccgtactcgactatcgctcaacagagagggtcactcagagaccatattagcctaattggaatactgtagctatcatatatattatgattaacgtgtatttaattttgaaattcaaacctaaatagccattgatcagttctcatttttctcccttaaatccaaataatcttaaactcaaacttaaattgcgattagctagtcctcattcttctccctaaacccaaataacaaataaatataaactgaatagagattcttccaagaaaaattctatcacagaaaaacttttcaaatgccattctcatatcttgcaatgtgatttgagtttttataattcagatctcagcaaacaagtgaggagtttgggaacacttttaaaacacgtagatgactttcactcaattttgaaactcagaatggttgttgcacatgtcgagaagcagatgctcctctctcattatcgatcttggcttaggccatgtttcgctcagataaagtactcacatttgtctgtggtatgcttctcatctcaattaaatctcattaagtgtgaaattatctttatttaattttttattcatcatgatatacttacttatcaaacactaaaaaagggaagaacaaaaattgatgatagtgtgtgatggtataacttactgttgaaacttgaacactatctcacatgccaagaatggctccaaaaacaaccaagaacaatactttaatcacagaacatagaacacttaggcaaagacttgttcttaaggagatgaagcgactatttatagttaagaggttagaggtctttgacactgttcacattttcggacgtattcaatgcaatctttcttcattgttggccaaaagtacccttgatgaagaatcttttttgaaaggcttattttagaagagtggtctttgcagaaacatctgtgaactttgtggataatggcgctaattttgattccagctatgcacctcatatatggtacatacaacccctacagtaaagctttccatccaagatgacatatctaggagcctagtactgaatctttgttgtagcggctctgccagccatcagctttttacaattcaggaactagaagatcggacctatctagaagtttgagtgatcaattatggcttttacccctaatgcttcaatacttaaagtttgtagatggtcgacaagcaccacttcgtatttcacaattttcggatatattgctaactttgacagcatatcagtgaatgaattttgctctcttgggacttggcgaatgttgtagcttttgaagctttgcaacagttctcttaaccgtgtcacataagcagccattttctcaccattagcttagtattctctgaatatctgatttaccactagttgagagtcactatacactctaatactttgg

SEQ ID NO: 29801 - DNA, 3433 bp, Cannabis sativa
aagaatcatgttttacttgaataaaaattgcagtgcgagccaactttgagttcatcgacaagcttggagttgatttgtggtgtttccacgacagagatattgcccccgatgggaaaactctcgaggtgagtaaccttttagactctttcgatttgtcatgtgatcgtttaccttatagagaaaaatatacgagttaaaagtttctgttttcttttctctctgaattataaggcaatgcaataagaaaacattggttccatgtcttttctgtaatgattcattagttgtggaaaacaattcattgatgtgttgtgttgtttcaggaaagtaatgctaacttggatgaagtagtggcacttgctaaggaacttcaggtaattttaccttagaattatcctgtgtatttccatgcatagatttcctcattaaatgtgacctctttaatgatgataatttacattcatcttgcgctcattgactgtacagggttctaaagttcaccctttgtggggtacggctcagctgtttatgcatcctcgctacatgcacggtggtgccaccaggtaatctgcaaacggtgctattatggtactatgtttattgactctctattctaaatactaactttgtgaatgttgtacagttctgaattaggcgtatatgcatatgctgctgcccaagtgaagaaagctatagaggttacacattatttgggaggagaaaattatgtattttggggcggtcgtgaaggttaccagagtctcttgaacaccgacatgggacgagaacttgatcatatggtgcgctcatgtcataaaattttcctacaatttgtggccttatttttatagatatcggttctgagtatgcagtttattttttgactcgcaggcaagatttcttgaagccgctgttgcctacaagaagaaaattggattcaacggtacattgtagtcgcctaacctgttttgttttctatttcataaagagttccgataagtagtctgttatttttaccgagctaaagtttctaccgggaactaatattttttcatctgttgtgatatttagggacaatgctgattgaacccaagccccaagaacctactaaacatcagtatgtctgttaccggtctactttcaaaatatgattttttttccctcactatgttcacatggcgatattattatctcaggtacgactgggacgctgcaacatcagcaaatttcttgcgaaaatatggccttataggtgatctttctttctaaccatctcaatgcatttgttcagttttctatactcatgaaccacataactagaaagtgagattgcaccctttaatattgcaactgcaactgtcttccatgacaaaaaatgttaattcgatcgagtaatgtgtttttctttctaatgagacgagacttcactcattatcctttaaaataagttcattgaaaatgtttttctgctctgtatttactcataataaagaacaaactgtcaagctcatctcacattgtttttgtaggagaattcaaactcaacattgagtgcaaccatgcaactctatcaggtcacaggtattatcgcgttttacattaaataaatttcataattagatgaaaatgtatacttattcttcaaaattatgttaattttttgctctgcagttgtcatcacgaggtcgaaactgctagactcaatggtatattgggaaatatcgatgcaaatacaggcgatcctcaagttggtatgtctcaatttgtttctctaatgtgtaaaaagtaacagaagttgtaatttgtaacatgaaatttgtttcgatacaggttgggatacagatgagtttcttacagatattggggaggctaccaaggtgatgctcagtgttgtgaaaaatgtaagaaaatcttctctatcgatttctttttcaacctcaaatgtgttctctaaaaacttgttagtgaatctaactatatttttcaaatttcacagggaggattagcaccagggggattcaacttcgacgcaaaactgttcgttctcttcttttcttatgatttgtactttacatgattatggatgtcatgaatgcctcttaatttttgttttcgatttgttactgttagacgaagagagagcaccgatgttgaggacctatttattgctcacattagcggaatggatacacttgcccgtggacttcgaaatgttgccaagattattgaggttgcatgtctatgttcctttctcttccttttttcttatttttgtgtctacaaaaatttgtttttcaatatgctctctttttctttttggcctgtgaattaggatggttctcttaacgagcttgttcgagaaaggtactcgagtttcgactctgaaattggggctctaattgaggtaagtgactcctaaagtgttctatttgtgcttatgttttaacttttaaactcattgtaacatgtattgcctctttccataggctggcaaagcagatttcgaatttctcgagaagaaagccatcgaatggggtgaaccgaaagttccatctgctaagcaggtaatttagaaaatctctgagaagtattaattaccatggacaagtcaaattcattagtctaacttaaaaataagtagaaaaagtagtttaagtattaacattttcatgtagtgaaaagttcatctgagggtgttcaaaacataatcatcttcaaattgagattaagttcattgctaacaccatcaacttatccttagaaacaattccaagggagaaattaatttttttaccacgctttcaccaaatctatcaattttgattgcgactaatactcgttcgttaaagtattcgtgcaagtatggtaaaataggaatcaaaatctcttgttaaaaagtggtatttcatactgtgttaaaccaatctaaatttgacacgttaattaattttttatttattaaaagtttgaacttttaactgagtcaacaaaaatagttagcatatttaatataaattaagttagttgatttattagaattagattggtttaacacaatataggatactatttttaacggaaatcttgattaggtaaaatagttgtttaatcccatgttgctcctccaacctacttctcaatttccaaagagaaaaaggtttgaagatcaagtttcaaaatgagagtattggttgaaaattacataatcatatactagaaatttacactcaatccacacaaataagttaatgaaaactttaataaccaacatggtcattcaagatcataagtttactttaatatggttatgttgttcttttcaattttttttatcagtaagttgagcaaattacctgtatattacttgtatagctatgtacttttgagtttggtttcatatatttaattttaatgtacttttgttcagcaaaaa

SEQ ID NO: 29802 - DNA, 1302 bp, Cannabis sativa
aaaaattaagcataaaaactcaaaattttttaattttacctattatgtgtaataccatgtgtaatacccactaagagtactcttatatatataggtcactatgtgagcacttatatcgttcataatttttttttttatatataattctttagactttaattagatatatgttcattgttcttatcaaatttaattaggatcaagttacgtataaatatatttataacatttaagtgccaaaattatattatagcatcttaattatatttgagtacttatatacttatacaatgttgatataatttataaatcattgtatgttattctctcatatttattttcatttttaataatatgctatataactacttaataatatttttatacaactttttaagccagcctttaatttttgtcaagcctccgttattgattttttcaaagaattttctttgtttgaagaaaatatcatagatcttttactttattttattttgaaaaaaaaaatcaattgtgtattgagcaccctttttattttagtggtaatatatctaacaaaatttaatttgatatataattatttatatatatttataaagattttttttaaaagaaaaggttcattaaataaaatacaaaataaaatctccaagttcttgaagataatgtttgcacgaacagttgacacattaactatttaccaacctacttagtaatattgtgagcagcaaaattataaaatctcaaaaaataaaagcaaaattacaatctaaaaagttacatgagaatctattacaaccaaaatatagttatcaaacagccatttctaatcatcactttgataacaatttctgaatcgctctcgacaacaacaaaacaatgcttccacacagttgttgtctgaagtgctagcacacatgcctccacttcaccaattaaggcatcaaaataggcaaaactcttggaagcaatccacaacactattcccacatggtcttaggccaacgctacaacacacatcgacccattccccactttaacatcacaattaattttgattcaatcctcaggagaaggggaccaaaagggggtctcatcatcagtagcaagctaaagtaaagaagatccataatctgcataacagtgaatgataaaatcaatatcatgttatacaaattattattgtgtaacttatcatttcgagtttgccaaatggtgtccaccacaatagaagcaaaaagaaacacttcttcaacaaccgtacccttagagtgaagaccccaatggaattgcacccagtcc

SEQ ID NO: 29803 - DNA, 3807 bp, Cannabis sativa
tcaaaccaactcactcggttgcaacaaggtgatcggtccgtcacctcgtatttcaccaaactgaaatccctttgggatgagctgaaagagtttcaacctaatacaacctgtacttgtggtgccatgaaagcctttcttgatttttataataaaaatcaggtacttcagtttttgacagggcttaatggatcctatgcctctgtgcgtgcccaaatattactcaatgaacccataccacatctctctcatgtgtttgccatggttgttcaagaagaacgttaacgcactctcggttcatccgacaacccaccccttgcctcctctgtccgtccaacacccaccaatccaccaagaaacaagaaacctaggccctcttgttctcactgtggcaaaccaagccatttagtggataaatgtttctttatccatgggtttccaccaggatatggtgacaaaaaaaagggtgataaaggcaaggctcaagcacatcatgcttccagcagcaacctcaatgatcctcttcaagcaccctcggctgcagacctttcttctcaatgccagcagttaatttccctactgagccaacaattaactcaatctgctcctcgaattgatcctgctgcaagcatggctggtaacactttctctgacaattcatttcaatggattattgatagtggtgccactcaccatatgtgttccaattctttatgctttacttcatttcagaacacaacattccctaaacatgttctgctgcgtaatggacaacagattcctgtgtccaatattggtactgtttgcattaacaaaaatctcactattcataatgtgctattcattcctaagtttcatatcaaccttctctccctcacaggttgatcatacaccataccacattttctttaaccccactgcttgtattatacaggatcattctcggagaatggagattgggacggctaaaagatgtggcaagctgtttctcatacatcaagacactcctatagctgctactagtactcctagcttagcttttaataaaacaaatgtagaccaatggcacaatcgccttggtcacccatctatgtacatttccaattttttttcaataaaaagattggttcttctattgcaaagaactttacacattgtcatatatgtcatttagcaaaacaaaagaaacttccatttgtttctaataataattttgcctcaatcatatttgatttaatccacatggatatatggagacctttttaaataacaagtatagaaggctttaaatatttttaaccattgttgatgataaatctcgctttactgggacatatatgctaaaacttaaatctgatgtacaaaccatcataccagatttttttcacatggtatatacccaatttgctcacagcattaaaactgtaagatcagataacgcaaaggaattaaatctttcttccttttatgcttccaaaggtgttatacactatcattcatgtgttgagagacctcaacaaaattcggttgtcgaaaggaaacaccaacatatcttaaatgtggctcgggccctgggttttcaatcccacatcccactggtttattggcaatatctaattgccactgccacttacttgataaatcgcactccttctaaactcttacaaggcaacacatcctttgagctattacacaataaaccaccaaaatatgaccatcttcgctcatttggttatcttgcttatggttcaaccttagtctcaaaaagacacaagttttcccaaagaagccgtgcatctgtattcattggctatccatcaggaatgaaggcatatgttcttcttgatattgaatcccagcagatttatacttctcgtgatgtaacttttcacgaaaatatttttccatatctcacaaccacttccacacatgagattgacaattgtctctctcaatccatcattccatgccaacaacaagttgcaccagtccttattcagactgctcctgcaactcacacacctaaaataaattcccatcaatatgctgcacctgctgcaactcctaatccagcaacacattgcaacaaatctgttgcaccagctgcttctaaggaaccaacaatatattgccaaaaagttattgcaccagatgcacctaatgcaccagcaatacattgcaaaaaaatcgttgcacctatccctgcaactcctatagcagcaacaacttgcaaaaaccaagttgcacctgatcctgcaactcacaaaccagtagcacagtgtccacatgctgctgaacccgtacctgaaactgttatcaccaccaaaacaggtcgacaaatagctaaacctgttcacctacaggactatgtttgtcacacagcttcaaccaatcatccaatagaaccttttctatcatatatcaaacttcatccagagtttcgtgctgctgtccttgcagcatatagtcaaattgaacctcaaaattatgctgaagaatctcagtttcagcactggcttcaagcaatggatgatgaaactcaagctttagaaaagaaccaaacttggattgtcaccaagcttccacctgggcacaagccaataggttgtaaatgggtatataaagttaaatataatcaagctggtgcggttgaacgattcaaagcacgtcttgttgctaaaggtttcaatcaaaaaccaggcattgactattctcaaacatatgcacccgttgcgaaattcaataccttaaaagtttttttggctttagctgccatttacaactggaccattcaccagattgatgttaacaatgcattcctccatggggaacttcttgaagaagtttacatgaaaattcccccgggttataatgctcctccaaacacagtttacaagctcaacaaaagtatctatggcctcaaacaagcctcaaggcaatggtacgcaaaattgtgttccactcttctacaagatggtttcactcagtccttatccgataattcccttttcaccaaaagaacatcatccacttttatagccattctcatatatgtagatgacatgatcatcgctagcaacaatcaaatggccatttccgagtttacaaagactcttgatgccaaatttaaactcaagaacctaggcaaacttcgttttttcctaggacttgagatcagccctactgccaaaggcatttctatttcccaacggccttttactttgcagctcctcaaagatactggtactctaggtgtcaaacctgcatcaacaccaatggaactcaatctgaaattgagtaaagacaagggaaaacttctccctgacccaactgtctaccgaagcttgattggcaaggtcatttacctcacaatcactcgacccgatattacatatgctgtaaaatcacctcagccagtttttatcaagtcctcgggttcctcatatgcaggctacaaacaggattctccaatatctcaaacaaacccctgaccagggcctcttttacccttctgatgcagcactccaattgcacgcatatgctgaaaccaccctctcaaaagacaatgttaaggtatccttctttgctgatgctgactggggcagctgtcaagacactaggcgatccatctccggcaattgtatttttttgggacagtccctggtttcctggaagtcgaagaaacagcaagttgtctctcgctcatcagccgaagccaaataccgtgcaatggccaatgcatcctcggagttaacatggattctagctcttctcaatgattttggcatccaccaccacaaaccagctaac

SEQ ID NO: 29804 - DNA, 4152 bp, Cannabis sativa
tatatatatatatgtaaattcttatactttgaagagtgtgaaaaagaattagagttagagagagaaacacattgagttatatatagagagagagagtccaagaatagagagagattgaagaggaagaactatggtgttcatggtgtctcaagtagctcaagcatggtgttttgagagtctatttctctctgttttattctcatattataactcactcatttggtgtttgtaaacaatcttgcatagtggagaaacttcttgggggagagctagattaggactcacattaagatccaaactagaataaattttgtgtctttctcttttattttccttcgtgtttcattgttgttcattatttgtttgatcttctttttgttttaagttttgatgctttgtttttttgatttggttgagtctatgttgtagatttacaacagtgctactagggaataacaaggcatgcaaagtttaagaaattagatcactttatgcgtgatgggatcactagtgaaatcgaatatgtcatgtatgttcttgaattgagaagaaatttaatttttattggatttcttgctcaaaatggttgtgtaatcaaaattgaaaaagactcaatgaaggtactcaagggtgctatgacggtgacgaaaggagaatttcgaactctattttctagttggggagtccatcacattcacaggtgttgtagcaatagcctcaagtgtgaaagaatttgatgctacaaatcttgtaatttttctaaattttgtaaaattgtattacattttaagtaataatttatttagagaaagaattggcattactagaaatgacttggatgaactttatttctgaacttatccttcatggaactatgaagtaaaatattgaagctatgtccaaaggtgccaaagatgacataaaagaattaattaaaaatgggtagccaaaattaatagaaatggaagaaaataaaattatgacatgaaagaataggaataacaccaatgcagattttgcttcgacttgttttgtacaaaattgaaggaccaccaattcccaaaaaagctcctcctatgccatctccatctacctcaaaatttatgagattacaactgcaagtgttcaaaactacaataatctttctacaaataagccgcaaaggagaaaacaacgccaatcatcaccacaagtctcatgaaagcacttctgtgaaagtagtctgcaggagaatctgaactagttgaattgaacgacggcatggtaacatttaccagggtaccattcatccccaaactgagaattgacaaatgaattacactgagttaataatgagactaaatgacaggttttctaaaaaatctttttgtttgcaaatttaccaaatagtttaacacattgcttttcccaaagctataccaaatctttttgtcggacaagtggtgtataaaagaaaatagaagagctataccttccagtaaatacgcaggaaccatgacctgcacggttgatacaacgaaaagttaagggcagacatccataaaataatagtagtctacaagccaaatcaatataataagaaaatgtgtgggagtgaaactgaagtttacttacttggatccgtagttgtaattgtagctaccccattgaagtcacatgatccagctgccttccccatcttatgataatatgcatcaaaagcataagttgcatgagcagctacatcatctggctcatagcagggctgtccctgcagcaaggctgagcagtccactttgccaggaccacaagcccagtcaagtgcagcctgcaacatctttttatcagcgccttccttggccgtgcagtaggtctggtttgttgtatcattcgacagcacatttcctgatcctgtcaagcgcataatgtatacaggctcgccattggcattaaacaatccccagtttttctctgagatcgatccaactttcgtatcctcattgtaaagctcgtaaatgaaagtactaacagccatcccagggcgtttgggagttccagtattgttcaacacatgtcttatcagattgctgttataagtattggcattctctattgttgcatcaggttcactggcatcacctttggaaggccagcctgattctgtcaccaccactggaatgttagtaaagttaagaaaagccatggcagaataggcagcatcaaccactgcatcaaacacattagtgtagtggagaagtgtgttagaatcaaccgcttccttgttcggagaaagaggctcgaatagagcataatccagcggaataacaccatttgcttgcatgtaatcatagtatgggtagatattgagcatgagatatgatcctgtggactgcaagaaattgagcatagggaccaatactggattcaatgagtggttaaagaaggcttgagaaggtgggaatgagtcgaggattatagaggaaggaaggggcgttgagactttgatttggcggtcgagattggatgcaacaagggctgactgaacgtacttgagagcattgacaaggattcttgcagcattaggaagggaagtaaaaacctcagagccaacacatattgcagtgatattagtggcagggtaatgagctacaatattctgagaaacccaattagctgcagtggaattggattggccaatgccaagaagctgttcgttgggaatagagacaacaacttgaattcctgtatttgcaagggcaacaagcataccacggtcagcatcatagagccgaacatgtctaatttgttgggctttgaggagagctgctacttgtgtagggtgtggcatatccgataggtcagttccaatattcacgccaatgaacgcatctaaaatataaacacacaacaaaagtcacagccataaataaggcgtttatggaattggaatggcattttcgttgtcgtttaattaaagagttataaacatattattgtccttaaacactacacatggaaaaagcaacacactttaaagtttcaaggttttttcttcaaggaaaataagtactataataagcaaaaacatgacccaactggcattaaatcactatagagtgtgcaagcaatgtcttaattcaaattccaagaacttacgcagagatccagtggtgtttgaccatttacactaataaccaaggctaatgggaacaagtgatccattagctggaagacaatgctggtgggtgggtgcccttttatattttattacaaaaatgacataaatgaagacaagaatggtgattatctcggaactcaaactcttgctttagtggaaatgaaaaatccaaatccatttaaaacacatttattaagtactcccggaacacaacacaataaagtacccgcctgatatatgaaaacagagttttggactggggttcgaggtctagaatagcatgcatatattatatataataatattgtggcatatttttgttcaagtaaaagtgaaaataatatttaaacatgaactattaagagaaaaaagaaagcctttgcttgcatttattttgccattatcatctgacctacttcaacctcaaggctaatcatgcctatcgaactctttaaattacaaaaactgagagtgaaaacataaaatgaaaacaaatattataaatgcccatcttaagtctaaccaccaatattaaaaccagatagtttaaatgtttaaatcattaatgtgctcagacaattatgcttgctcacatataacataaaaatgaaagccaacgattttcatgtatgcaaagcgagtagtttaaaagatttttgggcatttaggagagagggaactgttggtctaacagtaagtaaagatgcaatctatcagtgtgaaccaatgttttgtttattatgtgaagaaagattagaaaaaaagtggaaaaaagagaggttgcaactaaacatttggagtatgatctctcagcagtagagtttttaacaagaatgaaactgagctaagggggaaaaagtttaccttcatcagctgtagcagtggaagcagttaacaaaaacaaaagaaacaatagcacacccatagaaagaatattattcaaatccaccaaaaaccctcttaaaagatcttaaagaacaataagattagagaga

SEQ ID NO: 29805 - DNA, 2631 bp, Cannabis sativa
  modified_base (27)..(59): a, c, t, g, unknown or other
taaattaatgacaacttgtaactaaannnnnnnnnnnnnnnnnnnnnnnnnnnnnnnnntgactaaaagtcatatttagttacaaaaaaattatattgtaactgaaaacttgtcactaaaagtagcagttttttatagtggcactcacacatatataaattgcatatatttattttgtcaaaaaatttatattaatttatattttagtttgttaaatcaatcggagttaatttaaaatatattataattatatttaatattaattatatatgaataaatattaaagatatagagatattattgataatgagataaaatttttgaataaataaaatatattaaattaataattatataatatttgaatgatatagagaaaaaaaaaatagaaaaatacatgtataatgtaatgtaaaagtttgatgtaaaatacaaaaagtaagattttagtgacatattttgaagaatagagctgagacattgatgagagagctcttagagcatcttcaatggtacactttttaaaagtgttaaaactctctgtatcatctgaaaatataatattttattatatttctcttccacatcacttttggcactcttacttgtaaagttctacaatgataagcactcctcaaatttgctaccatatatcttacagattattatttaatatattatttattttggctttattaagagagagaaattaatatgacattgatactaagttttagcatcaatattttatgcgagcacggactaattactagtttcagcgcttgcaccctaggatttcagacctagggttggcatctttatgaatccgagatagggttgttgttaagcctaattctagaagaaattgaaaagtatatgacttattgaggtgcaagaataccaaggcttgaacatagagtcaaaattggacaaggaataatcccccaagggtgctacatgagccttgccacaccattatggcagtgctcgcccaaagaaattgcaaaggaggaaagtggcgaaatgagttttttcaacatcaagggacacttaaaaaatgagagaagccaccaaaaggtggggtgaagtcatacacgaccaatgtgattctccaatgacactgctcgtgtagggtatacaataagagtttctcaaggtttccaaaatcaaacccaagaaacttcttgccaaccataaagactttccaaacacaattcaaggtgttagtagacaagtaaaacatgagcattgccatggaaaaatgaaaaggctcgtcgcatgcaaggttttcacgagcagtgccatctctatgtgccactattcacaattcttccgtatattgatcatatctcagtgacgcggttcaaatggcattggaaagctcttttcacaatggatatagcttgtctaatagccttctcatgattttaatgtttttagtcccaaaattaagtcataatttaggttacgaattatgaccacttactagaattaaaattgagaataatattatgtagaatataattaatataaaaatttaggagatttaagtttttttgttgctttttgttttgagggaatatttgttttagtatgtctacgtcgtttaaccctgttgaccctgttggtgatcaactttcgatcattccattggaagaggaagaagagccagcatttcaatatgaccagccacttgttgaagatgcagagattgatacaaggtggagtactgttgggcaattttcgaagacactcctatagacttcatggctatgcagaatctgaatgtagtgctctgggaaccaggaatgggaatgtatgtgaaggatttgggagaaataaatatatcttccaattctatcatgagattgatgttcagagagtaatcggcagaagtccttggacattcaaagatgctcctctgatattcgagagactgaagccaggatatgttccaagggctgtgagattgtatcatcttgaaatctaggtgcaattgcatgatatacgttcgggtgttaagactgaaagaatggtgaaggatgttgggaatcacattgggagctttgttaagtttgatgagaataattttaatggggtgtggagggattacttacgggtaagggttcagattgatattgagaaacttttgaaatagagaatgaagttgcagcaaatcagaggagactggttttggatcaattttaggtatgagtttgtgcctacattttgttttatttgtgggattataggccatacatatcaatatttctctcatttgtttatcaaccaatttccaccattgttaaacctacgacacgttcatgaaggcggtgcccagaagaacgcagtacgctatgggtgtgaagtggttatgatcgggtttgtctaattctaaaagttacggtggttcggtgggggctaatctcaggagggatgggaggactgatgtccctgatgttcaaggatttcatggaggctctatcccgagtttcatgggtctaggagtgattcatggctctaagtggaagttactaggggaaatctgaggaatcaaaatgtagatattggtgggagtaatgggaagataatttaggaagtttgggggatatccatgtgtcatctaattca

SEQ ID NO: 29806 - DNA, 1318 bp, Cannabis sativa
  modified_base (1291)..(1291): a, c, t, g, unknown or other
gagactcaactactctaaatctgaactcattctggccaatgtaaaactgtatttctcctgccttctcaacatcaaccttcattttatgtagcattacttggtgaaatatcactgacaaaaatgtgagaggtccgaccttccaaaatttaccaaagggcttgcatgttccttgtcaatctatttgtattcctcaaattgcgtcttgatcttcccaaatacattgctacctctataagtcacatggcatgtacaatggtttgatgctgcaactataagtcatggagccatctaaaaaaaaaaaaagaccatgataagcgcaccatcgaaaaataatcgacagaccatagataaactatcgataaactcaaaattttggaaaaaatcaaaacctaaccaaaactattgataaaccatagctaaaatatcgatatcttattgacaaactcaaaattcttaaaaaacacaaaacgtaatcaaacttatcgacaaacaatagataaattattgatatcctaaaaaataaaacataagcaaaattatcgataaaccatagataaaatatcaatatactatcaacaaactcaacacttaaaaaatcaaaatctaagtaaaattatcgataaaccatagataaaatatcgatatcctgtcaacaaactcaaaacctttttgttaaaaaaaaaaaacctaagtaaaattatcgataaaccatagaaaaaatgttgatatcctattcgacaaactcaagaccatttaaaaattaattaacagacacaatcccaaacaaatccatcgacaaaccatagataatatgtcaatttcctatcgataaacaataaaaaaattgaaaaatcagttaagctgaaactatcaactacctaagtgatttttaatcgatatcctatcgataattcatcgataacactgtaaaaaatacacataccacataaacagatctaaaagttcaaattatcaccaaaaagttcacaaattttagaaaaatcacaagaacaatgacaaatctattttttaaatggtaccttttcacttagttcagtggtagttgtgttggcggtttgactaagaacgacttgaggagcggtggtggcgcgcagatgtgtcaactgggcttcatggtggtgggtttcgactgggtttcagacaaagtttggtggtggggtgattttagcctattgggcttctcggagttaggtgggaaagcaagagaaagcgagattgaggaagattgagagagagatagtggcactacaaaaattttacttttagtcanaataaaatttgtgattaaaagtgaaaa

SEQ ID NO: 29807 - DNA, 2541 bp, Cannabis sativa
ctctctctctctctcttcctctgctttgccacccctacactccacacttcactctacacagtacactatattacagagaagctctctctctctctctctctctctctactatctagatgctctgcactatcctctactccatcaaagccgtgacctgttttttttacacaaatcttagccaagcaacagccaacactatcctccacaaaaccttttaccattatttcccatttttgccattttcgctttctttgaaagaaagcatatttattttccctcaaaccccagaaaaatcgacccccaagtttttctcaatatattttgggttctctgtgtttcactttcacatcacatgcattggagtttgttagggtcagtcaatgagttggggtgcctgtgattgtgaatggggtgtatgttttctcacttagcggcaaaatttgccttctttcctccgtctccgccaacttacggcgttaaaaagagagaagatggtaagctaacggtggtctcgacgacggctgcgccgccgtcaatggccatttcgtgctcggacgacgacaactcatttgacgttctaatgattgatacgaaacgcggcaacaagattgtcgctttctatttgaggaacccttatgctcgtctcactctgctttactctcatggcaatgctgctgaccttggtcaactctatgatctctttgttcagctcaaggttaatctcagagttaatcttatggggtcagtcattttatccttattctcaaaaatgttaacctaatcttcttacctctcatttagtctttgatgggtctacaatatataaagttaacatttttttcactattaatgtttgtttgcttgtttccatggcttcttctctaattgctttttgtcagctcttgagatttttttaccatcgtttttagtggaaatggtccatctttgggttcatttttatttggttaagatctgccattgagatttacttttactctctgagtatttcgttgaatggttcccttctctctctcccttccccctttttatttttatttttattgttcggaattgttaaaggcaatattattagctccctcgttgttagttcttactagtccttttctacctttctttttatacatttcctcccttttccccttcgtttaaagtaatttatatgtatatgtatatacattatatactttcaaaaagaaaagtaattgcaatattattttctgtgcaacaacatcacagtgcaactttactatttttattggagttttgtgcctctaggatcttctaattaacatttccccttaaaataattgcgttctggttttccattcggctaagagatttcatgattcagaatgttcattctatctcactttctgcttttatttctcttcatccagccatactggatttgggtttttgagatttttgcgtttcgaagattctatttaagttttagagcatcccatttggttaaatcatgaattttctttttccttttaccttgcaatgtttcttgagtgagtttgggtgtttgttcatacattcaactctaaattttgtgaatgcagatatgactattctggatatggagcctccaccggcaaggtaaataattttttgtataaagcaaaaaaacagtaacttctacaagtaattattggccaaatctcttagcctactagtatgaattggaagtggaccaccttctcttatgtttttagggctaatggaccacttaaaattgactcatcatgtaagtgtaagtggtgtgttcactttggaatttattatattgggagatcaattcagtaatttgggtttgctaaggattgttaggattttcgaaagtgacttgaggaactttgctactagaatctttaactggctgaaatgttcaattgtttctagaatcgtgctacccaaagtaatcagagcaattgttcaagattttcttatggattctttaatactatatgattaaatttgggtttgtgtcatgaaatttatcttttaaaattttaacactcacttgaatcatttaagtggaatggctgtttttattaattgacgatcggtgtaacaaatttatttaatcaaattggtgtttttttattactttttcctttctcatgttggatgtggtcaattattatgtgatcttctccggaatttctttacaatagctgcaatatcttttattgttccgtcttctctaatggtataaaattttgatattggttttgtctttatgaaattcagcctagtgaatcaaatacttactctgacattgaggcagtatacgaatgccttcagactcaatatggtgtcagccaggaagatttgatcttgtatggacagtcagttggaagtgggccaacattgcatttggcagctaagttgcctagactaagaggtgttgttttgcatagtgcaattctgtctggtcttcgtgttctttgtcatgtgaatttcacattctgctttgacatttataaggtaatatataggtctgtctggcca

SEQ ID NO: 29808 - DNA, 4577 bp, Cannabis sativa
  modified_base (932)..(940): a, c, t, g, unknown or other
cttccattatgtggtacgtattgtgttcaaaccctccccttcacatattggaaggttttggaaacagggtatggaaagataaaattcacaaggtgaaaatgctaacttatggtatctttatcataagattcaactccattgaaaacagagaccgagttctaaatgggggatacattttcttcaatagacggcctgtgattatcaaaccttgggatccaaacacgattttcagaaagaagatattaagctcgctcctatctggatataacttgaggatcttgaccttaagtattggggtcaaaaatcctttttcaagattgtaagtcagttagggaatacactataatggttgataatgttactaaggagagggaacgattgaattttccaagggtactgatcaaaataatgatgaaccaggagtttcttgatttattcgagtttgaagatgaattcggtatgaacacacatgttggtgtcaagaaatgaatggaagcatgtagtttgctctcactactctggtatcgggcatataatagtcgactgtaagaagatttcaaaaggcaagcaggaatgggtggtcaaagaagataagaggaaagtgaagcctatagttgatgatgagggcttttaagtagtcagcaaggggaaaaagattaaagaatagggccagacatctaaaactaaaattgataatggatttcaggtgctaactgaaatagatgaagaatttaaggatgatgtaatgcagactatggtggggaacatgataacacaagagaggggggaggaccctctgttggttatggataaattcctagtctggaatgtccgaagagccaacaacaagaaaaaatagcaactcattagacaatttatcagatcacatgatgctggttttgttgggcttctcgagactagggtcaaggctnnnnnnnnnggaaccttgtacctcaatgtgtttaatgggtggtgcttctcgacaaatatagcctgggaccaagaaggaaagattgtcatagcttggaatcctttaagatttattttagatattataatatgcactagtcaattaatgcacttgaaaatatctgcaatagatggaaattatagcaactttctcacattagttgatggagctaatgatagtaatagcagaatggtgctatgggaagatctatgttcattggcaacaaatgaaaagtggctaatcatgggtgactttaaagccatattagctaaagaagagagagttggccattgggtgaattatcaaatggattctgatttcataagatgtatgcaacaatgtcaacttgaagatgtaaaggcaactgattgtttttatacttgctccgataaacaacaagggaaggataggatcttttcaaaaagaaataggatcttggcaaatcaacatttgtttgaccactatcctaatgctaaggaacttttcataaatgaaggtatctttgatcatacccctggcattctatccttatatcctaggtggactagtgggaaaaagcctttcaaatacttcaggatgtggaatacacatcctgaatattctacaaaggttttgaagtttagaatcaagaattcagaggatcaagaatgtatcaactagtcaacaagttaaaggccctaaaataagttctgaaagcgattaacaggtagggtttttttgatatacaagttgtgttttcataggccaaagtagagctagatgaaatccaagacaagattcaacttgaccccaataatcctgatctgcatagtgcagaagtggctgcaagggaaaagctgattgctgctcacaaaaactacaactttttccttcaacaaaggctaaagctttatggattcaaaatggtgattgtaattctgccctcttccatgccagcaacaagcagagaacaagacaaaatcaaatcttttcaattgaaagatggaataagagtgaatgaacttgcacaggcaacaaatgatttcatttcatattataaatctctgcttggatccaggatggcagataggaggaaggtttctagcaaggtgattatgagggcacatgttctgaatgagtcacaggctacattattgacaaaggaattctccatggaagatgtgaagaaggctttacttgagatccctgggaacaaagccccaagtccagatgggtattctagtttcttttttcaagacaacatggatctagtaggggaagatttattcagagcggtgactttttttctggaatcagggaagatactcaaggaaatcaacacagatgtgctgacaatggtgcccaatatcaaattccctaacactgtcaaggattttagaccaatagcctgttgcaatgttgtgtacaagattgcaactaaccttttgtgttctatgatcaagctaatattacctgatctggtctctacaaaccaaggggatttcattgaaggggggtttattgggcataatattatgatttgccaggatctagtgaagcactacgtaaggaagtcaaacaaagctaattgtatgacaaagcttgacctgaagaaagcctataataccattgaatgggattttgtggaggaaatgctacaggctcttaaattgccagaatcattcataaagttcgttatgaactatgtaagaactcctagattcgcaatcatgtttaatggctctatacatggtttctttaaagcaagctagtgtctcaaacagggggatccaatgtcccctttgttgtttgtgcttggaatggagtacttttcaaggattttgggagaaataggcaataagaaggacttttacttccatgagagatgctcaaaactcaagattaattatctggcatttgcagatgatatgcttttattttgtaaagggcagtttagaagtgtatattatctcttgcaaggattaaagcttttctcattgacatcaggtctgtagcgaaatcctcaaaaatctgctgtataatacagcaatatgccaaactatgaaattaataggatccctgcagcatctggtttttcttagaagatgacaaaaagatatctaggaatgattgctctgctcttgctgagaagatgacaacaagaatttgaacatagagttccaggaatctatcatttctagcaagagtagttttgataaacttagttcttgtggcaatacatgcataatggtcccaagttattattttacctaagaaggttgtgaggaatctagaatcaatcagtagggcgttcctgtagaagggccatcttgtgtctacagggcctggacttgatgcatgggaaactatgagccagtcaaaggcagcagggggattggattaaggaaaatacatgagttgaacaaggcaactatgggaaagtatatctgggccatttcaaataaagaggatagcctgtggatgaaatgtatacactgtgtttatatcaaggatagtgattggtggagttacaaggcttctgacaaagaaagttggtattggaggagccttgtagctttaaaagaccaattcaaagatttattagcaggccagcaagcaatgatgcagccatatagtgtgtccaagggattaaaacttttatggccaaactagaggaaagtgctctggagtcagcaggcctgggggagattgaacacaccaaaacacaactttattatattgatagaaattcaataagaactcaagacaagagataggttgttgaagatggggatagaagttgaagaccaatgtgtgctatgctctcagcataaagaatccaactctcatttgttattcgattgtcctattgcagacatgcctacaggatgtcaagaattggctacaccagtatgctacaacaacttcattaccaaggcccatcaggtggatagacaggtctaagatgagtaaatttaggaaacaagtgtatgcaacaactctatcttgccttgtgtatactttatggagagctcgaaacactagaatttgggaagagtcaagaatagatgcaggggcattaattagagaacttaagaagaatgtcatacagagaattagtctatgttggccgaagaaagttaaggaagatgatagtaggtggtttcaaagtttgtaaataggaagcaaattatgtatgtaaggagttgatttggtatagtttatacctgtacagtttatgattgtattaggccctaaacgggtgctacttgtttgtaaaaattggtcttcagcatcacaaatttctgattattttttgttgttctaaagttgtaaacacgttatttgattttgttgcttttttaaacacgtttttttcatgttatttgtatgttgaactttagtggttaaaatttgtgaattctttaaattttatatacagttgttttcatatttttatgttgttattaaatatttgttaacagttaattttaattttgttattactattcattttttataggtatacatattaataatttttttgatgttattatttagttatttaaccaagaaaaaaattagtatatctttaatttttatggggatattggcagctaaaccacct

SEQ ID NO: 29809 - DNA, 1894 bp, Cannabis sativa
atgaggcttgggagaggttcaagactctcatcagaaaatatccacatcatgggatcaaaaagtggatgttggttcacaatttctacaatgggctgattagtaactttagaacgattatagatgccgcagttggtggggtatttatgagaaaaagtgcaaacgaggtatatgatatgcttaaagaaatggctatgagtaactagcaatggccaactgaaagaagccaagcgaagaaggttgctggtatgctcgaggtagacgccatcactaagttgacagctctagtcgaggccctgacgaagctgatggttgttcaagcaaaacaggctcaagttacttgttataaaatactctaataaatgattataaatcacgtttatcaactagcctaaagaaggctttgaggtccccaaatactcctctatatgaagcaaggattcttccctaattcagttgacaagacattacccttgggataatatctatctttatagacacaggtaacaagataatcaacatgtgtaatcaacctccacccttgtttatcaagaaaagctaaattatagctcctaaagtccctcaaacccaagcccccaacaagtttgttacgacataatctcttccatcccatttaacacccacctcttcgctgatttgacttcgtttgccactaatattttgccatagccaacttaagactcgcaaaaacttcctcaagaaaaagaaacacgcgcatggcgtagctgggtaatacttgtacaaaagacttaaccactatcactacaaggtggctagatgatacaaacacacaatttgtcatacaaacaaaattatttttataatgtctcccttaacaaattatgatcatgaataaatcatagtgcatgaaaaataacaaaaagctcaaccaaaaaaatgatatatgccctcaatatgaacatataagcaaccaacgaaacactaacaagaaataaaaatataagattagcaacaaatttctttacttattcaaaaatgaaataactgacaacttttttggtacaacttcaactatcttccactttcttttctatggaatatgaagggctatggaagaattatacgtaataatgcaggcgttggacaattatacatacatagtgtcacgactcgagtcctaggagtcctaagtcgtggtagttatgtaatatctataacttagatggtcaaaggtcacactttgacccttgtgaaaaaataagacttacaaatgatcccttaatatgaattacaaaattacataagacctataataattaaaataattgagtaattttggatcactcgttagtatatatatacaacaataatattctcaaagttatgtagtcaccaaattgttagaatttataacctgagaaataccaagataatacttatagcatctatcatattcctcctccctaactggtcatgtctatataaatgatacaggtcatccgttaataattagatacatatccaatctttaaagaagagttaattgataattatggtaagactaaaataatctcatcgttctccatcaacgactttcccacatttacaagtatccaactaagttcctagaaggaaaatatagggggtgagcttataaagcccagtagaataaaactaatatcaaaggacctttgatttaataaaaattcctacatggttagcttttaaaataaaatacctcaacatcattatcaaaatgtataaataaagtatagagaccataaataatcacaaaatcaagcgtcaaatgcatattacactgcccactagatccctagctctcaataccaatcataaaaaataacatccaaaaactgggtagtcgcacctgataacttgttggaaattattttac

SEQ ID NO: 29810 - DNA, 1558 bp, Cannabis sativa
ttcgagagacggaagtgtgcacgaggcacacagtcgcgcgaaaaatgagcccattgttactcggttggttggtaggctaaccttagcttagagaagtctagttgtcacacgggtgttccgctgcctgaaaaggtgagctcgtgacactgatggttgcatattagggatctcaacagcgaacaaagtagtatcactaaaattatgcctatataatatattaccaaaaataaatcagttcctcgtattttgtaaaatatgtcaaaataacaagattttgcatttatttatagggattattttcaaaaatattaatacctaaaaataataaaaaaaaaattccaaaaacagaattcataatatttttaacatttttactaattttttacaaaaatactagctaacagcagtattgttttcgtggatatattatattatgttttggcaacgtaaaaacaatgttgtttaagaatctgttttttgtatcagataacagtatcaataagaaacaaccaattataccggcacgtggagagtccaggttggcgagttggttgggaatggaaaggtgatgaggtaatatggaacatgtggggagctgaagcaagagaacaagggaattgtgcaaagttgagaggtgaagaacaacttcctcattgttgtgagaaaaagccagaaattgtggatctcatgcctggaacaccttacaatctccaagtttccaactgttgtagaggaggatttttgggttcactcattcaagatcccacaaaccatttatctacttttagaatgattgttggagatactagtactaataataatggcacaataaatatgccccaaaacttcactcttggtctccctggctacacttgtggagatccttttcaagtctctccaactaggttttcccaagatggtggtcgacgatatacacaagctcttggtacgttacctacctatatttatatgtaatatctctattgcatagtattataataactaatgatgtacatacatatatatacattttattttatttacacatgttaatttcaatatcaaaaagttattttacatacaattcttataatctatatactacctgtgacttttgtaatattacttttgaaagtaacttcctttctgtttttttttttctttgaaagggaaagtaacttctttttaaaaaatatataatatatcattgtaataaaaataatatatatagagagatttaagttaagtgactatttcacaaatacacaaaaatattaagaaaaaaattacaaaaatatagttatacgaaattttaaatatatttagaatttatttacaaaattcataatcttttgatgtatttttatatgttatatttttgttaatttattgttttaatttttattattaattagatgttatttttctgttacttttattttattttttttgttatttttgtattatttttagagaatacaaaaaaaaaaaaatatgtagacatattagttaaatcgttgtctattttttttttttttaaagtgaaaaaaaattaaca

SEQ ID NO: 29811 - DNA, 4534 bp, Cannabis sativa
ctccatcatccgtggtgaccagggtaaagatgaagaattttccttgccatggttacctagggagtttcgaatgcttctctccctcccccaatcaggtggcgactagcccaagagaaggttactatacctagtcgggagtccataccaagcagggtacgatgttgccctagctccaataattgaagaggattgcgggctattgccatataagcccgacccagttctcccccaacggttcaagtatttttccgccctatgtgttctatattctacacaaggatggggcaagcagtccccgcatgacaccaattggctctttgatctaaagtcaagtcccaaacagaacaagtcaggatacttctatttttcctagatcaaaaagaaatggctaacaggcaccacgaccaccgagttgaccaagatagggggctttcaagatgaatactactttgtcaaatgaatgggcaccgttcacagcagcttctaacaggtgcagtcctactgccgccctccgttcacactagagctcaggaagagggcacaaaagattcttgaactgcgttttgttgcacgaaacatctctctcttgacttctgaggccaatttcatcaagtacaatttttttccgcctaattttataccgaaggctgtgaagaaggtaagagaggttggacacgaacaagagactgcacccgaataggagactttgagaaaaatgaggaagaaggcctctccaagaagccaggtacctgctgagcagtcgattagaattagggaagagcctaaaagacctgcttagcaatcttccccagcagtaggaaagggaaaagtcgtcctgacagagtaggagccaaaagattccttagatgatgagcctccatctttacttgttcgggagaatgctcctgcatatgtgtagggtattttaacttatatttagttttttttctactttgtcttatgtcatacttgtttttaaccttctcgtttgttcatatgcagctatgtctcagaaggtgttccaggctttgaagaagaggtcaggtgacagctccggccggacccctctgcccaaacgatcaaaggctgatgagataccgctgaagaagaggaactcagtcgagtctcctattgacatctctgaggaggtggtgtccaaggtggatccaccacccgagaagacctccaagtcaaaaggtgccaagggaggtagcacagataggtctggtctgcctaggccctcaaacactcttatcgtgcgaaacgttacaaataagaagggcaaggagatgcttcaacactaccaggattagatacttcctgaggtaaatgaccaactattcggtggggacaagatgtccatggatcttctgatgggcgggctcctgaaggagcgaccccagtactttggtttttattttgtccttttaaccgtggaagttttatccttttcctatggagctcaatttgtagatggcctacacctactcccgagccaagtctactaccctgaaaactatcaccacctccaccaatctatagaaggaggtggatgcagtaaagaagaaggtcgtggtcgtaagggcagagctgggtgaggtgaataaccaacatctagctaccaataatcgaatcgaggagctgaagaaagagattcaggagatgccatctaccgcccatcttcaggcagatgtcgagatctgtccaaagaggtcaatagcctggaggatgacaaggagagtctccagactcttcttgcaaccttaaccacggataagacgaaatttgaaaaggatgtcaaatccaattagatgagggaggaagagcttctgaaggaggtcgagagtttggactctgctgccctagaacttttctatgaattgcaaaaggctaacccaaaaggaatctttgattacctcggtgataccaaagaggcgtatcttagttattgtgctgccagtttgacaaagaaaaccttgaggcagccaatgccacagcttcgaccggccaaaccactgagactctggcctccaatgaccaagttgactcgtacaagtaacctgggactcctgctatgtgatcctttttgtttttctttttttattattattttttggcccatgagcctttttcaaatacattatggtcgaccaagtggcctttaaacttggtaatacttcattttattttgagacaactaggtgaccggttagcctttaatcccgggtttatatcgtgcttttgtcatccttttttctttaaaaaaaatgaattttttaccttgttttagtaattgcacatgcaaactactctgtgtttttttttgagcttgttatttactaatgctttgtatgggtacagttgcccccaagtgaccgagcaaacttataactctttgtcacttcatttcacaagttcaatttttgtctgtttgacttttgggttcaagcagaccctttgtacacattttaatggtaaatacataactttctataaaagtaattgacacaattagaatgataattaatatctttattcacttattggttggaataattttgttaccgtagtaacttatatttattgaattattaaacctattacatgatctaactgatctgtagctaatttagactaaaaaaaattgtacttttaaaacagtactttaaagatggtcatccgacttgagttctagttagtttatccaaacctttgagcgagatccgcctagaaggccatttacttaagagtaaatttctagcattgtgtacttgaagtggtcatcagaccttgtacacttactggtagtatttccttaaatgttccccaatttcaatacctttgtactagaacgagctccatattttcgtcataccgtcccaacttatatgctccaaaatatgtgacttcaacaacttgatatggtccttcccaattaggtccaagcatgccaaccatgttgtcttttgagttcaggaatactcttctgaggaccatatttcccacaaaacatttcctttgcccttcactttaaatatcgagctacattttgctgatgagccactagctttaggtttgttgttgctcgtttctcttcaatcttgtcaagtgtttctgccaggtgggaatgattagctccttggtcttagcttaatcttctgtgggatggaggctctaattcaacaggcagcatggcttcataaccaaaggccatagcaaagggtgtttgcccagttgttgttttctctgttgttcggtatgaccacaatacttctggtagttcctccagccagttccctttagctttcaagttgtttttcatggtatctttgagtgtcttgttgactgcctcgacctgaccatttgattgatgttgtgctactgcgaagaaacttttaatgattcaacgtgtcacagaagacaatcttgtgcggaagtctaaactgacatattatgttcttcaccacaaagtccagtacttttttagatgtgattgttgctaaaggctcgacctctgtttactttgtaaaattttctactgcaaccactgcatattgtaccccgcccttgcccttgggcaattatctgatcagatctattacccaaatgggtaaaggccaggactttgcatctgtattagctcgttgggcagtgtatgggggatctttgaaaatctctatgatttttcacatttctttatacaggcctttgaatcttccatcattgtcggccaaaaatatcatcgccttagtattttctttgataggctttttcctgctgcataattaccacaaaatctatcatgtacttcggacaagagtcatgtagcttcttcttttgttacacttttgagtaatggcatagagaaacctcttctatacatcacaccttctattatgatgtaccgtgtagctttcctcatcattttctatgcttcattcgtgtcattcggtagtactctagtgttaaggtaggctgctatggatattatccagtttggtgctgtgtctatcattttgacttcttctgcacaattgatactgggttcttctaagaattggattgggactaggtttgccttatctgttatggtgctactcgcaagctgtgctaaagcgtcatcagttgtattttcttctcttggaatcttcctgaaggattgacccttgaattttgcgagcaagtcttgtataatgcttagataggccatcattttctctcctcgagcctcgtactctcctaaaacatgattcactaccaactacaaatcaccacagacctcaatgtattcggcatacacctctcgagcaagttttagtcaaactctgagagcttcatattctgcttcattgttggaggccttgaacccaaatctgattcactactaaaaaaccccaaattcccgtcagttttaaactgtcggccaaagaattccagacagtccataaaactgtcgcctatacgagcgttgtagatacagggtagaatagacaatggtttaaaaccgtcagaaaaatagtataggccacggttt

SEQ ID NO: 29812 - DNA, 1778 bp, Cannabis sativa
aacaatcactcaaatacatgtccattaaagtgcatctcaattcataagctttttcccattctaggtgagtttgcctttctataattgcttaataaagtaatctttttcaaaatttcaatggtctccttgtataccatattgactatccagtcaattataaagtactctccatcattattgtatcaccttatgtaattcatgtaatcttttttacattagtgataccactacttatcttgacgttcttttgtacgttaccatggtaacttccccgcctcaagcctccattgggcccttactcccatggaatgatggttcttatatatgagttcatcactctagcttcttcctggactgacgactagccccacagacaaatccaagtgtttctaacgtgcattgctctgactcgcacacttcatggggaaatttcgtaaatgaaatcaccctaagtcaaggacactcaaccatggagttccttcattttgcgctaccaaaacaagatgcttcttgctaacataggtagtcccaggcctacattatctcaaaattactacacaattgctgccttcaattcacttgggattctagacaatactcataagttgttcaacctttgctaacgctagatcacttctaaacaaaagcatttttttattttaatcaataagatcaatgcctctattatttactcaagccctatattctacttaggaatactaacaaatttaattgatgttgtaatttttctaatctttttaccgtgttagatgaactacgactacataacatatatacacagtccatttagatcttttgatgttcccctattgagagtacaatatttaataccaatggaaattataatattgcccataaattctaacttaagtcggccgaaggatcgatatttgggtccccttgaatcataactggcacttgggcaggacccgtacacttttctcctttaacatcagtctttcttaactacaggtcggttcttttcacatgactcactaccccacaataaaacaagatttggctctacattaactcaaatagctccttttttcatcttgaacactaaaaataaggtcgccatctcttattgtcacattgatcaatattttgttcaccttggaacgtttttgttcttccctataattagtggttcatttagtttttcctccctgatttgctcgtaagttagttctataagttttaccacatctagttgcacaacaagaagtattggtggtacaggaatagacacaagatgggcctgttattctctcagatttcggatctgtttccccttgttgtctaatcatatcatgcacaaaaaaatttaaatgcttctattattactgcaaaaaaggattatcttccttaccatttaccccgagctgaaatagctcgctaatcagactattcgattgcccttactacataacttctcacacatttagtcaacatcttctaaccatttagaactcagacggatatcaatatcaatatgcatacaccatacacatattcttatcataatcatcattagactacttctccaaacatactttataataatctaggcagaaaatcaaatagtaaataatataaatacttactataccatgagtgtaaagagcgcttagtttaaatttggaaattagcagataattaggatttaattatgaaaattatttatgtttgtttaaataattatttatgttgatttatttgaattcataatgcatttttatgtcatatagtgaaat

SEQ ID NO: 29813 - DNA, 2549 bp, Cannabis sativa
gaaaaattactaattagccttctaataataatagcccacactgacgagcaggcttaaaccgtttgatctaaaatcgagaatcaagatttctatattgatcaaataaaccagaacagaaaaactttctatcataagataattcaggattgaattagaagaaaggaaggaaaatgaaacaaaagactaaactagcaatcatttgccaataataaattttatacatatataatataaataaagtttgaatgcaaaatcatttcatacaatcaggctgcattaaatcacatgaagttatgcaatcttatttaaagtgaatacggcattagcaagatcttaccaaagctgcaaacgaactgtccgatcttcaagatacattgttttggacaaaaagtcgatgcctattgtggcctgtaaacaacattattgcatacccgaaacatttatcttaatttaaataaagcttaaattgcaacacattattaagttagcaatttcaatatacaaggaggacaaaatgaaagagtagtataatgttgcataatttgctataaagtttttcgcaatcaggtaattcaaaaagattaaacacgatcttcgctactttaaagactatatggagaataatgattaataatacatttcatttaccaaaacaattcttaaattaattcagctcataatcttttatcaccaattctgactttctttgtagtaagatcaacatagaaacgtgtaacaaattaattcatttcacaatctcataatatatttcttcaaaaacaattgtagttcacatttttaggtgaagtatatattcatatataaatttataaattttatatagtctggaatgaaaaacaaaactgaaaccataaaagatcaagatcacgtataagattattgtattacctacatagtgttaagagaaaataccaagaacacaacgtaaatcaacgaaaataaatagaaatttcgaatcgaatagaattgcaatgaaaaggaatgaaagaaggagatatgcctgataggtggtatcgaatttgtcgtacatgaagcgtgtaatgatgctggtcttgcctacggattgatcaccgagaaagacgagcttgtatttggccaaaggagacaccgttgccatttttgtgaggttctttgatttttcttttaagctaatttcaaattggcaacaatggcggaaattaagaacacaaagcggctttggatctgaatctcagaaaaattctgtgttcaaagagaaaaaaaggatcactatataattgtatatattatttatttatttttgagtttagcgtaatttatatatgaggatgtaatgtattaattagcataggggagaagaaaccgccaaccacgacgaagacggcaaaagtcatcatctatgaattttatttcatacccaatttgccctttaatagtgaataaatggtccatttgctataatgttgtattttatattatattttttcaagaaaattctacaatacacacccttataataggtgtactgatcggtatctatgaaaattttttagtctaaattttttcaaagtcgtgtacgttatagttatttaagacatcttacaaaattttaagaaatttagaaaaatttaacacgttaaaaacagtgttcaaagactctgttgcacaggtgatttttttattttatacgcatatgaaaaagaaggatgacgtcatacagttgagtagacccgagtgatcatagcagtcgatctgggaagagaccctaaccctgcgcccaggttgacttcagaagcttcggggtggaagttcagatttcaataacttgaatccaactcactatcttttagtactttgtaccatgaagacatggaccaatctaatccaagccccaagagctaaaattacacgaacctgcaacccgaagccaacttgtgcacttagggttttacgcccaagttgacatttccaactaaagttttagtttttggaaatgtcttagtgcaaatgggtcaaaacttgcattgagacatcaactagacataccactgacatatttgaggcattataattagaattggagcaagttcattattgagcatccgggacctcgagcacctcagcgcccaggttgacaatctattaatctaggcgccttccaaatatcagaaatgatccgacttttgcatcttcttcgtattcatcaaaaacagagaaatagtctttcagggaagaaacaacacttctcgagtgtcagaaagaaggctcagagctcaagttgacacctggggctggcccagcgcccaagttaatattttgttaacctgggccgatttcgatgatgttttctgagaactcttccgaacacctttttcgtttttaaaaaagattgagattaaataaataaataaactaaaataaaaaataaaaatactagctaacaaattgttttagtatgttgtatggtaatttgattaagttgactagcatatatattgttatacaggcttaagtaattgttaaggcttgttttaatagttttttttttt

SEQ ID NO: 29814 - DNA, 1193 bp, Cannabis sativa
ttttaattttaaaaacaaaaaactgattaaaaaaatgttactaaacaacactaaattcttttatatttttttacagtattaaatttcagaatactatttttctgtaatttttacattatttttgttacgagaaaataatataaaaatagtcttttcttggaaaagaaaaacaagtgaaaaacttataaaaaaaaaaaatcagtaaaaataaaaaataaacatccatgataaaagtgtagaagaaatccaattttaaatgaagtgtgtgtaaattaataaataatctttgaataccaagaacaagaacataggaaaggaagtgatatatatttggttaaacaattaataagggccactcaatgataaggggtacatgtcccattattgcgagtactatactactgtactgttttgtttttcgaccagagaagtcataaattttttatgtcctaataaaccataaaatccaaaattaaattaggcagggaaaattaaatttcagttaattatattataacattcatatttccatgacaccatttaagaaaaaaacaaaataaaattaacaacttctatgatataaaataactatgatggagatgaggtttgtaatgttaaaagtggctacgtattagtgtggtcgttctaagtagaggagggaggtgtcgattcatctaagctaattcattggtggaatggagtttgaggtcttgctatgccactaaaagtgaaagtttttgtttggcatatgttccatcgacattaccagtagcaccacaacttatttctcaaaaagttcaagtacctctttattgttcatgatacggaaatgaacatgaaactcctaagcatgttcttttttcctgttttgggttgactccagtgtggcagcagatggggatctggtcggtgattcgtcgaggtgaacatggatcaatgcatgatattctcttttttctttttgaggagctatttcgtgaagcttttacatcactgatgacaacactttactggattttgtatgatcgaaactcagtgttaataatttggttgcaagaaatatctagattagatgttattgtcataattgtcgaataatcacctagtggagtttaaggaatactgtaggcagggccttaatttggggttaggccttgtaaattcaactgtaaactgacctaatcgatggactc

SEQ ID NO: 29815 - DNA, 1803 bp, Cannabis sativa
attctcttttgatcgtaatattttttagtataatgtttcggatgaactaaaatctttattgtactctgaatattgattaatgaatttttattatttcattaaaaaaaaacatgagttggaatgcaatttgtaacagaaatgtatacactggtcgtgaatatagaatattgaatgcttggaattgtgggcttttttactatacatttatcataaaagcctccctcgcaattagcaggaggaagttacattatgtatctattttattttttttatatttttatattttttttttaaaatatattcatttttatagattatgttcttattatacttcttaggttaatgtaaaatatgtgctagactaaaatgtgtctattttaatgaaatataatatgaagatattttttattaataaatacaaaaaagaggtattactcaatttactctcaaattagtattaacaaattaaacatgtcaatttacataacacgaatgtgaatcagatacaacataaattgtcactcccagttgcacaccaacataatcatttaataatcataaatatttattattaccatcaaaatattgagttttttaatgtgagatgctcaaaccatatctttttgtacctttcaaactcatatcatgtcaaacaaattcaacctatacttagagcactaatttgaaaacattgaaaagctcaatattttgcatgatacaataatactgggcttacggaccatctcaaacttattctataatattgttggcttcatgacacaatctatatttttttatggcacgccactcgtgtttttgcgagcttgtcaaaatactggtcgagcgggcacaacaactctcccctagtgtcaaaaaagcaaaagaaaagttgggaaaattaatccattatcattcatttaaaaagaaaagttaacaattacacagaaaacaattaagggtaacaagttattttatactgttttccacatttttttttatttttttctcataaaataacttttaaaaaaaaaatcatacttttacaaatttgtttattaaaaaccctaaaaacaaaaattctcctaaaaatattattataacaaacttaataacacgtttattaaactgtaattggaatcagagaaatcaatggaataaatgaatcaatttataatataaaataatcataaataatattttattttgttgtttacaaactgaacgaaaaagaaaacaaaattattttattttgtttacataactagaaaaagtaatggaaatgccttagtttgacgaaagttccgttgttagaacatgtaattattttttatttatatatttttgaaaagtatatttatcttttttatttttaattaataaaaatataattaatataaaataagttaaagaaagagaaatatatttcatatcaaaatgagtaaagaatttttccttttattttctccttaatttaaatttaagtgagcctcactaatttctcctattaaattaatttcacttgattcccatcgaggaaattatattatattcccattttactttatttattttaattttaatatttattttcatattgtttaagatatagtcactttcataaatgatgttctcattatacgctttaggttaatgtaaaatatgtactaaacttaagtggaaagtgagagtatactggacaattcacttaaaaaagtatgtatattttaatgaaatataataccaggaaattttttattagtggatactaaaaagatatatttttgaggggtaagttgaaaaatg

SEQ ID NO: 29816 - DNA, 1840 bp, Cannabis sativa
cactttagtgacatatattttttttaattaaaattgatgataaaaaatgtgataccctaattattaatacccattccttccacttaatctcacttccccattattctctcttcctatttcatcattttttttcactctttacttcctcaagttctctctatttttctccattaacatataagtttttttttccttgttcagttcttcttcttcatcttctttttatttttttatttagtttctgaagttctttgccaatgtatgctatgcaaaccaccaaactctctaattgtatggtcaaccgaattgatgggctggttagagatttctggtggggctttgaaaaaggaaatcatgggctccacttaaaagcgtgggacaagctttgcctaccaaaatctcttggtggccttggcttccggaaaactagagaaatgaatcaggcgtttctggctaaatgggggtggcatatcctaactggtagccaatcgttgtgttgcagagttctagctgcgaaatatttaaaagggaaggattttctcaaatataagtataaaactctgacactcttcttggtggttcgttctggtggaaggaagagtgttgtgaaggctaactcaattttaaggaaatgtgcttgtaaactggtgactaatggtgagaatacttctatttggggggatccctgaattcctcactataaaggtttttgtccaaaaccaatcaggggagatgcgactaatctcaaccgagtgtctgatgtgttgctatccaatggacactggaacgttaataagctgactaaaagctttgaccatgaaactgttgctgctattttaaaagggggccacccttcaggtcatggctctgacagatggatatggactcaaacaagtaatgggcaattctcgtgtaagtctgcttatcttgttcaagctttggatagagccccccagtgcgaggttgctccgaatctttggaacaagctttggaatagcaaaatcctggaaagacactaggtcttgtggtggtgtatcctgtcaaatgcgctacctataagatctgtgatcaataaaagatttcatattgaggacacaagttgccctctatgtggtacaagggaagaatctatggaacaattgttcctttcttgtgacgtggcttttcacttatggcgatcttctccttggggtttttatcctgtttgtgatacaggcatccgagtttgggattgggttaagttcatctgggatctaaagcgtagaggagtccaagtcgaggacgctttcttatatgcttcgatgattatggatacaatttggagggtgcgaaatgataaagtccacaataattgctttgttgatgtgaaaaaatgtgttgatgatatttgtatttcttatgctgatttgcatgcttccttattccctagccctacttctcatctcaaggaagcttggtcccctcccccaggattggattaagctgaattgtgatgtaaaagtgggatttgaaaatatgtgtattgtagttgttgctagaaatcatcttggcagagtgattagaattcagacggctcgggtggatttctctgatgttctttgcggagaagctgaggcgtgctgcttagcggtatcggttgccatggaaattggatgccagtttgttatagtggagaatgactcgagggtggtgatcaatgctatcaatgggaaggagtctcattgggcacttgaaactacgtctccttttgtactaagtcttctccctcgtttattagctgtaatttctcttttattagtcgaaattgtaattttgccgctcacaatgtggctagatgggc

SEQ ID NO: 29817 - DNA, 1011 bp, Cannabis sativa
attcgttgatttttatgtgagttaatacgtgaattttagttacaattgaagttacttcattaattgttatgtgatagttgttatgtggatttctcatttctgtaaaacatataaaagaattgctaaaaaaaaaatctctataatatattcatgaattcaatatttaattaatgaagtaactgttggaaataataaaactaaactttacacctaaaattaattcaaaaattcagtaaccatatatataaatatacatattatatatgaagtttaatgattaataatactcgcccgtgatgcctaagtaatcaccatttcctatatattgaaaaaaattaaaattgatcgatcatgatcaaaattaattagcaatatatatttttgaatattcaaagcataatatgatggtatataagtgacacacaacagaatatacacataatatatctagttaattttaatgttagtggatttgtatatatacatatatatatacaccatatattaattcatatataagtaggtgatatcataataaggggaaatagttgattttataatttatatgtatggtgggaggcagcatatgcaaatatattcgattatgtcaaatattgcacaagtgagtgtctcattgttattacactcatacataatattcattatgtctcaaaattattatatatcataattattgaatccatccaattaattaagagagctgttgcaatgcatcatgatttttcatagcatctttatttccctctcttttacatatgatttattccttacgagggataggatttacaccttatttatttatttatttattatatgatttacattttattaaaataaagagaaattatctcatatactatttttttaaaaaaatttacaatttgatttgagattctaaagtaatttctcctgtgatttctatgtgggttgctaagcggattttagttgtaattatttaggttactccattagttgcaataggaatttcta

SEQ ID NO: 29818 - DNA, 2763 bp, Cannabis sativa
atgaaatggcagtcaatttccacatgctttgtgcgttcatgataaactggattttcacttatgtggattgcagcggtgttgtcgcaataaagcagggcgggagtagtaaggttgacaccaaaatctttgaggagagcgatgatccaggtgagtttagaagtggcattagccatcgctctatattctgcttcagcagaagagcgggaaacaatttgttgtttttttgatttccatgacacgagagagttgccaaggaaaagacaataacccgaaattgagcgccttgtgtcttgaaaagtcccccaatcggcatctgagaagaaggatacttgaacattagatggggaaaggcttgtttcagcatatgttgaaatagtaggtgttgtgttagaaggaaaaaacagtccttggccaggggtggatttgagatattgcaagatacgatttgcagcatggagatgtggaacccgtggacaagttagaaattcactgagatggttcacggcatatgaaatatcaggccgtgtaatactcaagtatataagtttgcctatgagacttctataggctgtaggatcggggagaagattccctttatctttacttaacttgaggtttgtttccatgggggtggacactggtttggcaccagtatagcttgtatcttgtagtaattgaagtgtaaagcgtcgttgagagactgaaatgcctttctttgtgcgaccaacttcaagaccaagaaagaaacgaatagtgccaaggtctttaagtttgaatttgtcatgaaggtatgttttgaagtgtgatatggcattgtcgttgttgcttgcaacaactatgtcatccacatagatgagaatggccaagaatatattgttggtcttctttatgaacaatgaattgtccgagagggattgagtgaaactatccgaaatgagagtttgactaagtttgttaaaccattgtcgtgaggcttgcttgaggccataaatgcttttgttaagtttgcacaccgagtttggaggtgctttataacacggagggattttcatgtatacttcttcatggagatctccatggagaaaagcattattaatgtctagttgatggacattccaattgttcatggctgctaaagctaaaaaaattttgagggtgttgaatttagctacgggagcataggtttggcaataatcgattccatgtcgttgagtgaagcctttggctactaaacgagctttgaatctttcaacagccccactttcgttatatttaactttatatacccatttgcaaccaacggctttatggccgggtgggagcttggtaatgatccatgtgttatttttttcaagagaagtggtttctttatccatggcaagaagccaatggcgaaattgagccgcttcagcatagcttttaggttcaatttcagagtaagctgctaatacagctgctcgaaatcgagggtgtaatttaatgtatgacaagaatggatcaattggatgtgatgtagatgaggcatgacaaacatagtcattgagatgtgtaggtttatgtaaaatcctgccagttttggtagttttgggagctactaagatggcaggttgtgtgtgagaaccagtgttattggtttcggatgtggaagctggagggctttcagcttgtgggttatgttgggaaacaattgcagcaggagaggttgtatgtttagttggggcagtggtgatggggactggtgctgaggggctaccagttgctaaattgtccactggatgattttttggtgtagaaaccaaattgttaatatgggcaatatgatcaatatgatctggtgtgacaccagatggtttgagggaatcggttactggtttggaaccaggggagtgtgtacactcgggtactggtgtgaaaccagatggagaaagtgaatgttgggtaggtttacttgggtgtgctttttgttgaataggtttaaatgttggaagcacaatatcagtaaacaatttgtgtatttcagatgtggatgttgatgaaaccatgggaaaaatagtttcatggaagacaacatctcgtgaaacataaatttgtttggtttcaatgtctagtaaagtataggcttgcatgccatgagggtaaccaatgaagagagaggccctactcctaggtgtgaatttatgtcttttggaaggaagggtggagccataggctaggcacccaaaacttcgtaggtgttcatatttaggggctgtaccatgaagaattcggtacgaagttaaaccgttgaataatttggagggtgttctattcattaggtatgtagccatttggactaggtaggaccaatacaccaagggtaagttggattgaaatcctagtgctcgggctatgtttagtatatgttggtgttttcgttccacaacggagttttgttgtggtctttccacacaagagtggtaatgaataatgccctttgaggcaaaaaaagattgtaagttcaattcttttgcattgtctgagtgaatttctttaatagacaaagagaattgagtacaaatcatattaaaaaatttggaattatgtgttgaacatctgatttgttcttaagcatgtaaatccaagtgaaccttgacttgtcatcaactatggtaaggaaaatatttgtaaccttctacagtagtgatgtgaaaaggaccccaaatgtccatgtgaaccaaatcgaatatatttttggcaaagtgattattagaaataaatggcaat

SEQ ID NO: 29819 - DNA, 1793 bp, Cannabis sativa
aatatgaatgttgaaccaatagtggttgtataccttattattttgagcattccatatagtgtcattgatgcatagaggaaagagtattgttataaggtattaaggtgtctaatattattatgagatggtgttttacaattgactaatggttatgtataatttttattatactaatattgatattacacctcacgagagtactagacaccatgggtatcctttagcgcttctttagaagaaaactccatcaacgttagcacctctactatcaagtagggttgtacataaagtttttaaaacgctcaatctgaacaacctgcttaaaccaaaccgaactaacttgacgaaaaatgtaaactgaaaattccgacgaaaatataacccgctcaatccaattaaaagagtttttttatatatatttttattacatattctgtatatgttatataatttatatacataattaaaaaaaattagaaagttcaaactacaatatttcttttatggtgattgattaaattttaaattcaatctatatatctgttttattatcacaaataactaaaatataataattgaatatgaaaaaaaatattagtgctcgatttgggcagtttaatccgaccaaactaaccaattcattgggcgggttgaatttttttcttaattagacgagttgcacttagaattttgtaacccgatctttacgttgggttgaataaaaagtaacgtaaactaaccaaaccgaccaacgtactccctactatcaagtagggttgttcataaaaatccaatccaatccgcaaagtgtggatatccgtacttgtcggattagattggattgtattagaaattctaaaattcgtacttgtacaagttggatgttgattgacatgtaaaagtaaacgatctaatccaaccacacatatttatataatttaaaaatgaattataaatacaattaatattttaatgtaaaaaataataatttaaaatctaatacatatgatagaaatatatttcaaaatattgtagatcaaatgtatatttcatcataatttacaagtaaaatataatctaaaacaaaattcaacatttctttatacatataatttttttcttcttgctttaaattttttattttttattttaatttgttgctggagacataaaacaacaataatttgttttattttgttgttagttatgtgaaaaaaatatttttttaaagaaatattaaaaaataatcagtctaaaataaacgatctaattcgtacttttgtggatttgattagatatgtggattggattagatccaaaatataaaatctgcacttagtgcgaatcaaatgtactatgagcaggtcctaagcctatgcctagggccgacctagcttaggggctcaaaaaaaattgttccctttaaaataacacattttcttttttactgattataaaataccatataatttttttttttaaataagggcccaaaaatattttttttttttttttctacgacccactaaatttcaagaccgactctgactatgagtaaaatagtgcagatttgatcgaatgaacaccctacccctactatcaaggctctagaaaaacttaacccaatctcgaaccctcgccccaaaatcctaatttggcataaggccccaaggagaggctctccaaacaatggggcacctgatttagtatgaatgatgaattattatatgggattattttacaaaaacataaaaacaacaaaaaattttttacaaaaataccgtttcacggaa

SEQ ID NO: 29820 - DNA, 1850 bp, Cannabis sativa
  modified_base (163)..(165): a, c, t, g, unknown or other
acattataattatttaagatatcttataaaattttgagatattcagaaaaatttaacacgctgaaaataaagttcaaactgtctgtttcatgtgtgattcttttattttatatacgcgtgtgaaatagattgtgaacattacattttatattgtaaattattnnnaatttttcaaaattttacaagatgtcttaaacaattataacgtatacaactatgaaaagaaactgtacaaaaaaaaaattctaaatgccgaaacagataagggtgcaccgaagtaccctttaatttattgtgtgtaaatttaaatgttaatactataaattattattattttcaattatgatttaagtaaaaaattattacatattcgtcattaatgtaatttttttctctagtaatgtaatattttgttattgcaatatgatatttaatttatcaagttttatctaattttacagtattattatctataaattaattagtaattttatttaaattattaattaaatattataattgtagtgattttagtaaattaatataattataaaaataatattttattttatttaaaaattaatataataataaaaaatattttttagtgtaaattttggtgtcatctttggagtggaaatagtttttgacattaactttagtgtatatatattggagatgttgttaatatgtagtactctatttattcaaaaaaaaaaaaaatatatagtataaatgtcaaaattaatatctaattataatatgtttttaattttcaattataatgttaattataatatgttaattttcaattatatatgaacattttattataaaacataagtagtgtacagaaaaatagagcaaattcatccaaacaaaattttaaatatcagtagatgacatgaaatagaaataatttaaaaaaattggataacaaacttgaaaaatcaaaaagattaaacgactttaaaataaaaatagacacgaagcaaaagtaatccaaaacctagcatcacatgcatctacaaattttgctcaaattaatgagtgtaaggaccctatcaaagcttcccactcctttcatcattaagcaacacaataaaaaaacctgtaaaatacacaacaaaaaatcaatatagtaatcgaaagaattaaaaaaaaaacttaacaagatttaatgatccttctgtactcttcaaaatctccaagtagtcttcataaacttacaaaaacatagtttaatattgtcaaaagtgagatacatgaggctacaaggaatttaagaaaaaaaaaaacacatgactagatatgaatgctttatagtttatataatatatttaacaaattcttatgtaatcacgaaaaagtttagatttttttatatataaaaaaattattattacattacactgatggattgttttgtgttgtgaaatgttttaatgggccggaatggttctttcacatcctcatatttggtatggtattgtttgttgtaaacgttgaaaaattattattgaaaagattaatttgttgtataaatatttaggtttaactctcaattgtaaataaataattaaattatatttttgaaattttgtaggtatccaaccattaaatgtcaaatcattatctatatcattttcttgttggtatatataaattattttttaaaaaaataaaaaaatttatgacttggaccaattcaaaattgtcgcgtattaatttaattaatatttaataatcaggtacctataaacaattatctcataaaaagggtaatatacactacaaaaaacagctaattaagtgacaactttttagtcacaacataattttttttgtga

SEQ ID NO: 29821 - DNA, 1846 bp, Cannabis sativa
  modified_base (1817)..(1818): a, c, t, g, unknown or other
aactctaaaagtgtatagtgacacttcaacgcgcgtcactaatgagggtgactggaaaaacaatttttagtgacacttcacacgtgtcactaaaacctttcgcattcactttctgcgtgtcacttgtcagactgagaaattaacagcaacacacaaaaagtgtcactatatctttttttttattactatttttgaagatatagtgacacacataaaatgccactatatatttttctaaaaaaatataatattgaattttttttatttcaaattttatataatataaacaataatttaattaattatatattaatacaattaaatatataaataataatttaaattaactaaatataattataaacaatactaaatttcaattaaaataataaaactaaaaaacaaatacaaaatatttttattgctgaaaatatttatttgtattaagattattaactaaaataatacagtctttacacataattttacactcaaattacaactgatatgaaacttaatagaaactcacatctgtttctataaaaaatacaaaaacatgaagaaaaaaaaaacacagatcaaattatttatccagtgttaatgaaataatctcaaatcactttcaaaatattacagtgtacactttgaacaaaataaacttaaaaaaaaaaatcagatctaaagtgtacactactgtcaaacatggcttaagaatgaaataaccccaagtccatgtttgaactcaaatcccacactgtcaaccacgaacatcaaacaccgggctggtcgaacccacgaacgtcgatcgtgtacccagaaccacaaaaacattaaaggcaagacccacgaggaccttcaaacgtcgtccacctgcatagatcaaagacaaagagagggggagagaaaaatcattaggtgtacaaaataataaatataccgattaagctagcggtatgggtgaacttagtcgacgtttgggcagcgaagacgtcaactgtggacataccgcgatagagcagaaggagatggcttgggctcggcgtttggaagcgcctgtcgtccgtcgatggagctctccttggccttgaaggtcgtcgtcttcaatggaggaggtggacaacactgacttattttttttgttaagttacatatctgaaagggagaagaaggatgagagaagatgaaaaagctagagagaaacaacatggaggcgcttgggaatggagagagagaaactattttagggttttaaaacttaccctaaatgaaaaaaattaataaaaaaaataaaaattgaaaatatctttttagagaggagagagaggaccagatgtgtcttttctttttttttttttaatttttttttttaaaaatacctatagtgacacgctaagtatgtggggatatgctttcctagtcattcttgacgtgactctataagtcagtatttttaataaataaaaaaatttgaaaattatggattatactttttagtgacgttttatatttttagtgacacacatgatgagagactaacaacgaaaatttagagtctatttatgcgcgtcactaaaaatcattcctaactatttagtgactcgcacaaaagtgagagtcactgtatagtgtcactaaaagcctaagttgtagtagtggaaacaagtgaccaagagtcataagtctgctcggtcacttggggggcacctatacatgtataaagcatttggtatagataaaacagtcacaattgcacaatgattataaacagagaatgaaattcattacagataacaaaggcacgtaataccgggattaanngctgcccggtcagcccgttgtctgtaaa

SEQ ID NO: 29822 - DNA, 2375 bp, Cannabis sativa
  modified_base (26)..(29): a, c, t, g, unknown or other
  modified_base (1686)..(1691): a, c, t, g, unknown or other
gagagagatagatagagagagagagnnnnagagagagagagagaagctttgaagtttagattttctttctcaattgcagctgcttattggtaaagataggaaatgttagggtttttatatgttaaatgggagagagaaagataatagtttactatataataaataaaataattattgggtgagagtaatagtccttaaaatattaacctatacacggtagaataaattgataaaatagtcaatttttttttattttgaaacttttttttattttctttttaaaaaaaagtgcctatgatcttttagtgtaggttatgaatcaaaacttatactcaatctgtatgtatattatttttaactttttttggtctcgtttattgttttagtgtcagcttactaaccaacacctaaagtcattatagttgtcagttatgagccaatgccttagagttagggtagtctttagtgtcgtttttttttcaaaaaaaaaaaaaaaaaaactgtcccttgaaccgataccaaaattctatcttgtagtagttcttcaacctaaatgaaccccaaaacccaactttccaaccatataaatccaaaacccagcaatctctcttcctctctcgggctcacaatcctctctcgtctctctctctttgatgtaaaagaataccgagccacaaggccccatctccgaccgtcaatgattgaagttgatgggtgttgcaactaatttttgaggacgacagagttgacctcaatctccaccaggtcgatagcaacggtgggcacctcgtcgatcagcttctgggattttattcactttggagagaccactttcattctcatttacctgttcttcttccatactctttgaattttttggtgaagaagcaccaataatttatgacctttcatttgcaaactcttcttgtgacagactcaacctcaatagactcagactcggcaacaaaacttgtatcactttcatcttgacctcagaattggatggaaatggaaactaggtaaccaatggtagaaccctagtgggttcgaaatggatgactcacttctcaaattaaagattttaaaagtgaacaggtggaatatgatatgggtattgttgtattgaagggttattaaaactccaacgattagcacgatttttttctatttttcagatctaaatttgtgtttttttacttttaaatttagatgaaatgttggtggtggtggtggtagagtagtgatgataatgatggtggtaatggtatagtggtgatgatagtgatggtggtattggtagtgtggtggtggtaatagtggtggttgtggtgtgacggtggtggtgttaataattttggtgtggtggttaaggtgataatggtggtggttgttgggagaagtgtgactatcatcgaaggttgaagaaggaagaaaaaaaatataagaagaaaattcttttattttaaattttaaatgatttttataatatttaaataattaatatggtgtggaccactaaaaatttgtcatgtgtacatttgtatatacttgagaagtcactcttaagagtgttaatccgatttaatctgtactattttgctcgtagtgcgtttgattatattttagatccaatctattccgcacaagagctcaaattaaatcggttattttagattggttactttnnnnnnttaaattatttaatatttataaaatataaattattttcacataaccaacaataaaataaagcatattattcttattttatgtctgcagcaataaattttaataaataaaaaaaaaattcaagaaagacaaaaacatatatagaaagaaattttttgtttattttagattatatttttatatatatacataaatatatgtttgatatattaaattttgaaacatatattcaccataagttttttaaattattattttttttctttaaaatataaaaatacatttatactattttagatatatataaataggtgtagattggattagatcggttacttttacatataaatcaacatccaatctgcaagtgtcaattttagattttacaatccaatccaatcggcataagtacgaatattcgtactttgtggattgaattaagttaaatcgtacgaattagattgaatcgtgcagattgaattagaatgcgtattttatgaacacccctcactcgagtacttacgagaaggttttcgacaaaaagtaaaaaagcaaaacaaaagtaagattttaagagttttaccactaaaagctttatttattgaattaagtgtcacaaattgtataattcatgtagttttacctccaatatcacctatatttacaactttgaacatatatatata

SEQ ID NO: 29823 - DNA, 1827 bp, Cannabis sativa
gtaacttttagtttataaagtttaaagtagtacaggtttattttcattcctattgttattaaagtttaaatttcgtgcctttttattagtaatcccgtttaggggattagggtttaataagtgacttgagtagcgtgcctaattatttagggcgttacaggatgtgtgacatgtctacaaatgttattttgaacaagcatgtaaagttttaacaacgggatcccaattttatgtaaatatatgtatatgtttataaaagtttgaagttaaatcaacaattttattttatcacgatttttgagaaaatcctttgattatcaaaggtgtgcactatatttagaaagtcattgtaacgtccctgatcataagggcgttacaattttagtatcagagcaactaggttttctacaaaagatcgtcaagacatctacaatcattgtaagagaaaagctcgactcacggttcagtaagcctttatttgtttagtaatttttatgattcgaaaagtattttaggaagcataataattttatgattatttatttgaattctttgccttaaaatgcataagtgtagtacttaaagtatatatgattgttttctaacctacctgacttatgggtttgcaaggtaagtcctattctatggacacctagtcaaatacgagaagtcgttgtaacacagtcgagacaaagggcagtcaaggaggtaaaaaacctccgaatccccgcgcatgcagcaaaggttgtggaaggtttcagggtggtggacatgaaagtccacctcaagctcctccggttcgggagaaaaggttggcagaaatgcaagcccgaatacttcaaccagacgaagaaattcaaaggctaagatagcagggtcctcctgtagtgcctccacaacaagtactgactactttggttccagcggtgccagcagaacaacctgttattggcaaccgtatggaacctttatatgagaggtttctcaagcaggcgcctccagtctttcggggaggcccgaatgtcatgaaggtcgagcagtggctcactatgatagaaagaatcttgaattttatgggtgttgtcgggaatgatcgagtgacttgtgccaccttccagttctaggaacacactcgtatgcactactagaaaattaggttttagtgacacaaatttagtaactttaaaactatatagtaacacttcaacgcgcgtcaccaatgagggtgactggaaaaacagtttttagtgacacttcccacatgtcactgaactcttttacatttattttctgtgcgtcagcataggcggtaacaaccacacacatgaagtgtcactatatctttttttttttattctttattaatatttttggagatatagtgacacacaaaaagtgccactacattaaatattttataatatttaattattttaatttaaattttatatattataaataataatttatataaattataaacaaatacaattaaatataacaacaataattttaattaagtaaaagatattttctattaatcattttgccaaaatcacccaagtttacaattatacaaatacaaaaaatgtacataaataatctgtatactcgagtacaactgagaccaccattgatcctgcaaacaagaacaatttttcatgaattgaaaatctaaaacttgattatctccacataatttctggctgtaataagtttttagtatctagtcgacactctacttccaacaactcatctccgccatagatttctgccattaattatcctcatcttaatttctaccatgttgaaaagattagatatttt

SEQ ID NO: 29824 - DNA, 3574 bp, Cannabis sativa
tatgccatttctatgaaaaatggtctatcatttagaaaacggaacaccaaaaacaaggcaagagcaaactcccattttcacggctataaaacacgcataactctttactcgtttatccgattttagaattctagttttgttctcttagttaaatgattttttgtcttgaaagttaatttaaaaatcttaatatcatttttgtgaaatgatttgttgcacaagttaccgggccaaaatttgcacttaaaactttttaagtctagacttgaaaatcactgtacaagactagaaaatataaataagccttcatgaagtcttgtcttgagtttcttgaggtgtggaattcattttgggtcacttttgagaattttagtaaaattaccattttgtccttcgagttaattttgccttagaagaatttaataatcttcaattgtgctacaaaataaataaattattagtgacaaataataattaaatatttgttaatcatcaaaataaggagacttaagagtttgagtcaacaatctctccctttttggtgatatcaaatatttgattatttttaaaatttattatctctctgcataatctgaggcgtgcgtggttcccagctctctcccatggcgaagaagaaatgagcaacccgaaagccagcgattacggcggatcgtgctggaacggatgaggatctcccttcaatccaagaggctaaagattgcacaccgactgaagtgttccatgatacctgctcagatttggaggtgaacgaggcacagttgataatgagctgaaggagaaccggtcctctccgaaatcggtgagctaggcggaagaagtggagaagattgattttcaatctaatgctaaggaaatctggagcaatttcaaatcgaaccaggtatccccttctactcgactgtcatataccgaacccaagaattgggagacagagttattactgaactagacttagaggaagtagaaattgaagcttctttttggaaaaatgttattgtgtgtttggttttgggtgctaatccaccattcaaagtgtttgaagggtttgtcaagagagtgtgggggaatttggtagttgagaaggtaataaggatgcattcaggttgtacccttgtcacttttagagatgaagcaacccgtgatcttgtgctagaatcaggggtaatacactttgataaaaaaacctgtgatattgaggttgtggtcctctgacttggatataacaagattggtgaaaactgtcgcggtttggattcgtctcaacggtcctggtcttcaatattgggggaagaattgtcttagtgctcttgtgagcactataggaaagccagtcatgattgataaggtgactcaaaatagatctatggtgaaatttgctcgtgtgttagtagatatggacatttcggatgaacctccaaaattgattgaatttcttaacgaaaggaagcaattagttgaacaacaagtggagtatgaatggctcccatcaaaatgtggtgtttgtggaatgttgggacatattgttagcaattgcaacaaggataaaagagttgcttggaaaaagagagtgaatggggaaaagaaggcagtgagtgatgaagtggaagatgatgttcagacaagacaggggtctaaactagttactgcagtggttgaagtgcaggaaggtaaaggggaccagattgataaggctcaaaagggagatgaagagaaaacgaaagcagctggggttgctatgatgcctcggatggggaaagaaaatgattggatcactctaaaaagaacaggaggcaaaccttcttttgtgattcaatcaaaagaacaggaggcaaatttaaggaatggttatgatgtgctacaaatggatggaggtgatggaaacttagggacttcttataaaccaagctatgatggaagcttgtaatatgttagcttggaatgttaggggtatgaataagaaggagaagcagcatgctatccttgaagtttggagagagaataagattggtgtggctgctctgtttgagactaaaataaagcatgaaaaggtaaaaaaggttgttgaaacaagtttccctaactggaattactattctagtaggcaagcttctcgaaggatccttttcctttggcagaataaatatgttacggtgtccattcttgctgaatctcagcagatggtgcattgtagaataaaagtttgtgggaaaaacaaagctttctttgccacggttgtcgatggaagcaattctcttgttgaaaggaaagagctatggaagcaacttgctgatgtggggatagttagtgatccttggatcattcttggggactttaattcggcttttagctatcaagaccgaataggaggcaaggtagtgaaggctaaagagttggaagacgctcaaaactagttgtctttaggccaagttgatgaacttgttagctctggggctcactatacatggtcaaacaaacatgaggaaggggataaaattttctctaaattggatcgtgtcttcatcaacaatggttagctaatggaattccctaatactgaagcttgctttaaataggattggatctcggatcatagctattgcgtgataaagaatcaggagataagaaaattcggatttaaacctttcgcttctgcaaccattggaagctccataacgggtacaaagaaactgtccttgctaagtggaatactaatcagggaagcctctcggatattgttaaaaacctgctcagggttacacatgctctaaaaaagttcaataaggatgttgttggagatatagtggtggattacaacctagcaaaacatgagttttacaaagctcaagaggctcttgcgttccaaccatctgacagaaggttacaggaagaagaaaaatgctgccccaacaatttgcttcagctgcaaccaagttacttcagccatcttaagcagcaatcaaagattacatggatccaatgtaatgatgagaattcgagctacttccacgccagcatgaggaaaaggagaattgagaataggatcaccactttcactatcggagacaaggttgaagatgattatcctaaggtaattgatcactttgttactcattttaaaagttttatgggaaggcgaagtactgctacttctgagattgatcctgatagcttggtgtacggcaacaaactgtctcttgagcaacaaattaggctcattgctccgttcttaaagagtgatgtcaaaagagccttatttggtattcattccttgaagagcccaggattggatgggtttggatctgagtttttcaagcatctttggcctgaaattggggatgacattacgagagcagtgttgggtttctttcaaactggatggttaccttcagatttgaatgaaatggttatctccctaatccctaaggtttaagacctgaagggtgctaaggactacagaccaatttcttgctgcaacactttatataagtgtatctctaaattgatatgttcaagactttcggaagcccttccaagccttattcatagcaaccag

SEQ ID NO: 29825 - DNA, 1666 bp, Cannabis sativa
ccggcttgaccttggcacagccagggctgcagcctgttcaacaagggccaattagccaagtccctacactaacggatccttcagtgcacgcacagttagaaaaaataagggacatgatcaaagggatagctgacccaaaaaccttcaaatcttgaactagataagtcaaggggatcaccattctcggcatatattaattccttgcccttgcccaagtttaagatgttggtatggaagatgtataccgggagagaagacccactggaaaacaactgaataatggtactttacgctagctctaagaatatttaattcttggaatgtgttttctcaagaattttacgcaaagttctcatcctcaacactgatactgtcacagttggaagaccttgtcgaggtcaaacaacgacaaggagaacctcaaaagaattacatcaaaaggttcatggctgaggccaccaaggtcaaaggcctaacaatagaaggccaatatacgggggcattcttccattaagtgacttctagaaagatatccggaggatctcaaccagcaacatgaaggagttctttaacagagctggaggaagctgtctaacaagcctaaatagggtaagtcgataataggcagtctcagggcaccctgcagtcccgcgactttttagaggtgcatgcaggaaccgacacttctacgcgaacctctagtggcaaaaacattagggggtagcaacaatagtagtggaagaaatagtggcaaaaggaggaagtgcaatacttctcccatgccacgaaacaagaaagataaggaggagaagtatacatgcttcaccctcccggcggaaatacctgaggccatcttcacggccactcaaggaactttcccatacaagaagcaccctcccatgaaaacaagaaagataaggaggagaagtatacatgctacaccctcttgacggaaaaacctgaggccatcttcatggccactcagggaactgtcccatacaagaagccccctcccatgaaaaggagatgagcaagagggacatcttaaagttctaccaatttcacaatgactttgggcatgacaccaacgagtttcaaaatttgaaaagggagattaaattcattataaggaagaacaatcctcacctgcattgttctgtacagaatgaccaaactcgggcacaaggtgcccagaatggaggccctatgccacctccagtggtgggtcacctaagggtcattatcggcaaaccccacatcgtaggcgagacaagcaaggctagggagtgttatgctcgaaaactttgtcatgagcctaaaagcgatatcctagccatcaaagaaaggggttccaagcaaccaaaacttagggagccaattttctcgttcactgaaggagatgctactcaagtcagcttcccgcacaatgacccctagtcattagtgcacaaatcaggaatatgactgggcaagatgtatggtggacaacggagcctcctccaatattcttttcaaatcaacatatgaaaagatggggctccagctaactgatttggcaccctgcactcaagtaaggtatgacttctttggctaaggtattgaacccatggggtacatccaatttcccctgattgttagagagaatgctgttggaattattttacca

SEQ ID NO: 29826 - DNA, 2382 bp, Cannabis sativa
tgcttttttattttctttggtaaataatttttttttattatgacatgtttactaaaaaataattaatgagaatcaacattggtaaaataatcattgtcttatatttgtttacttacattattaaaaatagaaaacagagcatttattaaagaagagagaaaagaaagggagaacttcctcactaattttgtaaggaatgctattaagggtaatggattttaattatttttattttactttttaatattaaatatataatgacaattttatactttaaaatatgtcttacaaaataactaccatataatatagtttaacttaaatgacaatttaatcaatttaagcattccgattatgtttcgtaataaagtaaacaagacaaatcataactattccatttcaaaaaaaatttagtaaacaacatattacagatattgattccgattatttttcatttattccattacatttctctattaatttatttcgattttgaatactgtatagtaaatgtgccattaatgtcttgtttaaaatttttagttaaaaccggcaatcaaactaccttatgcaaccaaaacatttcatttcagttgaaatactaaaaaataacaataataataattaaaaaaaatgattcgattgattaaatatttaatccgactaaacagctaaaatttatcttttttattttattttttttttctttatgattagacatacagctcaataatttttaacaaggtatgtttttttaaaatatttttttttctttccattccaaataataataatgtgtctttcttttaagattaagaaaataaaagatataaatacttaaattcaataaaaaataatcaagttgcaccatctcgtaataggcgaatgcctctctcttgcccaaagttgtcggatatatttgtaataatattggctacaattgaaaatgtccataaaattatcaattctagttctatatttgttcaaataaaattgcttagctaattctctgtatctatctgaaaaatcttttcttctttcaacttttcgatcagcccattgattacttgtgagtagtactgaacatttagactggatttgacctggacccggccaaccctcctggactcgaccagaccaacccttaaaattaaaaaaaacttgttttgttcgtgcgggtcagacccaacctggtacactttcgggcatgttcgcgggttgattttttatagtcatcaagttttgggttggacccgaaccaacctgccaacccgtgacttgcaaacccggccaacctgaccatttcacgggccgggtctggatacaagtttttgaacttgaaacccccgctaaccgacagactcgctcgatgttgaatcttacccgtgagtccttcttctcctaattcttttcattttgctaacgaataattaataataagttcgttaaaataaccactataaacaccctaccaaacattatggccttatttttaggtagcttaatttttaagaggttggaataaattattggtatgtcactattaaaagaattttataacaatgctttctcttaattattataaacaacattttatggatcaaaatatgttaggaaaaacataataaatgcatacatatacacttataaatatgtacctttgtcattgtcactgcaatattcttattataattttgaagaaggctatagtgataagagatatggcattgaatctgattatctcttttgagtctccaaaattgtttagtaattttgctaagccaccaatatcattgctccccaaaagaagatcttcaaaactgtctactaatagttctaacaactgcaagtgagtatacttatattatatatatatacacactattattagtagaatttttagataatagaccacaaatttgaaaaaaaatatataaatatacattatcacggataaatttttatttttgcggtttgaatatttttatttacaaaaatatagaagttgtttgatatttttatttattgttttatagtaattaattgatttatagttgtcttgagattagttttcttgttgtttttcgttgttttataattgttgtgagattgatttatcgttgtctttttactttttgctgagaaaattatatttttgtaatttaaaattttaaaattatatttgtaaataaaaattttagaacataaaattgtagataaatgaaaaaatattttttctttagaaaaaaaattcttattagtatactattccctcttatattattggtgtgaaggaaagaaaaatagaaagaaagaatagaaaatctattttcttctaagttatttgttagtagaaatgaaagaaaattattttaaaattac

SEQ ID NO: 29827 - DNA, 3014 bp, Cannabis sativa
tcggtcagcctagctgcatcctaagatggtacccccacgtagcccaacccatctaatatataaatatatatatgtattttcttatattattttaatattataagagtatcattcattgaattattaattattgaagtaattttttaaccatttttttcagtcatacaagcattattgtattttgttgtgtcctaatatttttttattggaaggaattgccatgtttctaaactccttttcatctatcatgcatacatacataagatttttttatttaatattctttgaagaaaaaaattaacacttttttatgtgatcaatttatagttaggttttcatttttaattcactctaatattaagttcataatatttcgatctctaattattatttgaccattattattatttctacacactattattctattctatttatttatcttatttcttatttattttaatttatacttattagttaattaagtgtaaagttttcactatttttaaaattgagttttgtatatattatcgattgtgtttctttttatatatttattttgtgtgaattttttttaattttaatctttttgttattgtaagtgttataccggaaattcggttgtaggacacgtgtcaagataaagggaatgtgaatcggtgccgtatctttttatggaataactcattagttgtgtaaatactagagtatatttgcaacccgctgactgtaaaattttaggggaggaatcaaagtgtgaactggtccatagagtgttaacgagaaaccatatgtggctaaaggagaatagcgaggcaccagagaagagtgacgcataccctaacttgcaataaacaaactaagtgcaaaagtcgagtcggctcgaagaacaagaatgtgagatggtcatctcgctacgaggaagctccctatagtccatccatctaataggagcaaagctcataaccctagtaagtcaacagattttcttatatctgcaatcgacgtaaaacatatcttgtcgatctcggatagaagaatggttccaactccccattggaatcacttcagtctagtttctgtcgagacatctctagaatcaacaattaaagacgcgtttaatacacgatatttctgacccagtaaaagcagaaaaatcccagctgtatgactttcaaaataatgcaccgcgtttacattttgtagtatgtaatcaaatcccacaatttaagggataatgattgtaattacattttgtttagctttgtaattaactgtcgctatccaataataaatagtggcaaacaatcacaaaaaagggggacgaaaaaactcttatgcgagaggccctgaaaaaacatactcagaaatctgaataagattgactcgtggactatgcagaaatttaactgcaaaaccacgtaaaaaactaagtattcttattttattttgctataacttttattatttctgtgttgaatcataatctttaggctcaaatttgtttaacaaatatctgcgttaatagtaagtttaaagatctctttaattaaattattataaaaaaaattaaaattaaataagttaagaaaaagatctaaaaatacatttgaaattaaatttaattagatacaactgtatctattttctcattattaattaatggattttatattgtacaaagaaaatataaaaagtacaaatttataactatgtataaaagtaagtagttaacttattgtttgattttttttttttatgtaatctatcggaaatgaacatgattacaaatgagatacgataatgaagatgacgactttgaatgtagcctgtgaaatatggtgatacaatatttttgaaatcatataatgaatttttaataaatttatcaattgttatattatttttttatccaaatttagtttatttttttgtatacaaaatatatatatttgaaaactaactctttaataatatatatttataataaataaattaattaaaaactatcatttattaattataattagaaaaattacgattctataatattaatttattttgtttcttttattaagagtaaaaaaaattcactataatagttactcatgttaataaaaaaaattatataaaaaatattaaaatttaaaatttgatgtagtgtttaacttaattatcattaaataaaatataaccacacgcgaagcgcggtttgtttcctagtttacaatatatgagaaaaaaattagtttacttttttatgggcaaaaaacctatcacacaacatatggtatttttagagaaaaaaatattttaaaaaataggaaccccaataaaataccataaataaagttaccaagatttctaagaaaaaatattgccaaaaaattcgtcggatcaatcatcgttgtcggaaaagtcgtcagagaagtcttcattgaaagaaaattcgctggaaccgtcaccttcgatagaaaattcgttagagtttttcatcgtcgtcagaaaatttatcagaaaatccatcggagttgtcatcggtattggaaatgtcatcgaagtttacattgtcaccggagttggatgtcagagatggtgttagaatatgacaaaaagaaattggttacgtttattaactagttaaaaatccaaagcccaaaaactagttctgtaaagcaaccaaaatcaaaacaatcacacaaaaactagttacatgacataactaaattaaaaaccagttccttgaattaattaaataaaaaatcagttcctaaaataactaaaacaaaaactgattccttaaattaactaaataaaaaaaatctgaaaaaattaagggaaattactcaataaacttttttattttaaatttatggtttgggttgctctggtagtttctccgatggtttctttgtgagttgctatacggattttagttgcgatctaggttgctctgttagttgctacaggagtttctgtgtgaaattccttcaaaatgcaaaaaaaaaaaaaaa

SEQ ID NO: 29828 - DNA, 1623 bp, Cannabis sativa
tgtaaatttgtgggtgtagtccctatttggttgtaaatggcttgtttgattaatagaaagtattattcttgataaaaaaaaagtttatgctcattcttaataataaactcaattaaaattatatttttaatagtttttaatacaataataataaatttacgattattattattattatgattactatttatactaatcacacatatatatatatatataagaattatatacatatattatacaattttaattttatgattaaaaaaaattaacgcatttgagttgaaattttattaataattaataaattatttttgaatatataattttaaaaaattatgaaaactgtgcaaagagcaggtttattttttagttataaaatataatttgcatcaccttttacacactattagatcatattttttttttctatattttagttttgcatcatttattagagatactctaacatttttttttttatgaattaagaaaattatattcaaacactatttacaaactagcagtaccacttgagcctgaaaagactattttaagaacaagcaaattcaacctgtcatatacccctctttacaaatgtataatccaatgcatatctaaattctaaagtattgatttttttggcattctaacattgtatctatttctaatttttcatgtttagcatctttagatattacaagttcctaaattttttgagaccaaaaagttagatttctgtttgttcaatggtaatgaaccaagaccacaccgtagtagcatatacacatattttttggtcttccggactttgcttcttctgagatactctatcatgttatattaatataatattggacaccttcttttttatttatttatttattttttgctcaatttcttaaacgtgtctaataacaataatctaaaaatatacaaaagaacaaaaccccacagctagtcaacatttttacaaggtttttcttcatattctctagctagactagcgccttgaaatacactgttcacacctttggccattgcataacaaaaaaaaataaagaaaagaatcatgcaggtgtaatagaaaagtaagctctcttttttcttcttttgtttttttttttttttcttttttcgtcgggtgagttaccactaatataaatatatgtatatttatgttggcttattttcacaacttctaacaactacattccaaatatgtacaggttacatcttttttttctccttattccccaacagcaccaaaagttgtttttattgttttcttttgggtcttaaaaatcataattaatttgaaaaattgtggtcatattatgacccctctcaatcctattataacatttatatatacatttatgcgtctgtatattgggattttttatataatattgcataataaatataaattatcttgttgtactgagcataatcttactacatataccttttatgcaatctcaaaatgaacaatttttactataatctctctcttcttttcttaagagaatactactgtatagtctctcttactacatatactcgaaaacaaactaattatttaattaataagtcgtcacctatatactagagagatcgcat

SEQ ID NO: 29829 - DNA, 1800 bp, Cannabis sativa
tatgtgattttatcataatagcatctttcatttcatcttcaggttgtcaatgctgctgttatagtggatccctcggttaaacaagtaattgccactgcacatgatcaagttttttcatgggatactacaggaaacaagattacacttgaaacaaattgccttagaaagcgggaaacccttgatttgagtactgattctgagggaatggagagccataagacattgccgtctacttgttttcaggatgaaacaaaacaattatatactggtgtgtcttgtttttatccttgggggtgggctgagcagcaaccagtatatagttctggctgttggcaccctttacgccatgctgctatggttgctattgaatcttctgctgccagggacagactccttttccccaattcaggtgagatccaagatgattcaattgatgttgataacaggaagtattcgatgggctctcctgcaaaaaaacaaaagacaaatatgcaaaaggtacacaatgattgtcttctcaatttttctttgatacatcttttgaattccttttatttgggttgttcatggaggagcatgtgacaaatgattttgcaatactatttaggttcaaaattgttctacatgattgtcttaacaaatttatattagatttatatttcacgtttgccatctgcatctgatttttagtttcataaaaagcaatttaattgtacatttctttgtttgtattgcacttgttaatgagtaattgttaaaagtagtatttttaagtatcatatggttgcttgcatgccaaccacttcactctcgagttcaaaaccatcttgacaaggaaaaaacatagaacatgcaaactcttgcttgccatgatggttaactgcatgaacaatctcttcctatgagctatgacatctttgaacaaattgcttccattaactttttggatttgaattaacttgtcaatttttaacctgccaatcagattacgggtaatgatatcaagaacatttgtgaggaagatttacattcttcatcagaccggccatatctttgcactggttatgacatctatttagtgtgggagccatgtgctatgtaagtagatctacttcatcatgtcatttttgattggttgtttcaaactgattttgattttatgaaattgagaaatcgaatcttattgttaacatcaggtgtgcaatggccctggttcaccagagaattaggcgtatattctatgcttttccgaacccgaatgctggagcactaggtagtgtccataggctacaaggggaaagaagcctgaatcatcattatgctgtattcagggtgatggttccagaacaggttctttgatggaacccaccagacttggcttttatttatacaacttcaaactcttagtttaaacatgatagaaaatcattcttgttgttggatgattttcttatatgtttgattttggaatattttgttcacaggtgcactgaattttaaaaccctattaatggtgacagaaacgaaatgtattaggaaaagatttcatacatgcaattgacgacaaaaacctgatattgcttaatccagactataaaatttggaagcttgtattagttacatctcttcctggtacttgggatattgctaaattaacacttttctgatgatatcatatttaactcaattttcatcaactaaagtgaaggacataattaaggtacatttgacgtgtgaccatatgcatatggtgaaccaaaaaaaaaaaaaaagaactctgaaaatttggaaaatatttga

SEQ ID NO: 29830 - DNA, 2497 bp, Cannabis sativa
  modified_base (780)..(782): a, c, t, g, unknown or other
ttcagcagccgatcaatccaatcccaacactgaggtcccgtctaccactattgttcataggtcagttggagatgatatttaaatccagaacctccgagcagcccttgagttcatgtaaggtcataataacactttgcaccatgattaggaggatcttcgtgcagctataaaccgtgcattcgaagatcaaagacatcaatatatagaatggaaggataggaagatggaaacttttagggctcaacatgcagccattgatgatcgcacgaattagggcaccgtaatgataagaatggcctagcaagtcgccaatcaacaatcgactagtgcgtccagcattcctttgggcagtttagaagggtatgcagctaggaatactgcacaaactcataatgatcacccgtccaatacacgaccacaggtccaacctgcgaaccaaacgatagacggccagatccagctggaccatcccttgggtggagttacacacaacaattcaccctaactaaaatttttggccaacctgctagccaaacaagttagacgccaaggcaacctattatttcagtattcgataggttgggtatcgcacatgactttaggactgatctaaatcgaagaaggggcctggacgaacaatacattccaccaactgtccagccaggtatctgcatccaggatctagttcaaagagatcctaatatgacacaggccagtcaacaggccaaacaagatcatccatttgtgcaagcacaactggatcaacttaaaaacatggtnnnaggcctgaccggcccaaaactcactgatctcaaacttgaccaagcatgcagatcacccttctccctggagaatgaagtccttaaattatccccaaaattcaaaatgccaaccaggaaaatgtatatagggaaagaagatcatttatcacatctgaagtattttgagatgcagatggatgtgcaaggggtaagaggtgatgtctgatgtagaatatttcctgccacactcgcggaggccgcccagcagtggtatttcaagttgcctccgcggaggtttaactcatggaatgccttctcttcggagttccatgcataattttcttcctcccgtcaacttcccacgcatctagattacatggttgaagtaaagcaaatgccaggggaaccccttaaagcttatgtaagcatgtttatgatcgaagctacaaaggttaaggggttgattgaagaaggaaggctggtcgcaatacttgggggcattgaggcactcaaagaactgtggaagggcatcaagaggctgactgtggggtcaatggttgaatttttggatcaagtagaaggattcattaagctcaagaagttgtttggcgtgtggatacgattgcataaaagaaaagctagaaacataccacctcggtaggaacatccgttcagaatccacactaccctggcagctcaaattcaaatgggaagtggtctaataatggtaacatgtagggtaatggaaagaaaggaaatcactagcaatgtcgaatagcaccccatggaaaatacctcaaaattcactaccttctaagtcctaatagacgacctagagacaatctatgtgacaactcagtctatggtcccgtataagaaaccatctcccatgaagaaggatgtaagtagaagagatacatccaagttctgccggtttcaagctgactacgaccacgacacaaaaaactgtaataatctaaaacgagaaattgaatttttgattggaaagaataacccacacttaaagaagtatgtcaaggtcgatcagaagcagagggtcgcccaaacaaacaacaactagaaccaattgatgcctccaccagtggtacaatcgaataagaatgcatccactagacaaagagcatacaagtttccaaacatatatgggtctttactgttgcaaggttatgtcgtttggtctgaagaatgcgggagctacctaccagagactggtaaacaaaatgtttatagaccagatcagatgaaatatggaggtatatgtggatgatatgctcgtcaaatctatgatggtcaggggcacatagaggatctggatgaatgcttcaaaatccttagaaaaaagaacatgaaactcattcccttcaagtgttcctttggggtcagctggggtaagtttcttggttttattgtcgatgctcagacaatagaggctaatctagagaaaatacaagccctcgtggatataaaattgccaacaaagataaaggaagtctaaagcttgactggtcggatagccgctctcagcagattcatttcaaaatcaatagcaaagtgtgttcctttcttcaacatcctccgaggtaataaatagtttgaatggacagagggaatggacataggaatgctagaacgccttccaagaattaaaaagataacttgcaaagcctcccgtactctcgaaacaattagatcgagaagaattaggaatatacttg

SEQ ID NO: 29831 - DNA, 3041 bp, Cannabis sativa
  modified_base (164)..(170): a, c, t, g, unknown or other
tactttctagtaggttgttgttgtccactgtgtttggtttctgctgcaacttgcagtgatctaattctttttcccctcaagttcaattaaattgattattttttgttgttgctgaatagtttgtgtgcaccagaattttgatgcaacatatatatatatatatnnnnnnntatatatatatgtatattatatgagcccacgggtgggtttatttactctacttcaggttccaacttgactgcttttgggtggttattatcatttcaatgattaatcattctataccattggaataaatttaatcaagaagaaaggtgtttatctgaggtgagtccttatgagtgtctgtgttaatttgtggatttacagattctttgttgttgttgttcttcaacaatggttggtagcatcgtaaagttttatttattaaaatttcatgtgtcctactcaccataagcacaaatgttatttgaccgcaaatgatgaaacttattattgatgggaacaatttctatgtatgttttccttttttgttataatatataatatctactaataattgttcttctgatatcgttttaatgattttataatactttttgtttgattcagatcaaatgtacacagacatgatgatcccttcttttcttttttcttctgcaattataataatggcaaatgtttcaggattttcctgatcgggtttcttcttttttctaattgatttactagttctttcacttggtatccagtctttttgattttatgtgaccaaatgtaggatgtttttgttttaatttcatcattttgtttgttatataatgatcttgatcacccttccagattatgttttgtttaaataatttctctttttccctttatagaactttttttcaatgcttatgtggacaaaattgatgaccttgcaaactgatcaagcacaaagcatgtccaatgactaaacccaacatgtttttgtgttgaaaaagattatgtctgctggcctgttagagaatattagattggaggtgttttcaatatggcttgttaagttataaaagtttgatttatgtaatttcttttgtgccatgccatctttctgtcaagatcaactgattttcttcactgaaaaactatttctctctctctctctctatatatatatatatatttgtctttcttcctttctctttaaagttgtagaaaatggtgagtcaattgtgtgtatcattcatataaatggcatatatttatacaaagtaggagaaactaaaagaggaaagtatcagagaaaatagaaaaagaaataattacaattgaccctattttctagctaatttacagttaatattctaacaaaagtgaatcatgttgcttaagggagatgtttgtttgtttagtccttttttcatttgagaagaaaaagatcatatttttggaagaaaaaacgtttttctcatgaaataagatttgattagtatactaatttgtttattttctttattttcaggactagactaaataagagaaaatggaggagccattcttcgatctcgtggagtttcttcggaggccttcaataaccgaaacattagtcgacattttgctatgtgcagttccaatttggcttgctgtgatgattgggctcgtgatcgggtgggcctggaggcctcgttggaccggtcttgtttttcttggtcttcggagcaagtttcggttcctctggactgctccgccagggttcggggctcgccgactttggttagccttcacagcactctctgctttctcagtttgtcgaacgatttggtcaaattttaggagcaaggataaggaattgccgcctaggtgtccagattcaggggtcatggctggggctaggggtgggtcaggttcccaaaatgatttgttagagaaccacgacgatgttgttaggtgagtactcttgggctttgtcatcacaattttcattttaagttgaattgtattaggattttgatgttttactacatttctggttttgaagtttgaactttgtatgctttttgcgatgtgttttagtttcatgcatttaagagaggttttttgcagctctaatactattgaaatgtactatgcttgcgtagtgatgtagttttctgaatatttgggctagacatccctgggtgctttccattcttataagctttttatgtaggatgatatgtagatatctggctgtcaaatatggaatagacccacgaagtctaatttatcttctgatatagccttaggattatattacttattgcggtagctctttgagaatgtacaaatgagtgctcggtaggcatggcacttgggaaatttaaggtagtttttttaattctcagaggagtcaatgcacatgaaagccattaataaattcctgtgaagaaaatgtactctgaacatcctcatgacctttaagaagttagaaatttgggcttataatgcagtaatttaggtctgagatgaatgtgttgagtaaatcctgacataggaagacgtttttgaggtttaataacgatattggtagttgatagactagaatgtgtgctttgtgatatgattttccagctgtgatgtgtgatcccttttctttcttcttgccacagcaccacaccttctgagagacagccggatgtaatcacagagaatgatctagatcacctactacactttttggaagggagagatggagaaatggaatggcaaagtatgatggagaggtctaccccaagcatgtcataccaagcatggcgccatgagcctgaggtatatatcaacactttgatttctcatatgtgtggtttgattttcaattcatttgcaagttataaaatttgttttatgttatcaaggaatatatttagacaatctcaaaagatggagaacacaacaccatatgtccttatttggagacatcatgttataagatgtgagatgcctaatggctttggtggcaatagagtagatggcatactacgaagtgtgtcaattaacaaaatatgctttttttt

SEQ ID NO: 29832 - DNA, 1936 bp, Cannabis sativa
gatcagctggaccagtaggaaggtgaaaaaaatcatggtagtggtctgttgaattaataccaacaaagggaaaaatgtgttcatggaaatgaacatctctgctaataaacactctatttgtgtttagatcaagtaatttgtatgccttcatacctgctggataaccaagaaaaatgcatggggcagaccttggaaagaattttgatctagacacattaagagtagaggcataagctaaacatccaaaggcttttaaatagtcatatctaggcatttttctgtacaaaatttcataaggggatttctgtttcaggttgggagtgggggtcctatttatgaggtatgtggcagtggtaatacaatcactccaataggcaagaggaatgtgagattgaaagagtaaagcacgagcaacattgagaggatgttggtgctttctttcaaccacagaattctgttgaggcctatgaacacatgaatgatagtggaggatacctagattcttaaacaaattctcaaattgtaattccttagcattatcagatcttacaccgttgatggtgacattaaattgtgttttaatgagctgaataaacagaggaataataatttgagcattagatttttgtttaataagataaacccaagtaatggataaagtgtgaaaaggaccctatatgtcaatatgaaccagatcaaagcatttagcagacatattacgagccttctttgtttagcataatgacaagtggaacaatgaaaatttttactaggataatggctgaattacaatttttcattcaagggatgaagtttgatacaagaagggtggccaagtctataatgccacacagtttcatcaacaatcttatattcaaaaatagaacaaacaacaatattcatggtgctttgttaattttttttattttttaaaatttttaaatattttaatttacttttaattattaatataaggtggggcctaataaaatttcactacgtgtatacttgtgtacacaatgacaggtctatttggcccttaacaaccaaaaactaacagaaagagtgctgaccaaaatgattgcaaagtttggggagtttagccctaattatttcagtaagggaattactccgtaacgaatttcaaaacataggaagtttgactgcaaattatttttgtaaaaataacgaataaaaaattaaccatttgtatttatttatgtaattcttttttttttttatcatttttaaatatatataattaatctcaagaggacaaaaaaggtggtcatccttatccacggtggttagttgatgggttcaatgatacattgatggattgtggtttacatgatcttgagctttatggttatccatacacttgggagcgaagtagaggtactccggattgggtggaggtgcgcattgatcgggcgatggtgactcaatcatggttagattttttccctttggctaagctctttaatttagaggtgtctacttcggatcacactcctttacacttagttttgattaatgaagtggtggttgctaagagacatgtttttcgatttgaaaattcatggttgaaagaacctttgttttttgagattgttaaaagttgttgggataatggtgagccgaggggtgttatggagaagatcaagtgttgtggtgatgttttatggcattggggaaaagattattcggggaattttcctaagagaataaaagattgtaagcttgaggttcaaaagtggaagcggggccgtgatggggtgtcggttgagaactacaagaatgcttcagctaacttgaatagtgtgttgttgcaacgtgagattttttggaagcagcgaagcaagcaactttggttgcgtgaaggggatagtaactctaagtatttccatgcctcagctacttctagaagacgtcg

SEQ ID NO: 29833 - DNA, 4529 bp, Cannabis sativa
ttatttatattctctactttaattaatatttgaatgtaaaaaaaataaaaatattactaaagatagtaatagtgtaaatttctcttattattattattgttgagtttaagtacactcaatattttaaaaaaattaacttaaattatttttttttttgaaaaaagtttaaattaatttttaataattgcttttaatatttttttaatattttgtttttcacattattttcttttaatattatttaattttactttatatatttattaaaatattgtacaaacaaatttatgtatattttttaataaaatttcatataattttttatatcaattctttttgtcttaatataaagtattttatttaaacacttaattagtgtcttttttattaaaaataaagtgttgggcaattcgtcattgcactcctaaaaaagtgtataaccatacactcaatactatctaaaagaaattagtcaaatttttctcatcgtatataataattatttaagacatcttacaaaccttcgagaaattcaaattaatttaaaatataaaaagtagtattcaaaccgcgtatttcactgtttcaaaaaaaataacatatttcacacgcgtaattaaataacaatttagaaaatttcatgtgttagtttgatgtagaatatagaattaataacatttcagtaattttaaaaaataaataaataaataaaaattttgtggtccttagtcttacttagctaattttaaatttctagaactaaaaaaaacattttgttggtatataggtaggaaaaaaaaaacctttatttatatatttactattgtgaaaattaatcgtacatttattatttttttccaatttaatactacaattatgttactattataataagtagtgaaaattaggttgtactttaataagtttttatataacaaatatgctattataataaatcatagcatgtgaggtgttgttttgtggtcaagctttgtgtcattttcatgttactaattatccactaataataattaatagatttatataagataacttgataaaagccatcaaattagatgacaagtaaaataataatttaatgttttactatcttgacttttagatcatcatctaattgtcccatcaaatttatatattttaatcatgtatatatctataaccaattattggagtatatatattttcatttatttaatactataattaataagtacaattaaatcttcaatatattaatgatcctcaccattatttatattttccatcttgatacacttattcaaaaaggaaaatgtgagatctcttcacgataaaagaaaataatattcaatctaatttttaaagtatgaaaattcgtatttatacaaattaaatgttgattaaaatttataagtaactgattcaatcaaattcacacgtattcatatatattttttaaaaattatatatacaattaatattttaatattaaaaaataataatttaaaattttgatacacataatataaatatatttaaaaacttaataaattaaatgtttattctattcttatctataaagaaaatataagttaaaacaaaataaaacatttctttgttatatttcgttatatttattttaatttattattgaaaacataaaataataatagtttttttttttattttgttgttagttatgtaaaagaaataataaatattaaatattttaatattaaaaagtgatctattcaaattaatcaattttatctctacttttacgaattggattgaatttacgttattatacaaatttgattgaattcaaaatataaaatctacacttagtgcggatcgaatgcactttgagtaaaatgttacgtatttaattcgacgaacatggctagtttttatatttcgaattcaatcgaatgcactttaaataaaatattaaagatttaattagacgcacacctctatttttatcacactcataaattttctttgactctccactatcaatcttttctcaaaaaacaaaaatcatcacaaaagttgcttaatctttaataattcaaagacttggaaaatgggtttaacctcaaaagagggttagagtaaagattctgaaaaaagtttctcacttggataaagcttgacttactttctcaacaaaaataaaataaaataagaaataaaacattttgatatttaaaaatttaaaaattaataaattaatataaaattcaacaatttctaatctaaatgatgtgccttgttccataaaagtctactaagtgacctcacatgcttttcacaaacaattattttctgcccataatggcagtgtttttgaaaatgtcattttcccatacaatttttttatgtttacaaaaataccattttataacaaaacaccaaattttactttgggcccacaatgttcatgagccggcctgtataactacataaaattaacatgaaaataatatcaaaacaacaacaaaaaataacaagagtacaccataaaaagatcgtattttctgtaaataaaattcgtaaaaatatttaaaatttcgtaaaattgtgcttttgtaatttttttattatttttgtgtatttgtgaaacaatcccaattataaatcaaccaactttaatttgattgagaacttttttggtcttaatatgagatttatttacactaaactgttcatactaataggaccaaaaatgctcatttcttcttcatattctttaagaactaaaccaaatataaaggacaaaagaagtattatataatatttcaaaaataaatgacacaaaaatcatcactaatttataagccaaacttaaaaaaacttgatagactagcaaagtagttgagagagatactcatgtctcaattagctaaaatcccatatttacacatatgatgaaggttaagggcttctaaatttttacaagtttagatttaattgaaacaaacaaatagaccaacagaacaaaccccaaaaagaagcatataattctcactcaaatttatggatatggaatcaatggggcattgaaaagcataccagaattaggggcaagtgtcactcgattgaaaatgaaaagcagatagtaatagagagatcagcatcagaacaaggggaagaagaagctgcattaagccgaagagcttaattctcttattcttccgacgctccattgccaatttcatcttcaaattctcaatctccttctccttattcagtatctcttcctcaaaaactgcctcatcctgttcaaaacaaaaacataagtacatttttcgatcaagtgagtttaaagccgacaatgtaccttgttctgaaagttaaggcggcggtaacaagtgggggagcttttcaacgacgatatcagatgtgcagctttcgcagactgaatcgctaattgctgcaatttcaagaattccttctttgtttgagcttctgtcccctccattggtttagaaaatctcttcaaatgacataacaataccaataccattaagcattaggcacagtaaattcatgtagcagaaacaaaacaaagcaacacagtacaaaaatcctaaacaaatggaaaaaaacaaaagcaattaaacaatttatagctaccaaagaagtgtaacaacacagatatataaagtcattgggtgaaatatgaactacattcagtggtaccttgtacaattaatgcctgtcttacaaaatttcttgtggattaacagaatatttgtggaagttaatcctccaaaaatagaataacaaacttaaccaattaatgcagagttctcgatctctgccattggtgactgtacaacactttcatattggattcttgatgatgtttctcagctggagtatagccagggatcgatttgatctctaggaccggaaccaggataaattttggtgtcttcttcttcttcttcttttaattctggttttatgattctgtgtttatattgtgtttgatcatttgatgttattatattgtgtttgatggtttaattttcaacaaacaatggtgaagagatgcaaatgaataaaaccataattgttcaaaacttctctaattggtaactattcaatgaagatttacctataaatttgaaacaactacaaattatatctcaaattgccttaaaaaacaccaaaaaatagatttaatttggagaggaatttctcaatgttacccaaaacttcatcaataccaaaatcagaaaattatgattattaacacaatttctagatcttatgaaccaaaaaaaaactaactattactaaaaattgaaaagagaattggataatagctagctaaatcaattcatatccctgtagaatgccaatgaagaacaattctatacaacaaaacagagataatcacttaagagaaaaactcaaacaaccagacagcttaagtacagatacctgttgtgagtgaagaaactatttatccgccggtgaatgagtgaaaccaaattcctcctctcctctccgat

SEQ ID NO: 29834 - DNA, 3954 bp, Cannabis sativa
  modified_base (3604)..(3605): a, c, t, g, unknown or other
ggatcaatttccaaacactgaagcgtgcttcaaatgggactgcatttcagatcatagttattgcattgtcaagagcaatagaattggtaatgtggaagtaaaatctttcaggtattgtaaccattggactcttcatagtaatttccgtgagactgttttaagttgctggaacagagggaatggtgctaaaaccgtgggagatgtgggtagaaagttacttagactaaagcatgtgttaaagaaatttaacagggaggaagtcggggatatagtgcatctttatcatcaaagcaaagcccagtttatctcggctcaggagaacctggaaaaagaccctagcaacagcatcctgcatcagattgaaaagagtaaaggtttggagtacgctgcagctataaaatagtatttctgccttcttcgtcaacagagtaaaataacttggctgcaaaatcgggaagacaatactagatacttccactcgattatgaagaaaaggaagttggagaatcgaatgacaactgttgaattgaatggtcgtctggtagatgattacacccaagtagtggagcatttcctgaaccatttcaaaaaaaaaaaattatgggaaggaaaagctctgctactaggagacttgataaccaagttttagtccaggggccgatcctttcgttggaacaacaggctagtctagttagaccttttaatgagaaagatgtgaggaaggctttgtttgggattcattcaaataaaagccctggtcatgatgggtttggttcaagttttttcaaaagcctttggaaagatattgggaaagaggtgtccacagcgatccttaatttctttgaggaaggggtattgccaatttcaatgaaggatgttgtcatcactctaatcctgaagactcttgatcccaaggaagctagtgactttcgcccaattgcttgttgcaatactttgtataagtgcatctcgaaaatgatttatgcaaggttgtcagaagttctcccctgtcttgtgagtaataatcagggtgcttttgttaaaaacaggctgctagctcataatataatgattttccaagatctgctcaaaggccataccaggaaaaatgtctctgctcgttgtattatgaagatcgacttgagtaaggcgtatgataccgtagactggcaatttgtagaagacctcctcaatggtttgtgatttcctatgcggtttattcattggctacttacttgcttaaggggtactacttactttctgttgcttaatggaagaattcaaggctctttcaaaggtgaaaaggggcttcgccaaggagaccccttatctccacttgtgtttgttttgataatggaatatctgtctagattgctctctttttattctagcaaaaagagttttggctttcatcctctttgtaagaatatgagattaactaacctctgctttactgatgatctaattattttctgtaaagggaatttaaaatcagttgagttagttaatgatgcttttctagagttctgtcaagccacaggtcttgcttccaacaagaagaaatcccatgcttactttgggggagttaaagaggaggtaaagagcaagatcttggagctgattcaaatggaggaggggactttcccgcttaagtatttgggggtagtcctcaggccgactaagtggaaggcttcagattgtggagtgattttggataagcttagtttgaagctaagcggatgggcgagtagaaatctttcctttgcaggtcgagctcaacttattcactcggttctacttagaattcgaaacttttggatgagcctcttcattctccccaaaaaaagttgttgatgctcttgacaagaagtgtcgtgacttcctttggggaatgaatggcaatagaagcaagctccacatcccctcttaggagaaagtttgtcttcccaaacaattcggtggcattagttttagagaaggtaagaagtggaattcggccatgattgctaaacatgtttgggcgatttcgagcaagcaagacaacctctgggttaagtggatcaattccatttacttaaaggatgaggatttttggtctatttcagcgaatcatgacttcagttggtattttaaaaagatattgaagataaggaagatgaccaacaatgtcatgttaaaccaggcggctaaggggagtaaattcaaagtgagtaagttctatgttgatcttattggggttgctaagtcttcttatgctacttctatttggcgtaagttcattgttcctaaacatagattcattttttggcaaataatcaacgagcaactgctcacccgtgatcttttgggcaaatttctgcccattacttcagctctttgtgttgtttgtgaggatacaatggagtcccataatcacttgttcatagattgcatctttaccaagaaggtaattgcttgtgttgaaagctaggctggttttctaagatggtcgaattgtttcagcgagctgcaatagaggtgtttcccagccaaaccagatttagcagagcaggttttgaatacagtctttgcagccactctttatcacatttggagaaacagaaatgactgcttgtttaatgttgtgtgtttgtcagcttcttgtcttagtataggtataaaaaatgtggttaagactagaattattggctttcattgtaccagttctaagaagaaagatagatatgttttaaatgttgtaaatagctggtaggtttttggagttggttggctgctgccgccagcttttgtctttgtatttggttggttcttttgaataaaaagtctcctgtgttcagaaaaaaaaaaaaaaaaaactattatatttcttgagcatgcatatctcaaatgcttaccatttattcatatgtctttcaatgttgaaaattgataacaaggacaatgatgaattgaaagtattgtgttctataagatttactattaagaaaaagaggtaaaggtcacatgtacatgtgtaacctcctctcaaatattcaagtctcgctaaaaaacacaattgacatatgtttttcttcgtatatgatttgcatattaagtagttggggattagtttcttcttcctacttgtgaaagcttcatcttagttatgtatcttagttttctccatgttatttaaatattcttttttatattattataagatttatgatacaacgaatttgcattgtacggatgagtacaaggaggggtagtatagatgttcattaatttgatgggaattttcttagattcagagcataatatagagtaacacctgtgattggacatgttttcaagtccttgcttgtcatttactatttaaaagggagagaaaaaacgtcttatttaaagggtatgcaaagcttttagattaaattatattctttagattagtattctcaaattttacaatcctaatactatttttcattatactttgtttgtctagtaatgatttgagtgcgtaataaatcatatgtttcattagcacaagctgaaggtacgtacacataaataaatgactaatttgtaatttttccccccgaactatgacacttgctaaatnntgctccctgaactatttttgacgtaaaaaatttccctcgaactattgacaatgcttaatttatgatattctgtcttgttccattcattttaataacgaagtgatgaccgtgggttgcccattaaggcgtccacgtcatttttaacacatgtatttttttttttaatattttgttcaaatttcttacggttttcaaacccaattcctccaccacccaccacccacacgatacacaccagacccccacccagccacacgagacgcaccacccagccagccacacgcagggccgtctcaaatattttggagaccctgttctaattttaaaaagtaggcctctaataaaaaaa

SEQ ID NO: 29835 - DNA, 1091 bp, Cannabis sativa
ggtctggagaattagaagttgtagtttgtttttcttgatcatctttcatttgaatgtgagagaaagagaaggtcaaattgagtttgttggaaaaatatttattagctagctatatagatattagtagaagtatatattatgatcaaatgatattgaattatatatttatatagacgtgtagcaatgtgaaatgcacgttgcttataatcagggaccgacgcagtaaagaaagtagcccccactaaaaaaatagtattaaaaaaaaattaaatatcttttatttaattaaataattatataacaaaataataacttataattatatatatatttcaactaaattaataccaaccaaataaacaataaaactatgaatatatatgtatattgaaatcttaagattctcaactcaatagagccaagagctcctcttgtttatggaatttagacaacacataacgctgctatagtatattgaaagaaaattaagaatactcgaattacgtatataaatatatgcaagtatatccgcttaattaaaatcatgttaattaacataattaatacacgaattatcagtctcgctggccaaacttctagcgtgcttgtcaaagggatcttgtacaaactttgatttgaacaacgaaaaacagagatgatgggaaaagtactaattaatccatgtgaataattaatataactttgttatatagaaatgaaataacgcgttataataaccatgcagctagttattgaataaatattatgtttaatgtaatgaaaaaccagtatgattgaacttgaacatacttcctaattacccagcagtaacattaataatcaatatatgataaattataaatcaaaacaacaagtacatgtatatatatatatgatatttgtaccatatatataaactgttacaatgaatcttcgatcaataattaataaacaaagtaaaaacgacacattattaaattacctagtacaaacatttaaatatataaagaaaaactcagataataataatattccatatcgagggagagaaacatttgatgatctcatcagtcagtataaatgacgagaag

SEQ ID NO: 29836 - DNA, 1667 bp, Cannabis sativa
  modified_base (512)..(521): a, c, t, g, unknown or other
ccaatataccaaaacacaatctttatataaattagctactataattttatttaagtattagaagagatataaaaagaaattagtattgcacatttcattgtagtaattaacaaatacatcattagaattttattagtttattttaagtaaaatagcaaaataaaacacaaaaaattgggtgaaaggggtgcataacataatttttgaatataaaagagtgttttttagacaaaatggttggccaaactgtcgtaggctatttgggatgcgtagaacgcaaaaaaatatccaagttcaaaaaaaaaatcgcctccaacggacaatgggatcaaaagttattaatgttcaaagttttcaaaaaaattcacgcaaagtttagccatttctctattttttccatttattctggtccttaaattattgttttattttattggtcttgaaaaatttaaatgtataaaaatattaaattacataaaaattaaagtattacacattatttattattcaannnnnnnnnnattatacaaaacataacttaaaaaaattataaaaatgatactaatatactacaaaatataaacacataatataaaatataaaatattaataaaaagaagatcatttcataaattgaaaatgtgtgcaggaattttttatagaggcaaggaaggagtgaagggttggacagtgtaccttggaggagtttgtgtaagtctaaggctagtggtggtttaggttttaggaatacttcaaattggaatgaggcagctctattcaaacatgtatggtccattactaataaaaaagataatatttggataaagtggaccatagtgtttatataaagaatgagtagtggtgggagcataaagctcctttgaatagcagctggtattggcgcaaaataattgaggcaagagataaagtgaagcagctgatgagcattaacacttttatctttggaaagtatacaatagcagctggatacaagttgttgcaaggggagtttgagcatcacttctagtgcaagggtagctagagtagactcattgtgcccaagcacagctttatcctctggttaacaatgcaaaaccgtttgaagaccaaagataggcttgctaaatttggaatcattgatggttctcacaggatgtgttgcagcaagtgaagacctagcttgattggagggtcacttcgagtagcttgaagagtattgttcgaagaattgataggggtaaatactcagaattcaggaagcagatctattatggtgcaattgcagcttcgatttactcaatttcgcaaaataggaatgaccaaatctggaactcaaatgtgcactcacccagccatttgttgcagcagataaaatggactttgaaacacagaatttcaagtgtaatgccaaagaaagtggctaaaaaagatagactttggtttagcaatctttaaaagtcatttgtcataatacacataattgtatagattatacaaaggccttgattaaggtgcttttactttgtaattaaatgattgtaaatgtttgtttgtgcaatgaaagtcctgattcatcaaaaaaaatatattaataaaaagatagctaatatacaaacacttagattaatgtaaatgtgtatttatttaacttttcaatttaattttta

SEQ ID NO: 29837 - DNA, 8310 bp, Cannabis sativa
  modified_base (6766)..(6769): a, c, t, g, unknown or other
tgtttttttttttggttgactattattgttgggtttgtgaaattaataatagaaagaatcatgcaataaaagggaaatggacaagtatattcattatttttttatttgaaagcaataataataataaaaaatatttaacagcctaataattaatatactaagtatctcaaagacaacaaaaaaaaatgtttaagtacaaaattatttatccattcgaaaaacatggatatttaatctataatgatcatttaaatttagaaatttacaagatcatctaattaataatgatccaaaatcattaaaaaaataattgccttctattaaaaacagacataattagtagaccatctattatttctctttgcagttttgctctgttattctttctttgcagaggtttgattcttgattgaaggtgttcaaaaatggtaatttagcatttgaagatatatataaaaaagggatttttatcttggcgaattaaagggaagcttttcaaccagagttgaaggaatttcaacagtgagattcaaagagcaaaatcaaaatggtttcaagtgttttcctttttgggagaaaacaagttttgtactaacgattgatttgcctagtgaatcttttctctatgtcccaattgagattttacttatttttaatataaagttataatcttgacaaaaaaagataggacatgagtaatgaatgaaaagaaaaaacatattatatattgtattaaggagaaaattaagggacaatgtaaggttcagtggttcactatattatatatcactctgtccaaaaaaggtcccccaaagaaaaaacatagctaaaaagtaccatcttcatctacagaaaagaacaattatttattctaaacaattatatctataaaaaataattgaaagtggtagtctgcgtcattacattctagaaggattccctgggccccacttgaagaaagaaagaaagaaaaaaaagaagaaaaattgggcaccaaaataagaaataaaatagataaattaattataatttctgagaaaagctatagatatatataaagatatcccaccttgtaacagaacaactatcttcttcctaacccaccaatgaatgtctaccattcaatacttgtcttcatcaattatgtcaaacttgtatgaatataaatattgtagctgtatcgcactctttgagtaccacaacagtatcaatttacttttacttgacacgtgtcatctccatctttcgccatatgtacaatgccaagccacctcactatatatatataatcctggatactttttctgctgcttgactcggtttaacttattttttatgattaatatatgtaatttttttctttttcccatctaaggctgtacaaatatttcatatatctaaagtttacaaaattgcttagtctcataataggcctataaaatgtgagagaagacttggctagaaatgctctttatgaaattcaaacttggttgtacctttttgattgaaatcgtaacaaagtttgccaagttctttggctagaactggagcaccacaatagaacacacctgaaattaaaacaatcaatattagtataaaaaagagataaaatcttctgtgatttaataatggcttaataaaattgactcaccaattctagcaccacagtgcttggaacacatttttgagaaaactttcttccaattaggccttgcaaaatgtgttctcacctgaaaatgggaaatcttagttatgaatatactaagtacctaagcagcagacacttaatgtgtacttaaattgttacaaattttctttctgtgttaaggtatcagataagtgggccacactggtttgaaaagaagtctcttttaagattgtttttttgcacacaaaaccgcgtgcgaaagagaacatgtgatatttgtaaaacaataaggccaaaattctttctgcgcatggattgaaacagtgataatttttaaggataaatgcttataatatattttgaaaatgacagatcaaagatcctacccttgtgcctgacacaatgtcgaccccattcttggcgtggttcagagcttgaaccatagtaattagagccgatcgagcatcaccttcttcatacacacttgtcaagtagttatgcatttcaattacaccctaaaagaaaaattcagagcacatagtactttagttaccaataactaaatataattatctcttaatgcatagggaaaattacaaaaattataccctttgatcaagctcagcaacttcattcattacccctttgaaccaatcaaatgagccttgctccctagttacccaatagaagtaggcattcgtggtcttcagtgccttttttcgagaaaccctgttgggagtggtggaatctgcactacccacacttaggtctgatgttctgctgagatcagaggctaaatcctaacaagagagaagaaaatggaaacttaatcataagtttatgaagcatagttagatatgaataatattaataatagcacaagctacttactgcttgttcttccatttttacgatattgatgagcaaatcttttaagatactgatgaaaggggttgcaccaattccaagaccaactagcaacaagacatcatattttctataatcttgtgctggagcaccatagggaccatcaattaatagctttggcaaactgaaatgcagaacatttaagtcagcattatagtgctcaagagtcaaaatgaaaggcagaaaagattcgtgaatttccaccttttctttgtcgtttcatcagcccttagaagtccactctttccagctacaggagcctcacatgctgcagaaaataccctcttcagctcttgtgtccagtcacccagctgacgtatgtgaacactgaggtagtcatcaccaggagcagaggtaattgaaaatggatgcctgacgtttataaatcatagcacagtatttagcaggagtaggaccaaataaactagcaacagtatggcattataaattgtacaatttatttgaatgtaacaactatagagaaaaaagaaaatcagagaggatttacacctctaactttctgatcaattcagtcaagacataacagagcaattaatgatgtttaacaaggccaattcagggaaaattactgaaaaggaaagctagtggagacatatataccactcaaatggagaaatggctgggcactgcacaaacatgtactgtccacttttgtatttgaattggggtggcttggacatttgcaatgttagaacatttccaggataaatagcaacctaaaattttacaataaaaaaaagttagaacaaaagtaatgcagcttcaattttaaggacaacaagtatccagattccataacaataaaatgtagtataattcttttaccttcaaaagacggacgctatagaatccggacctgaaaaatctgagggtcctctcaccagcatatagtaacaccggaacacataagtacatccacgtctgcaattaaaaacacatgaaaattaaaatatattgaaccaacactgttacactacttagatatagattgaaataatggtgtcaaagttatatatgtaccgttttcttgtaccatttgtgtacaagatagagaaacactccgtggattatgagcaagacatagacaatgacaaacaggtgatgtgaataccagaaggcgttatagccagtcagcctatcaaatggcttgggaagtttaacaaggcttctcctgaaccatcgggtagcaagtatgaatgctatggtcatacatgtcaccataagaattccagtcacaccctcaattcctttaataagatctaagtaagtgggcttatcacttccaaagtcaagactcaaattgtttttataggcctcttctgatgaacttatcagccttggaaaatcacatgcaagatggttccctacatggagaattacaccaactacaatggctgaagcaattgtctacaaaaaaatcattaaaacaaaacaaaactgatcaattaggacatagtactaatcagtcaagaaaattgattaagtatatccaaagtcccaaaagtctacatcagattataagatgttacgtgtgtgaagctcagggaatctacatagttggaacgcatatacgcttggacatactttggttgtgacttggttatttgttttcttttttcttatggtaaagtttgtctttatttactttttagagagaatctctcttgttcattttcgctggtttacgtagtaatgtgatttggctttcgtaagaagatgcttctgtatcttttttccccactttctttagctaaaaggcaattcaagatcactaaaggacaagaaaaaccattccactataatatatattcgcggcgggcaccacgtattttattttattttatttttattttcattatcttctatggctggaaaatagtggtaagttagcacgtcaaacggaaattgtccatttcctatttcctatagcttacttagaaaaatagaaaataaataaaatacccaatttaagaaatctaatttcagttccattccaaatgctggttccaggcatatgttaaaatgtcattagtagctagctaggatggtatttaactccaaattttaatgtttttgccaaaacatgcattaagaatattgtcatttcgtcacgtctacatcaatactctctgttttcattttattaaagaaagggcagtgaaaggtatttattgtcttcaacttttgctgcctaatcaatgaagtgtaacaaaaacgcgtaaattgttgcagttttagtttaaaatagatgatcaagaccatataacgttgacctataatgtatagatattttttaagataggaccccaaactcaaaaaaaaaaaaaacaaatacaaaaacgtataaataaagcataatgcgtaccttatggaagttgatgttgtcgtcaaaaggcacaaagtaacccatctttgtattcctaagccaagtgattaaatttctacagacaggcaatagtataagtgccatgttgaacttcaatgtctcggcggctcctttagccgtgaggagacagtaacccattacgttaaaggcctttttctccttgtactgtaagaatttccatgtgaacaatccagccattatgccaacccaaagcatcagaacccaaattctcttccaattttcttgcaaaaaataaaccattttggtgctcagtctccgtattcggctcctctttctgagaccttggagattctggctcaaggcttggctcgtgtagcttaacgcttggctgtagtttaagtatgtgtccttttgtagcaaaagcgtctccaattgccatagctgagtaaaacaaaaacaaaattactatggtgaaaaacaatataaatcatggtatgaaaatgttgttcatttaataataatatcttcaatttgtcaactcaatataagatcacggcgcgtgcctacgtgcacgtaggagtgaaagccaagcatagaaatagattaagctgatgaaaaaaaaaacacttgctgagagaaattatacgttcagaaggtcaatcatgaaggtttagtaattaaatattaatgtaataagctgtttctacttaattatcggcacgacattttgcactatatattataaattatatatatatacgctgacatctgaaataatttaaaatgatgtgtatatataatataatacctttccggtagtcattgttcacacacgtatatagtattatatatattcaaggaaattcttagctagctatatttgtttgaaatagtcatctataatgtggatcaattaaaagaatacaaatattatgaaggggcggaatgctcaagatcaatgatgtcagtaacgaagccacaaattattagcaatagcaccgatatttcaattatttatatatttatgattgtgtatacaaatagctagcaaatatgatatgaaacttatcaaaatgatttgttgggacaactagctaaaagtgcactagaaaagataattagctaacaaattgaagacaaaaagaaaaaagaaaaaaattgttcaactactacacatatttattacttattttaattattgaaatgaaagaaataaaggttgcttttctttttgttcttctaatgtaatgtattatatagtggaaatcttatttcattagcaactacctattgatcaagtcattaacttagactaattcctatatatatagactatatggctattttctttttcgtgtagaaaaaaatcccttcttccacagttcaacaacacgaacaaaacaaaattgaaacagtaattaataatttttttttcttctagctaaaaaatgagcatagtaaaaactaaaaagtcaaagtcaatctgtagtgaaccttagtcaaagtctttttctctctcacaaaatattccatattcgtaaatcttatactacacaccaaagaaaattattgccaatatggttagaaaatgaggtaacaaataataattaacgttagcttacctcaatgtagccaagtctttcagggtctaattcttccatgatcaaagctgcatattcttctgcctgttctttcaatctcgctaacttgtttgcagaagcacttaccataataatctattcatatacaaaaataccaaattataacttataaatgagagaaaaaaaatagaatttgatttattttttatttttcaaaaaaannnnaaaaaaaaaaagaaaataagagatgaagaagcaattgcatgatattacgaaaaggccctctcaccaaccccactaaaaaaatcgtcataatattttctacaaaactttttgggtaaaattagaaaacactgtgtccacctgtctaaagcccagggtctctgttcaagagtcctagttcactaactcttgaatattacatctaataatagataaagatgcttaagaacatggcaaacattataagaccaagaaaacaacaaaaaaattaattaattattttatcaattaaaatataattataatatttgagggagtggttagttttacaaactcatggattaaggtcacccaatccttgcctaccgtagactaaaattaaagatggtcacatataatcgaagaagattatgcaaaaattaaagactctcagtgtcacttttggtcactctagcaagaagggtcggctcaatatatatatatatatatatttacttctttttattattattatttattctttaatataaaataatttaaatcagaaagcaagttggctaattcatgcatattatacaataatcattaatttaattaatataactaatcaagcagcagccttaaaaaatactcactaattaatgaagagtaaggtcacacatcatctcaaaaataaaaaagtccaacaattttttcttttttttttagttaattattataatataataattagttaatttacctcttttacttcttcttcagtaattctaccatcttcgttcttgtccacccttcaacatcaataacaagaaaaaacacataattagtaaatatgaaaagacggttttgcccctacgtcgttgagcataagtgcttgcattttaaatatatataataattaagaaaaacgtaatcactgaaaaagattagattagtgaaatagtttaattttttttttttgtaataatgattaaattaattaatgcatacatgtcaaagaagatctgaagcctggaatcgaaactttgatcggtaatttgtgaccaaaactcgtagagttcttctttgctgattttgtcaactttcaatcttcgtcttcttcccaaagcgtcaactaattccagagcaaactcgttcgaattcgccattcctatttttatttattaataaataaaaatttatatataaaaaaatgaaaatgtaattaagaaaataacaattaaaaataattattaccaatgcatttggcgaaatcggagcgatagagaaaaccgtctttggagagcttttcgaaatttgcctcaacttcgttccatgcatcgactctgttagtcttacagttactgataaatttcaatccacgaagagccttatgagctccagaacgagtccgatcgagctgagctcgctgtttcctcaaagctctagccgctaaagccgagtcgaatccagctccaggtccggcactaacgccattttgaggagtagctgatgtagacgccgccgccgagagcacacgcgagccgtgaccgtggtggctccac

SEQ ID NO: 29838 - DNA, 1159 bp, Cannabis sativa
accttttagtcacaacatatgaataataatttatagttagtcacaattttttttatttttagtcacaagttttgttgtgaccaaaagtaagattttttgtagtgattgattcaaaatgtagaattaaaaaagtcatttgccattagggtatataatatgaatcaaaatgagccattaatttcagactgatatgttcaaaattttggcaagtaaaaattaaactatcatctgcatatatagatgataataagcatttccatatatattatattaatatataatgtttaaaaatttaataccctaaataagccctttattcatcctctcaactacgtgtagatacctttcagcaaacttttctctagatgctttcttttaagaaactacccccagttctccaccggtcaaaccaaacacactacgcgcattaataatatatgtgaaataagctaattagatatatagtcttatataattagaagtaaaaacattttaaatttgtttaatcattattacattacgttattaagttatcattaaacacactaattaattatcactgtcacactatctataataatattttcttcattcacttcctcattttctgtcaatatgtgcgggcaacgatatattaattgcatcacagtgacaaaaccacaactaataaatactacattgtgtttcaataatagtcatacagtgaaagctttaacatacgcatggtcgtctttcaagaattcaagttagaggaacaataatcacatgtaccctgctgcattatgaattaatttattgtgataaataaattgtcatgttttatggtagtttaatttggaaagagatataaaaatatttgtgttaagaagaatagtgtacagtagaaataacatgtgactagtagtataactagaaagttctatatatagtccttcgagtcagaaaaaaaagttctactgtaaatatactagaaatatttataaatttataagttgttaaactattatatgtagtgtaaaacatattatgttaatttcacatagtaattaatgtatcccaacttcaaaatatgaacagtttatttttagttagttggtcttttaatgatacagcagccatataatgagtagtgttttatgtgattatattcacatagaat

SEQ ID NO: 29839 - DNA, 1448 bp, Cannabis sativa
tgaccggcaagatccctgtatggatgcccaaggccagcctgtcacatgtaagcaacaacatggccagtcagcttatacaatgccaaaaagatgaacaaagcttagagtataactcaccagagaaaggtcccgaagtccagtagagtacaacctatcagacacgccatgacctaacttctgaaatgcatcatctaagaaagggatagccctctctatgaaccgagtgattgactcactagccttcctaccagtagctggccttgctcgtttaccgggccttctggtaccttcgctggcaggctgaactataggctgctcggcaggtgtaggacctagtggaggggaaggcagtgatggtccactagcatctacactgcgagaggtactggccacctaggccctcactcgaccggtaggctcatctgaaggcccacttgcgagacatctcatccaagaagacatgcttagtaaaagaaatatcaaagtctgaatgcattgaaaaatattcaacataagaataaaagcatggtgttataaactatcaaataccatcatcatcggaagaagatctatcagagctcacaactacaactttgcccttgcccctagctgtgggcacagggcatgtaggtatatcagaaactaggtctctaggcctgatacgaagagaggcatcactaaatggacccccacgggcaaggcacctacgaacatccctctctctcctttctggactatgtaccataggagactaaggttcttctgcatcatccaagctagggccttgcccttctcttgggcaagccacactagtagttgtcactctcacaaccccaagagtaggagggtacaagccatgcctctcgaagtacattagtcaaccggataaaatttctctgttcagtcgacaaagaaaggatgtgatttgctctatcccatatctccaaagtaggatggaatgtttgaagagcggtaacaactgaaactcacggtacacaattccgcaaatgtcttgttccacaaagtactttttggcgttctttacttttgatatggccttgccactactacaaaaaattcattttaagtccatcaaagttggaatagataaaacttttgagtatattttttgttggacataatagcccaggacataaaaatatttctagtccaacattaatagacaaaatatatattattttaaattttaaataatcaataaatataaatttctaaaaatttaaaatttatatatataatattaattaaatttggtaataatttaattactaaattaataaattaataaataatttaaattcagttctaaatttattaattagtaatttattgtatttttacaaaatccaacattataacaacaatgtcatagtaatccataatacaatcccatattcaaaaatgaaaagaaagaaaaatacaagctt

SEQ ID NO: 29840 - DNA, 1949 bp, Cannabis sativa
  modified_base (1799)..(1801): a, c, t, g, unknown or other
atttttttcccaacctcgttcaagttatattttggactcttggtactggagattcctagtcagaaaccttcaacgcttccagaaaaacccaaaaactagtatgtttctacactttgccctaaattctcttcttgtcatatatttgttttattattggttttttgaaacattctttatattattttttcttataatagataaagtggttgttgctttggcgattccctttcctgaattatcttctccaaaaattcttgaacttataggatattttttttttctacaaagaatgtttatccctggttttaaacttttgagttcagattttttagaacaagaaaacccaaaacttcatgccttacctttcaaaccgggactagaacattcaaaaataaaattagaaataaatgacgagagaattaggttattcaatgagaagattgatcgagaagaagcctctgcatgatttagatgctttatagatgaggttattgataagaaacatcattttttgcgagacgcggcttggcccgaggatcctagtttgacaaagtaccgcttggcatggccattatttttacctctggtttccatttatttttccctaggtaaactaagatttgacatcatgtcatcgaaagagcgtaagtcaaaaattcctcaaaatccataattcaattcaaagcacaattgattgaatccgaagttaggtcaattgacccatatgtgggtccatttctaaggtcttgcttcatcaaaaataaaaaatgaatgtcgtatacgttcggtcacactaggaaaatttagttgttttccatcatctctcttgttgaatgatggaggctgcaacactagcgaatcttcaaggattagggcttggagtgtcgagcatataaaggcaggggttgtccttctccttaggcaatatttcaaggacttctataattaaattggggtcataccttttcaacttatcctaaataattataggatttcggcatgttatatgtcgctaaaccatgtcttatgaagggaatgtccaaccctatttgagattacgtgcttttatgcacttaaggcatgccctacgaggaagaattgttcatgtggcttttattatttgggtactcattccaatgatcataagatcattgttaaacttccaataagaaagacttcaagcatgatttctattggatgacagggcttcatccagtcaactccaccaactttagaattttacttaagtatccatcttcctaaaatcttagtcttgagttagaattttatgattggatatttttactaatttcttctctttatttgaccatttcagctatgttgaagagaccaatcccaacaccagtgattcaaaggcgacatgaaatcctagtgaatatgccttttcgtttgcgaatggtagacttcctactccatgataacaatttaaattattatggccttcttagaaaagaccaacacgcaatggatttcaaagaccccaagtatcaaacatggtaacaaatcctagtgcttgagggagaggaagaccgcaactacatcgctcgaacccattacgtaaatagcttaaccactcaagaagcttttgaggttaatgaaggggctccctgaggtaaaacatcttattttatggatggtctcttaccgtccatagggctgagccaacaactttagtaaaatttaaagataatcaatataattttttcatcgggaactgtgtcgacctaatagcccataggtttgatagttattatgtaaataccgcttagctttaattnnnaattaacagataattaggatttaattatgaaactagaatattaattatatgatttatcattttgtggagatttatttgaattcagtgtgtattatttatgccatatatggaattttgcatttttgcatgttttgtgcccggtaacatt

SEQ ID NO: 29841 - DNA, 1519 bp, Cannabis sativa
gggggggggagcacttcctgtaaattcttcgctttgtgtgcatccctaattagtactcttagtaatgtgtcgttattttttgttaaattgtttgtgaatcaaaatctcatttatagaacactatttattgctttaaatatattttattaattttacacatactcttatataaaaagtaaaattaaaatttcaaacaattaataaaatatatttaaagcaataaatagtgttttatgtagagcatgaatcttgaattttaaacaaaaacaaaaaaaactttaaaataaagaaatttaaagaacatctgatgtagcgtgcttttaatttaattccttaaatattttaaagaatttctattttagagcatctcatgtgagtgctcttaaaatgatgttttcttgggtttaaaaagaatacaaaatgaacattgactctctttctctattagtctagttttcaccaaactaaatttgtttttgtataggatgaaatttgtccccaacaaacaagttaagacttaagagtagacttataattttcttattttgaagccaattcactttaatttctattcatctaattcaataaatactatctcatacttattttatttcatttctttaagggactattaacacacaaatatcaatacaattatacatatatttatagatttattgagtaataatttcgcacataattaattaattaaattgtggatgtgtataaagtacaagtactatcaatgttgttgtctaagaagtataaattaaggtaacacattaatgattagcataatccattcatttatataattattaaaccctttttcactttgcttgcaaaaggctcaacattgttttttatttctttttgggtgaataattattatatgatttaagaattagttattagaagtagacagtccaattataagtagattagttttttcttcctctctttataaataaaatatatatatatcataatatttagagttatatatttgggcccgacttttcttgacacgacatgagtttgggtggcacgagcacatcatatcatgttaggagaaagtatagatttgagtctaacaaaacacgaataaatatattatgaattttgaatacaacacaaaaattataaatttaagcacagacatgacaattttgaaaacaccacattaaaacataaatatattatcatgtaagcaaaaacatgaaataaaagtacaagctaaagttatgaatataaaaaatttaattagtaatccatatatattcttccaagaaaaaaagagttattttgaaattatataaatatcatttcgaaaaatttaaattattttaaaatataaaattacaataatattattatttatgtttaataaatttgaaactagtttgaaaaataggaaagaaaaggtatcaattttacaataaggccattgtaacgtccccgcttcaagtctttattgggtcttgactcttatacacgagtacgtcactctggctgattc

SEQ ID NO: 29842 - DNA, 1876 bp, Cannabis sativa
gatgtggatttggaggaagaagacacaaaagaaaatgatgaaatcttgtgtaatatcaatgaactttggaaggagccaggtgatagaagggaatcagagccaggtagttcttcgcagcctcaatttgtgcatgctttggcggatctgggtatggagataattctcaatgaagaattaacttgtcagaggatggcaaaagacaagttaggaaggaaaagttgtagagaattaaaaaacctagcttttaacataaactatgataaaagtcagaaaaagaggggctttggagaaggaattaatgaagatactttcccggagttttagagggagtggaaataaggagaagatgaaagcaataaaggcgacgatttgtaaggtgaatccggatatggtgattctacaagaattgaaaaaggaaaatgtagacaaaaacttcattggaagtatttggaggtcttgttctaaagctcggatactcatcccagctattggaaggttgggaggtacttgtttaatttggggcacaaggagcatcacggttttggactctttagttggtgaattttttatttcaatcttgatataggctgaaggtaaaaagccgtggtgtatctcgggtgtttaagtgggatgagatggctggccttagcttaatttctggggagacatggtgtttaagtagggatttcaatgtggtgaggagagtccaagagaagctgagtagtagctcttatactaagagcatgaagatgtttgacgaagacaaagtgaaaagagcagtttttagttgtgattgcaacaaggtaccaagacccgatggtttcaatttggcttctttttagaagaattgggaggtcttgtaagataaattaatgcaaaatttccaatgtcttcgagaaggatggacgaattttaggaagtgttgatgaaactaacatttgcttaattccaaaaaagtttaacaattgtcaagttgaggattttagacagatcaacctcattacaagtgtctacaagatcgtagctaaagtccttgcctacagactcagggggttttaagtgaaacaattttggaaactcaatcggccattgtggaggaccgacagatacttggttcggtgttggttgccaatgaaacagtgcaggactacaaaagtagatgcatgagttggttggttttataaatagattttgaaaaggcgtatgatcggttagaaagattttctagacttgattatgttaaacaagtgctttggtgaaacatggagaaaatggattagatgatgtatatcatcgacatcattctctatattcattaacggtagaccaagaggaaactttaaaggctctaggggccttagacaaagtgatcctctctcacctttccatttcaatttggtagcagacgtcctttggaggatggtgatcaaggtagcaagcttaggtaacttctctggttttatagttgggaaaaagaagattcaagttactcatttacacttagcagatgatactcttttctcgtgaatgatgagacatctctttagaagtcgttttggttagttgaagcattttctgctatttcttggttaaaagtcaacttaaactagagccagtcgttgggactttgcatggttgagggggtagttgcacaatgtgcttctctagttggttgcgaagtgggaagtaggccactgaagtatttaggtatgcctttgggggacttgggggactcacctaggaaatggggtttttgggaactgatcttagacaagtgtgctaagaggctggagggatagaaattctcattcttatcaaggggaggtaggctaaccctcatccaatcagttcttgcttcacttctcacatattttgt

SEQ ID NO: 29843 - DNA, 2843 bp, Cannabis sativa
aaggactcttcggagtcttatccgagacacggacacagacgtgatcttcctctcggagactaaggtgagcacagaggttatggtaaatgttttacagaggctgggctttggcaatcactgttgtatccctgcggtgggactcgctggtggattttgtatcggttggagagtgggaattcagcttcgaatgatggaagtatatgacacgagatttaaagctttggtgagttcctcccttgggataccaccttgggttctttactgtgtttatggcccgccttatgtggctctaaagcaggagtttcggaactggtttcttctcaaaatccaagagggcaatgaaccgtggatgctactgggggatttaaatgttacactggaggcaagtgagaaaattggcgggagagctttccacagtcgagaaggagaaatccttaagaattttctgtataactcaggaggcattgatctcggatgcgagggtccgatgtttacatggcaaaactcaagaaaattatcgcagaacattcgcaaaagactcgaccgagcgattgctgatcctcaatggtgtgttaatttccccaaagccaaggtatctcatcttcctatatatggttctgaccatgctcctctgttgctcatggcttggggcgatcgagaaagactagcctacccgtttcggtttcttgaagtttggacatctaatagtgaatgtggagaaactatttcgaaggcgtggactacccaggttctagggagccagggcacaatcttctgtaaaaaactgcagaagacaaaaaaggagttaaaagcttggaatgtgtcaaggtttggtaatgtagatcataatctaaaagacttgaagcaccaactgtctacaatccaaacgctccaaccatcccaggataatctcgagactgaagcaggtattcaactagaaattttgaagatggaagcgtatcaggaaagaatatggaaacagaagtcgagagaaacctggcttaaagtgggagaccgaaattccaaattctttcacgcctcgaccattataaggaggagacacaacagaatcaatggcattgaggaaaaacccggagtttggttgagaagtagagttgagattggaaactacttctagtcaaactttcaaaatctgtttacctcgactgacccgtcaatcaatgaagaattggaacacctctttactgataaagtggagaattatgagaatgatcaattgtgcaaagtccctgtggcagaggagataaaagaggtagtcttcaagatgcacccgcttaaatcgcctggccctgatggtttcccaggtgttttcttccgaaaatactgggaaatagttggaatgcaggtctgcaaaatggttcaagaattcttcactcatggtactcttccaaacacttgtaatcataccttcatttgcctaatccctaaggaagctcaagcaaagactttcgacaaatttcgccctatcagtctgtgtaactttggttacaaaattatctctcggatccttacggacagattgaagagcatcattgatcgtcttgtttcacccttccaagctgccttcatccctggaagatggattgccgaatgctctgtactcgcccaagaagtccttcatgctgttaaaaataagaaaggaaagacgggaatcatggcaatcaaaactgacatgagcaaagcctacgataggctggaatggaatttcctttcgagagttctcaaagcaaacggatttagccccaaggctatccttcttataatgaattgtgtgacttcggtcagctactcaatcctacttaatggagctccacttgctcccttcaatcccaaccgaggcctgagacagggagaccccctatctcccttcctcttcatcttatgcagtgaagtcctctcaaaactgattcttaaagctgagagagataatctggttcgtggtatcaaggtttcgcgtcaagctcctcccatcactcaccttttttatgcggatgatgcaatcttcttcacacaagccacggaagataatgtcaatactttattgaagatctgggaaaaatatgaaacttggtcagggcagcgcataaatagagagaaaagtggagttgtattctccccaaatactcataacagcaagaaagtggctaccctacaactcctacaaatgcagacgctaaaagctaaggaaaagtacttgggaaacccgtttttcttcacggggcgaaggaaagatgacttccagttcattaagcagaagatcataaacagaattgacggctggaaggcaaaatgcctctctcaagcaggaagaactacactggttaacgcagttcttcaaagtattccaacctactacatgacaacaactttgatccctccgtccacttgtgaggaattggatagaatggtggcaaagttctggtggaccggggcaaaccaagaaaagaaaaactattgtgctttaaaatcctggggtgatctttgtcaaccaaagaactgtggtggtcttggtttcagaaaattccatgccataaactttgctcttattgcaaaactgttttggatggtgctccagaagaaagacaagccatggatcaacactttgtgtgctaagtactgcagtactttcgacgcttggacggtggagaagcatgactcggactctcgggtttggaaggatatcctcagcaccaggagcctttgctctgagggggcaggggtcatcattgcagatggggacacagacatctggacaaagccttggatcccatggaagtcaatccaagacatcagggaaagcttccactataacaggattcatg

SEQ ID NO: 29844 - DNA, 5076 bp, Cannabis sativa
  modified_base (3489)..(3493): a, c, t, g, unknown or other
acttaacaagtcttgatattagctcaaataggccattgagctgcatactcacctaggacatgacctacgactagttgagagtcgtggtgtatgtccaagtgttcaactcgtgcttcatgtgctagcttgaggccagcattcagagattcatgttcagcctcgttgttagaagctttgaaactaacctttgttgccttgtgcagccattgcccctagtgttttgagggccatgcccgcatttgggaaagtggtcaatgcaccttctaggttgagttgtcttgctcttgttcttgcttcttctctggcacttgcttttctcccaaatcttgagagatttggggagatatgctgttatatttagccatgacgcttgcgagagcttggccttttatggccatgctaggtcgacaggtggcgttatattgactgagcctcagtggttcacttgagtggtcggctaagtgcctcaggttttggtgacacttgtcccatggcggttggcatgcattgctttggaagttttggtaggagagtgaagcatgaacacttctcctccttctcccttagacttcatggcataagggaatcgttgaatttcccttttttgccattattttagtcagagccatcattgttgcgcttgcctccaatattctcattgttggagaattggcagaggtcctgcattggtcggcacattagacagcacttggggcagtatgatgcctgttcctgttcaacgttgaccttccctcttgtctgggcttgccggagaacttctttgactttacaaagccatcaacttgctcaaggaactccttcatgttgctcttaatattcttctgatatctttctagaactcactcgacggtaagatccatccaagtatagtcgtatatcgaccttcttttgtcaagcctttgaccttggttgcctcaaccatgaacctttgaatataatctttcaaaggttcgtcttgtctttgctttatctcgacaagatcctccagtcgtgaaggtatttgttttgaggctgagaactgaatatagaactctgaggagaattcttcccaggaattaaatctttttaaggccagcttgaaataacattgttgggctatttcagccagaattgcgagaaagattcagcatcacacatctcctaatatttgttagagatctgtttggatctcaaagtatttcaagtatactaggggatctttttacctttgtacatcttccaagttggcatcatgaatttgggcacagacaagacattgatgtatgctgagaaaggtgttactcttgacctatctagcttaaggtctgatggttttgggccagccaagcccttgaggatgtctcgtatttaatccgactgtgcttgcatagaaggatctgatgctgcagggacctggttgattgacccttcttgattgagctacaaccctatattggctagacccttctaggagagagtatgtacaaggccggccagccttgaccctaacaaatgttcatggttggcaagccctgtgcttggtagggcctggccaccaattctttcttgactggctggttaaacctatgcgttgacatggggtagatcacactaattgctggagttaagtggatccaagtatctaaattgattggtctcacttctcatgttgttattgccttgggtgttttcacctgttcccggacctacccgattaaagattggcctttgggttactcaatcttgaatgctctgaaataggagttcaccctattagtcaactagatgtgcacctctaaggtgctggctggccatgggtttgacaattggagtcgttgttgtgccagagacccctgactaccccacagaccaatggttgtcggggtctagctgctcttaccacctgatcttcgtggcaagacttgtcctccttcatcttgtggaaggtttgtccttgttccagaggaacttggttggacagattgtctacagatcctccccgatctttcaattattgtcccttgcggaggatctcaaatgagatcctgacctcttctgatagttctttcattaaatcaccttatcagatcacttgcttctctattacggtggtctaatgctgcctaatgagatcaaaggatgtactcttggtcatccatccatatcagaaattcacgtctctgttgtgcaaatgcatagtagccaacaatgtatggttcttcagtttagccgacctgatagacgacctctctaagtctggctaagtcaagatcttctccgaagtctacatgaggttctccaatggatgtctcaccaattcttggccctatcctctagcataatactggggaacagatccaattgtggcactcaagggttgctccatgttggttatttctttaatatgaggcgatagtggagggtcctcctagggcagttgaggttggccattaagaccaaccaggttggtagtgtccacctgactagctgcggtgtccaggtttatggtgtcgagatggaagggttggccacatccatcaagttcgtggagattctagttgtgactagaacacgaacatcaggatctgcagtcatagggtcttaaggaagacccgataaggcagaagttgtagctagagttctccttgtgttaaccatggggtttgatcaaataaattaacaacttgctcttaatgaaagcaccaaactgttgacctcagatttggccaactaatagcgaagtcaaatttaatactgatgcttgccatgtgttacacaattagaatagaaaagtaaatagacataggattttatagaggttcatcccccttagttagtaggtaataacctactccccttttagttgtattgataccaaagataataccacttagatcactatagtaattggatctgaagtggctctcttaagattacaatgtgaggaccagggttggcaaatctcaagtgagaatagagcaatgggcgtgtgagagagggagagagatgagatgagttgagttatcagacttagagcataaggcttagggtttgagacttagagaattagggttaggctaatgctctttatatagtagagcttacatccttaatatcccttaaaagtaggtaaataaagctatatttacataattaaataataaagtttaaatgacttaattatcccttgaaaatagggaagtggctgatatttttgtggtatcttcgtaggttgtcaaggcccaactcgcagtttggcttactgtccacgaattaggactacgcatcaatggcctactaggaaaaacctggccggccatacacctgcaaggtgcaggctggtcggccacatactgtctacaggttggagtctgcccaaccatgttcttgccaggatcggtaggtcatgttcctacgagctttggcaagtgttggccaaccttcgtaggtgttggccaacctttgtagtgttggaatatattttaccannnnntagatttactaacaagcatgttgagtaacaccctaaatatgaattctcaaaaacaatggaattaaacacatataaagtttaagaaaccttacattggtggcagcaaaataatatgtctccttccactcaattcttaatccttgttcctttctgccatagagtattatcaaaatctgagcttgattatccttcagatgttggattcatcatagtcttccacataatgattgagtacttgacttgatatgggtgggcatgtactctatcactataggcttgaaaattatgaagaacaagataggggaattcaaaaatagtaaaggaaggagctctcaaaatttctagttatctggcagaatgtaaactagaagtttcctgggattagcaggatactatagaagattcgtggaagggtttgccaagatttctacacccttaatggaattaacccgaaagaactgtaagtttgtttggattgacatgtttgaaagtagcttctaggagttgaaataaagattgattactccgccagtactgactttgccaattagtgatgagaaatttgtaattttttgtgatgtcttgaaacaagggttaggctacattttgatgcagttcggaaaggttattgcctatgcatctaggcaactaaaggaatatgagtagcggtatcgtacacacaatattgaattggcagtagtggctttttccttgaaagtttgacatcattatctgtatggtgaaaaatgtgaaatttacacggatcacaaaagcctcaaatagtttttcactcagaaggacttgaatatgaggcagcgacgatggttgaaatttgttaaagactatgactacgagatcctataccatcttggaaaagcaaatgtgttagcggatgctctaagtcgaaaaggtccgaggcaagtttatgaactgaagaagatctcaccgaagttggttgaggatatgactagagcaggaatcgagtttgtgattaggaaattagccaacattacattatagactgatttgctagagagaatcaagaccgctcaccaaagtgatccaatgttacaagagtataaaaagaagtttgaggctggattagcaaaggagttctcaatttcatcaaatgggttattgcagtataaagatagggtttgtgttcctgcagatgatggtatcaactaggagattctagatgagtctcataccacaccatacttattacacctgggaacaactaaaatgtatcaagatgtaaaagcactgtactggtggctaggtatgaagggtgatatagtggaatttgtgtcaaaatgtttaacttgtcaacaaggtaaaacatcaaagaccagggggattacttcaacctctaaagattcctaagcggaaatgggaggatatagccatgaattttttggttggattaccaagaacaatggtattctatgattctatctatgtaatagtggaccgatatacaaagtcaacctactttttactagtgcaaactacgtatatagtagatcagtacgctgatttatatgttaaggagataattcgacttcatggtgctccaaagt

SEQ ID NO: 29845 - DNA, 5152 bp, Cannabis sativa
  modified_base (2546)..(2552): a, c, t, g, unknown or other
gaggagaagctgatgtagtttttgattgctatgaatctgtaggggttttggtagtgtcaaaggaaggaattaatgatgagtggatcctggattcaggatgctccttccatatgtatcctaagaaggagatgttccaataagtcgaagaaatctcaggagggacagtgttgctgggcaaaaacaaggcctgtaatgttcttggcactggttctgtcatgataaagatgtttgatggcaccaaaaggactctacaagaagtgaggtatgtccctgacctcaaaagaaacttgatatccattggcatgattgacaaccttcgatgcacaatcaaggtggaaaatggggcattaaagatatccaagggatcaatgacagtgatgaaaggtgaattgaaacatggtctatactctcttattgggacaactttcattggaagtgttgcacctgctgttgcaggtcaaaatgatgacacaagaatgtggcatctcagattaggccatgtaagtgagaggggaatctcagagcttgacaaacaagggatactcaagggaaaattggaacaaaactgcccttctgtgaaaaatgtgtatttgtcaaaagctgcaaggtgaaatttaccacaggtcaacatacaaccaagaagaaacttgattacattcactcagacctgtggggtgcttcaagaaccaaaaccttgggaggagctagttacttcatgagcatcattgatgactattctaaaaaggtgtgggttttcctgttgaaaagcaaagatttggcctttgaaacctttgtcaactggaagaatgattgaaaatcaaacaaatagaagataaagaagctcaaaactgataatggattggaattttgctctgatatgtttgcaagtttctgcagaaaggaaggcattgtcaggcatcacacagtggttaagaaccctcagtaaaatggccttgttgagagaatgaacagaaccttgttggaaagggtaaggtgcatgctcataagagctgaattagctaagcatttttggggtgaagctttaaaaattgcttgctatttgataaatagatgcccctctacagctctgaactttaaaactcctcaagaactctagactggaaaagctcctagctatgaacatctcaaagtgtttggttgcactgcctatgcacacatcaggcaagacaaactacaaccaagggctcttaaatgtctatttcttggctaccctgatggaatcaaaggctacaagctttggtgtttagaggaagggtacaagaaatgtataatcagtagagatgtcacttttagagaagatgaaaagccactaaaaacaataaaggaaatccccactgactcagatgctattcctcaaagtgttcaagtggaacttgaacaaggaactgagtctcagaaccaaactcccactgctaattagagaaaggaacctgagactacaagcagcttagatgactatcaacttgccagggacagaactaggagagaaatcagggcacctgagaagtttggctatgctgatttttcaacatatgccttgtcagttacagatgacgttgataacacagtgcccaaatcatatcaagaagcaatgaatggataggatggtaagaaatggctacaggcaattgatgagcgaaaacagtcactaatcaagaacaagacatggaggatagttagaagaccacctggacagaggttaattagatgcaaatggatctttagggtcaaagatggcatccctgggtttgaacaggtcagggtgagtctccttcacaagaagaattgtctgggtttgtggactcagactatgctggcagcattgacaccagaaagtcactcacaggttatgcattcacagttttggggggctgtgtaagctggaaatccaaccttcaaaaagttgtggctctctcatcaactgaggctgaatacatggcagcaactgaggctgtcaaggaggctatttggctcaagggtctcacaaaagagttaaggtttaactcagatgatgtcactgtatactgcgacaaccaaagtgctctgcacttagtaagaaatcccatgttccatgagagatccaaacacatagacatcaagctacactttatcagagatgttgttacaaggaaagaagtgaccatgaagaaaattaacgctgcacacaacccagctgacatgctaaccaagtgtgttacccaggccaagttcagacattgtctaaacttgctgaatgtcaatggttgttgaataccagttctttgaagtcattaccactgttgagactcatcttctcctacttctcaaagtgatcaaaataaggtggaattgttggtgttttaaccactttgaattactaactgcattaacagtcttttgatagctctgcttatggttgtgacttgtcctaactgtcataactataaataccttcactctcaaactcgatgaagacacaataagagaacaactcccatctcaagtctaagttagtagtgtctaagattgagagagagagagagagnnnnnnngagagagagagagagagagcttctgtaatgaagagagaaatcagagaaaactgagggattcaccatgaattcttactgcaagttttagtttagtttttgagtggattgagggttgtaaaagagattgttcactcttgaagtgacttctctcagtgtgagctttgtttgtaattcttgtattcatgattggttatctcaaagttgtatcttttctctctttcagattttaattacaatgttatgacatgtatgattcattcatcttaatcaaattcatctctgattaaatttcttgttctggttttgattacatgttttgctgtcattgtgattgttgtccttaaatcattgttatggtgatcttgatcaggttttctaatccgcaacagtagccgacttaagttgttgtagagcaacggtattaattgccagcagctaatgtggaaatgttattgagctggtttataaaaccagtacaaacttattacaaatatccaaatttaacttgggaaatttaactaatcacctcaaatcaaccttttgtttaatttccacaagcttagatatagatctatgtcaaatttcccacttggctcctaaggagagtttcaataagtatcaacattgagcaactttagaaaatgtgatctaaacttattcactcacaactttggtgaacatgtttgcagggttgtctttggtattgattttcttcatttggacttcctttccattgataatatctttgatgaagtgaagcttgatttcaatatgtttagatctctcataagtttttgactaagtgtaatgcactttgattgtcacagtatacaatcatactttctgaattgaagcccagttcctttgtcaaccctttttagccatattgccactttgatttcagtagcagccatatacttgaggacagtactaccactttttacggtgtgtctttccaactaatgcaaccatcttgtgcagtaaaagcatagcctgtggttgatcttctagtgttcaaacatcctacaaaatttgaatcaacataccctgtaacttcctctctattttcagtctttgaattatagattaatccaacaacaagtgtgcccctaacatatctgagaacgcactttaaagcttcccaatgttgtccacaaggatcagatatatacctgctcacaatgctcattgcatgagccaaatgagatctagtacacagcatcacatacattagactttcgacacaagtagcatatggtacactatccattcttgttctctcttcttctgtgtcggttaagtctttcttggacagtttgaaatggggtgccaatggtgttgaaactggtttggcatctgtcatctatcatcttgaattttttgagcactttgcagagatatttcttttgagacaaggttatttttcttggtctgtatctcacagtttctatccccaatatatttttgggttggccaagacctttcattttaaattcaattatcaacacaatctttatgtcttcaatatctgatctgttcttaccaactagtaggatgtgatcaacatacaagagctggtaaacaattttccatctaagtatacacatgaatcatagtagcttttaatgtaccaaattctacacataaactcatcatctaggggcttgtttaagtgcatatagagattttttttagaagacatacttcatttggattcttgctatcaaacccctcaagttgcctaatgtactcttcttcgtctagaatagaataacatgtaagaaaggttcttacatctatttgattaatttttaggtcttcttgagcagcctttgatataatatcttgaattgaagtttgcttgacaactggtgaaagggtttaatagagtaaaacgtgggagatacttggtaactatacttactagttactagtatttagagttaggaagaagaaaagaaagaaaagattgtgtctttttattatattcactgggaattatgaaatgatgtgatttaacgttaaatacggagtagagctggagagaaagagaaggggtgagaaaaataataaaaagaaacaacagcgacttgacgggccgactttttcctctgtacactttgtccatctatccacccccactctcatttaatattttgtgttttactaaaaaaaaatattgcaaaatatttatttaaaattttttattataattttttaattaatttatatttttgaaaatatatgtcaaaaatatattttttaattttttattgcgatgttcgttatacttacaatattatttcatttaatttttttttaataattacagtgccaaaaatacgtttattagtttggtaaaaaccagagagaaaatctcattgacaggataaaagacctacttaaatcagtggttagagagtattgctttcatacggcgggagtcattggttcaaatccaatagtaggtagaacttattagataggaacgacactagtatataatgagttgttatactcattcgcttttattgattttgtatatttttcatcctactctattgaattttctaatttcaaattagttcattgcattagaa

SEQ ID NO: 29846 - DNA, 3347 bp, Cannabis sativa
tcgaaacaaatttattatggaaaccttgtgacttcagaaactacatggatcaaaccaacgaaataagccatagttgaatttactatagcttaaaattttgatttgtcttaccattttttcttttccaacccttggcttgtgtacatgtttaattttatgtcaaggggaagttcataggaagatcatttaaactaaatattcaccaacattgagaagtagattctatgtttttgaccaatgataaagtctcacttgttttcatatatacatatatagtttctacttgctaacatagcattgtagtttcattcaagttattaatgcatattaagttttcttttaagaaaatcatgttcaatagaaaaattacttaaaccaaggtaattattattggcgaattttcaatttctgcctaataattaaagtagtaacgtgtgaaatagtaatatttgaattttatttttgatatcctaaaattttaaaaatacaaaagaagttttttggaaatgttttaggcaacctacaaaagttaaagatttagcttggcgagcattgactagatgttttcctttccaaacgaatttttattatttgatttttttgtcaatttgcgtgttgttggaaaattgtgggtgtggagggttgtaaggaattttagttttgtgtttgcttggtgtgaagaagtggttaagagggttgatgggagtagattatgtcgggttttaatggtgttgtgggcgatttggtcggccaagaatgacatgaattggaactagcgaagaaggggtaagttggaggttgtggagtttgctgattttagtcttgatcaatgggttaaagctaaaggtaggggaaatattcatttgttgcgtctgatagtggaaggtgataaaaaagaattttggacttaaagaagaacagaagtttggttttggctttattgttcgggacatgggtgggaagatggtggtggctcaagcttagtataaagtggcgaggggtggaaccggtgtaagctgaagccgtgactattaaagaggttttaagttggctaaaattgggcaaatattcctgagccacggtaaaaaccgatggcttggtcgtggagtctattcgaacccttttgtcagtgggctctctgtttgggttgattattaaagattgcaaggagtgactacgtttacttcataatgtttctttattttttgttataagcaatttgcgaattgaactgtgcattttgttatcagaaactttcgtttgttagttgatcgcctgatcatatgttaacagagaattttgttcctttaatttgttgtggcatttaataaagatgaatttatttcaaaaaaaaaaattacaaaagtgcatattgtttaattacatagttaaaatgtggtttttacaacagaagcataattccaaaaataaatagaccaaaattgaacagaatagaattgaatttaactattgatagttggaatgaggtactaaaaatatagtaattattctaagctttatatatatataaagagagttcaagtctttatgattgaaaatgcatagaataataactaaacaagatcgaccccccaaaaattgcaccaataaaaagccagaaagctattcactggtacagaaacaatgatgctgaagtagcacttgagcttgagctaaaattatcacaaaaatactaatagtttctcttatcttctcctgtcttcttggtatggtccctcactctctttatccttcaagaatccgaggaaaagaaggaaaccgaagaagaagaatccaccagaccagttgcctccaccaccgccacccccacctccaccatcaccatcatcacgtggtggaagtccagtcccaccatcatcgagatccggtagcttctcctttgctgaacattgcaatgagcagttaagattacaatttgaatcaatctcagaattttaaggaaaacagatgcatgaagtgtatccccaaccaattaatcattgtaatttttctaccaaatggtaaaagctaaatgcaggaaatgaggaaagggttattacttggcatgtgagtcattgttggagcttgcctagtaaccgtctgagtttgctctgaagcacaccgagcactctgtaaaaagataagcagttatcgttgagacagtcatgtaattcacgagactgatgattgaacacgtaaaagagatatgaaatgcaaaagcttacagaagcagcagagcatatgaccgaactagactgccttcgagtagaaagcttggctgatttacttgttccaggctgagctggtcctaactgaagactcttagcttgtaaacattttgttggcaatggttgaaaccgaaagcaggctcttcctaaaccagattccataagcttacttcgtcccccacatcccactgttctcaccatggccaaaacacaaacaactcagtacaatcatagtaatcaaatgtaaaatttactgaaaaaggcgcagttttaagcctaaaatttactcggatcttatgcctaaaagattgacattaaggtattcgcatatattctagtttttttgttcaaaaaataatattattatgcttctcttttcttcacagacctggtggtggtgatagaggcacactgataacagagcttgcagctgtagtaagcatcgacattttaacgatgctgatcgaaattggtctgaaaaaatatgatgcttgtgttatgaaaatgacaatatatttgtatatagaaaaaaattgaacaataacataaagttgtaaatggagaatcccagttcaaaatgaataatcacagcattgtaaaccatatccaaaagcatcaaaataagaaagattacagagccattatgtcagacattcaaaagcttaaatgagttatttggaagaagatagtgctaagaataccagaacaatctcctcttttcaattttgcatttttccaatacaccaagaacataataacaacagatacatacataattatatgattctataaattactatacaaataatgaaattagccatattttctaattatgcataggagaagtttaacttagaagcctataaacataaagagataagttctaactcaaagacctaagaactcctcaatctcatcaccattgactagaatttattaatttggaatttaattgaaaaattaataagcatagaagagccacccaattctaatgattacatataatatcataatcacataaagctggaacatttaaacacaaaacaactccaaaaaataaaatccccaaagagtgaaggaaaatatgatataccagaaagaaaagaaacaaaataatcc

SEQ ID NO: 29847 - DNA, 2254 bp, Cannabis sativa
agtattaataattaattaatttcaaatattataatttatttttatttttttatatttaattaaattaaaaaaaatgaaattgaatggtaggtattggggtttggttgggctgggatttatagaaggtatttggtggagccagcagccatgtggtggccatcaaatttggttcaagtttcactcttcaggtaattatatatttaatcgagagtaatttatgacgtaaatatttaatttattttttatttgtaagtaaatatttaaatttaatttttaatagtaataatacttgaattataattttagaacttctgtaagtgtgtgaataagtatctatgaaagtttctaaaatatatttagatattattatcgttaaaaattaaactgtatttatctgcaactaaaattaattaattaatatcctactaatcaacaataaattgtcttaattaatataaaatagttaattattgatactaaaaatatttctataacttttatgtagtccatatttttttttaaaaaaaaattataataagaataaactttgaactttgaagtaataaattataatatttttagtcttatgtgaaggaaataattagttgtaataattatctcaaaaatttcaatatatattattgtatctttattgtattatagcttaaaagtttaaaataataataaaaaagaataaatgaattattatttgaagtgatatatataattagttataataacctcctctttcattaaaataaatattttaatttgatcccacaaattgtattaagagatattaacacatcaacatggcttatttatgtattttgtattcttcttcttctacgcaataatgaaattattatttttgatcattttgtgtgaagtgcacgttgattttttttaaaaaaaataaatatatatatattttttatattaaattagtaggtgagttacgatataataatatatgtccaaataatgatgagttgtttaattggtacaagaaataattaatgatatacacgtttttgtttgttaatcacataaaaaaaaatctatatatacggtatggctatttatgttgatgcaacttgcatgtactatacaataaatatctaacctaaaatatttcatgcattaataatatgaattttattttttagaatagaatctatatgattttattttacgagggttacttcaataaatccctatttgtttcaataagaattatttttttttagtataatttttttaatattagtgtacgtaataattatttagtattatttataaattttttaaaaaattattgtaatatcaaaaataaaatttatatacgagtaataaattttatttttaatactataaattgttcgaaattttttaaaaatttataaataatcttaaataaataactgtaaaacatacataattatatataaaagaatattagattaatttttttttttttttaataccaaaatatctataattttgaaaagtagattctgtaggtatagtacgtaattgttaattatttggttgaccatgtaaaaggtcgacatcataaaattcaatgcaattaattgaaataattattggcacacattgtttttttttttttaaaaaaaaaaatagtgtagggacacatcttccttaattaattacaattttcccataatagtgataagtgaatagtaaaaaaaaattaaaaaaacaaaaacaaaaaacaaaaagtgaagatgattatcacatttctcctacaaactcaagttttatgagtttgggtaagtttatgttgacttttttaaaatgttattttggagagttttttagtatgatttttattatagttacttaagttgcaattatataagattatttgtaaattttttttaaaaaaatagaataatttataggacaaaaaataatatttaaatattttaaacacactactatttttcttatatatatagtaattaagcaactaataattaactttactttcaataatataaactatatatttagaattgtttacaaatttattgtgaggtgtgagctacaaatacttaaatttaatttttaattacaaaaatttattttttacggtaataatacttaagttatatttttaaaatttcgtattaagtatcaactcaatacctgcatgacagtccctaattgatttaggttattaaatatttatttttatttaaaacttaatttaaatatactaataaaa

SEQ ID NO: 29848 - DNA, 1526 bp, Cannabis sativa
tctatgtaaataaattaatcaaatatgaagtgtaataatctctattaaactcaaataactaagacacaacttaaatttcctattttatatgcttatataatagaaaatttattacatctttatatattttgctacctgcaaagaaaataataaaaaattaatatgtttattacatttttatctttatatataagatgtagctatctaacatattttattagtttaacggttaattttaacagagattaactaacaattaaagaaaatcgcaaacatcttcaaaacaaatccataattcctcgaatcttgctttagttatggttatggtggcgtagaaatcttgatgacatccgattcgttctcctacaagcggttcttgattgtcgtttgagtcgttgaccaccatgtccacatcactctcttccaagcagtgcttaattggctcagagatttctcattgttgctaatatccttcttgttcttccttttaaattcgaaaacaaagtgattaactattctgctatgtttctcaaaagataaaaaacaactgttctgctattgaaatcttcacctccaagatgagtgtctcggagatggtaagacgaagagcaagagttaaaaaaaagttacaaggaggagttttggtattgcattctcatgcgacctttggatatttggaagcctttgtacatggtaagaattgagcaacctagagaaatcaatcagtgcagattgtgtggcaaattttaatgtgttttgcctgttatgggcttcctctatttgatagtcaacttatatgtacttaccacactaggaggttcaaatattttctcttctgggttaaaagtgaaaatttagttatgtacccacattagtatgatattgtctgctttgggcttaagccctaacgattttgtttcatgggcaccttttcaaaacgcctcatactaatggagtaggtggagcacttatattcaaggcaactcttgtctattattctaatgtaggacttgggttgatactccagcaatactccccttaaaccaaagaccacatactcgtggccctctcctccagtaaaactaccttatgttgccgctatcaccaacggaactcgccgcctgaccatcacctttgtcaggaggactttcgacacatgtcttaacaccgatctccatcttgtaccgccttaatcatcaacaagacacgccacctgaatacctcaatatcaggaagactttcgatacaatgcaccatatagatcttcaatcgcgaggtcatcacattgagggcttctcctacacattgcaaatgcagcccactatcccaacgctcctaaaactttggcttgactttgataccacttgttgggcctcgttcttctaccttgtcgggctactacctcatcttaactcccacattagtatgatcttgtctgctttaagcctaagtcctcacgattttgtttttgggcaccttttcaaaattttcatactaatgaagtaggtggaacacttatattcaag

SEQ ID NO: 29849 - DNA, 3598 bp, Cannabis sativa
gctgaaggtgtttcaaaggatgataatactggaaaaatgggttctacttccaaagatgccaccattgatgatgccaagaagtctgaaaatttggaaactattgcagatgttaatcaaatttattttatttctacttttttgttttttggtgtattataggtttttatgttgttttaatattttcccactgtttttttattgtcactctcaacaaccagaccctaatgttgatgatgcagctattgcatctattgttagtgctgtggaaaaatggtatgtttttcttgtaatttgtttttgtgtgtttttgttttattttggtgttgttttagtagtgtttttcatttatgtttcttacaaataaaaaaaaaatcatttcttattttgtcagatggtttcctcaaatcttgttgtttctgtttctggttctgaagaggtttctgaaaagaataatcttgaaatggttatttttcaagagactcctctattacgtcctcagaagagggattagaagaaatgagcagttttgaagtctccatttatggagcttacttcttgtgcttccaaatcaggttcatgttctgtttcacttgatgagtctctttttaaggtggttaaatatattggtgatttgtgccctttggacgacaagattggtgaacatgttgatcaccaattggagtctgagtttgacatttggcttggtaaaagggcttagaaagcaaaaatcaaggtaagtctttttaggtgtttttaatggaatattttttttttgttcattttctttttgttttgttgtcatctttttagcacaacaactaatgtgtattgtaagggtaaggataaaatatctccgccatttcgttttggtgttgaggaagtcagtagcaagatgtggtttcacaaccttagctatcctaattgctttctttcctcttctgtaagtttttttttaatatgttgttttgttcttgtttgtattgtattttttccttttctattttagtgttgttctgttatttttgtagctgattaaactcatttcaatgtatttatttgcagcacattgatattattttctactatcttcataagaaaataaagtatgctatcgagccaaaaatcagggtcacgataactgattgtctttttagtgatagcataacaaacttgtatgataagtttgttgaaaaaacaatgatatatctattttgtctcttgctcataatgttgcacaatacatccgtggtggtaagctattatgtgccactccttagcacttggtcgaccacgttattatgcctattaatgttaaactgcagtatcattagatttgtggtcatttaaacatatctgagcgtcgaatatacctataccattcattgcgttctggtaggtttataacagctgccaaagaggcttgcaagcctttttttgtgatcttaccctactatttctctatgttagactttagaggctttcacaacgaatctaagtttagcacaatagaactgttttctattgttgctgttgatggtttacccgagtaggtcacaacgtaagtttgtcactcatgtataatgttttctttttattttgtcaagttatgatttgttctgtgattttgtttattttcttatgtttttttggtgttgttttgttgttgttgttgttgtacagtgattgtggtttgtttgtagcatattttgctgagtattttattgacgacgaacctattccatcctctgatttcgatgtggaagttcaccgcgatcgtttggctgtgtcgttttatcattatgacatgaagaagtaacttgaaaatattgaaagtgaatctgagacccctcctagccttcaaaagaaatgatttattcttttcaatcatattgtgcttgtttttagtttttagcagtgtttatgtagttttttggaacaaactttggtgttcttttatgttttttagctttttgtggacaatatataatctttattttactatttttttttttagttttgttatgttaaacatgttttatgttgaattatttagcattcaaattacatatatcttctattctggatttttttattgttgttttactattgtttttttccagttgttatactttatttattaatgcttcataacaatgctgttatgttattatctttaaaataaaaaattgcattattgtaataaaaaataacctatatcaataaaatcattcatatatatacattcaatgtagtatccaatttctttaataacccttctaaagtatgaaaaattttcattgaaatcaatgttttttaataaaaactttaaactttagttcttttagaaatttaaattcttcaatatcccatgctcaaatgtatgtccagttttctcctggttttccactattgttttgttgttgtttgtattcacttctactttctatgccttctgctgcatgttctcttgttatgccccagctccccacattttctgcacttgttgtgtttatccttttcccatccaactttcctccttaatatttttggtcttccagatttaaccctttcatgtggaggcaagactataatgtctatcacttcgtctggtacttcccactcacattaatgtcctattgggtacactgtctctgcataagttgctagctaatttttctttgtgtagtaatctaaacagtagtcgtatgggtccatattcatctccttcagctcagccacgacatatctgtagggcattttatctatttggaacttgttgcacgtgcatgttctttctttgaggtctactttccacaattctttcattcttgttacctcaaacaaatactctattgttgctttaacttgttttgtttatttttttttttttttaaaaaaaacaagcttttatagcattttcataacaacaatacagaaacaatataacaacactagaaaaacctaaccatttactggatgtttaggttccataatttttaaatttgaaatgtaaatgttacctccaagttcaatgagtatgtgtaatttttcagcagtatgtcttctccaggtggtgccagcttagtatatgtgttttgtgtttttttgtcctattagtatgtgtccattattgcaccaatactcttaagcattctagcaatgttgtaattggcagctcccttgcggttaaatttacagcgttcagtgattcatatagtataaaagtaaacatattgggcctggacaatatgaaagaaaaaaaatgggtctggatagtaaaaaagaaagtattgtcgtgtggcagtattcactactacaatttggccttttagtgacactctttagtgacccacgtaaaagtgcgtgtcactaaagagctaagagtgatttttagtgacacgcataatgagactctaaacattcggtgttagtctcttataatgggtgtcactaaaaatatgaagagtcaataaagagtaatactcattactttgtgattttttttttaaaaaaaaaatattgacctatagagtcatgccatgagggactgcaaaagtgtgtcccgacttacgtagcgcgtcactatatcatagtctta

SEQ ID NO: 29850 - DNA, 3483 bp, Cannabis sativa
ttcttcgcttgtgatgtcgatttttggatctagttctttactgttatttttaaatttttctaccatttcatcagcaaccagcttcgtatagttaactatgtcgaattacgttctcgaattctcttgtttctgactgtcctccttcttctgattggtattcgagtgtgtatgattctgttgttgttttgttgttttcaagtattgttgtgagggagaaaggaaagtaagagaaaaatgtcactttgtttaaaataataagtatttttgatttatgacactactagaacatacctctaaaatatacaacttgttaatatttcctatgaacttttccatttacagaaatttagttttatgttagattttgttctattcttttgtttaaatactgacaagtctttgtaaattaacaaatttaaccattaaactttgacaactaacaaatcgttccccatccaaataaaaataagaaagatttaacatttttttagaaaatcttaaaaagtttatttaaattttaaaaaactagaatttttttatttttacacttcaaaatatttttttttttcgcattttgacggaattcttcatagaaactcctattgcaactaacggagtaacctaaatcgcaaccaaaatccgtatagcaacccacgtagaaatcacgggagaaactacttgagaaactcaaaccgtaaattaaaaaaaaaaaaaaaagaaaaccttaaaaaatagtatacaaggtaatttcccgaaaaaaaattatcttgaatggttaagaaaattaaaaaagaaaccacaattgtaaaattaaccaagcaatttaaataattgatcatttttttattaaacaatccatttagatattaaaaattcaatttgtgaaaaacttaaattttatggcaataaatttgagtctttttttcttaaaaaatatagatttatttaagtaaacataatatcttttttagtataatttttgagattgtttaaaaataattttatatttttattaaatttttaactatttttaaagatacgagtttataaatatatataaaataaagtttgaaaatattttttatgaataatttagattttttaagtaaaataaatttttttctttaatttttttattaatttaatacttttatcaaatttttttaataatatttgaagaattaataaaaaaaatataatttttaaaattgactttttttttattaaaagtggtaaattttaatatttgtcaaagtttagagagtaaatatgttaattttttaaccgtaaaagaatcaatgtttaacagaaataccataattatgtaagtgttatatttaaaataaaaattaacaaattgtatattttaggagccacaatcaaatagtgtggaatgcacagaaagcgaagatactaactattattttgctttatgtatttttgtttacggtattttatcccatgttaattttttttattattattattttgcttgagttatcatatatctctacccacactttttaaatgcactctttacctaaattagagaatttctttaaaaaataaactccagccataaaaattgctctctaaaatagagaatcaataaactccctactttttctcaaaatacttttatattattacaataaaagaaaaagtaaggttacttttttttattacttttaaaatatttaaaaactaaaaatcattaaaataataaatgctaattaaaacagatgcatggttgtggtgatattaaaaaaattgggtctctactttaggccgctagatatagaatgtagaaaccaatttatttttccaaatatttttataaaatccccatactttgatcgaagacataaaattaagttgaagcccccaaaaaaagggatgttgcagtaaaactacacacctagcattaattccaaagagaaagaaaaacgataaaaatatagatgtttctttcacttttgtttcgcattaatgggtaaaaagtaaacccactttattactattgtgaagttgagaaaggaagaaaacgacttgagaagcctaaattaaaataaataagcaatagatcctttttcttcagaggtcccccacctaagtggttactgctaattcaatatatgtatagaattggtcactcatggagtttttgaaaactcagatcatgttgttatgtgacacataacatctaaagctggtcagtaaacaaagacttgtgtcccaatcacgggcataaattaattctgcattgtcaatggcaaacgcaatgcaagtagcaaaaaaaatacccaataattcatcattattattatcactgttgttaatgcttgagaatcataaagtcaaatatctggacccatggtgttagaataattgaaccttaaatcaagtttttttttcatgtggtcactggtcgttatatttatataaatatatattctatttatatattgttatatctatgtatctatttatataaacacacaccaagttaaaggaccaccaccaatgtgacaaagtgaatatttgagccataatataattattttgtttttgtcaatctgcccatcaatatagcctttctctttcctctaccttagtctttcacttgacaaagattcttttttattgctattctgttactatttatttatttattttttaattgggggcggggaagtcacacgccttatttaaaaaatggttactcttttatctacacaaggctagacaggttaagaacaaatgttaaaaaaatttacataataaactaaaagtttttttaaaaaaaaaaaaattataaaaatacgtctaaaaaaaaaattactctttaaattttattattaaaaaaatatattttcagtaaaaataatagatcattttttttttattgttttatagtctatttagagttgtactatagttgtcattacattattttttttttttgtcatttttaattgtttaataatttatttatagttgtcgtagaattgatttctctttatttttagttgtatttttactttttactgtattttttgtaattttaaaactttacaaacatatttttataattaaaaataatatttttttgaattccccaaataactgttaactctatatttaggaattagatattaatatgtaacattttatacacataaatgtaaaaccatttttctaattaatttggaagcaaaatcataaaaatatttggggaaaacaaacatatgatttgattacttttgatagtgttgaaataaatctccataaaaattgatgtgtcataataggacttaacaattagttaaagaatcaaacaaacaaccaattacatcagttacaaaccaactaacctaactgtttcaactactagaaaatcaacttaccgttacttacaacaaacagaataacaaaaacaaataaagaactcgtggagctaagagatcttaccagaacctctat

SEQ ID NO: 29851 - DNA, 2799 bp, Cannabis sativa
tgcttctctttatttggaaaagtactactattgagctaaaaaaatatgtatgatagaatggagacttaccttcatttcttacagacctaagagcaagaagagttgcactagcaaaccgggttaattatgtttcccatccacagctagagtagagcctctagagacttaaggatccaccagtgcaaaatgaagtgcatcactgtgaatgttccaatgaatacataaccaaatttgtcgagccaatgaacaatgaaagaacaagacaagaaaagagtcatcatgacactgcaaatgatgcagtttaaaccattgccaaatattgcttgaagctgctgacctatagacaagatatttctcccaactttccacaagaataacttatgtggcgtaatggggaaagaaaatatttttattacattcttttgttagtattagaatgacattccgatggaatgctctttccactattttggtagaatgactattccattttaaaaaagaaggaaaaaatattctaatgtaacaagagaaaaaatttaataatttgtttatcattttttttttatgcattttaaattttattccatttttattcccattttcatttctattcttatattttcattcctcccaaacaaacgccaccttaattctttcatggatggggctttccaaagaaacttctgaaagccatcacaaagtccaactccaatagagaccaaggatcgataggtttgtttcacaaaaaagttgtcatcgacaatgtccttccaaatcaaaaaatgattgttctctacggaaagtcgtttattgaggttatggatccactcaaactcatcacagattaattatgacattcatcacttctccatgtgacattcaacaatagggaggaggacaaaataactcttcccttctcttgaacccttggattgaaagaagcctggtaaagctcctaggaaagccataggtcaatcgaattttgattccccagtaagaaacaactaggatcctaattaactctctgaagctaataatttctcgcaccacaaaaggcgcattggaaggtagtgaaagattctaaaaaatttcatcaatcttgcactatttagcacgaaaaaccttacaccacaaggagtatatagtagagggcaaggaccaactaagcttggataaaagagtagtaatcaggtccaagaaccttttaatacacatgcctaaattattgaagtgaattagtttttgttggctccattttatcaatacgttgtcgtagtgtttagaataaatttaacttgttgagactgagtaccaagtgggcatttggtctagtggtatgattctcgctttgggtgcgagaggtcccgagttcgattctcggaatgcccccttttcttttaaaaatcatttatttattttatattattattttcttttgaagcatttattttcaagtaaaaagcgcatcagccaaaactgaaaacgacataaatatatttccctccaaaaacctacacacgtcagtttatttccctccatttcccaaaaaccctaaccctcaatttcttctctctcatttgaaatcctccattggtgttcttaggtatttgtttaaatctaataagaaattcttcaatcttctaatgtaattgtattatgattcttaattccttatttgattttgatttatttgttttcgcatcttgtcaaagatgtgtgcggtaatgagctctcttgggggcgacaatggcggtaataatcctacaaaaatgaactcacttgttgatgacgactccgatagcgaaacccagagctttgatagccatagtacgaacccagcatttttcggtaacttttacttaattaagtggataaatatatattagattctgattatgctctatagcaaataagaatgctttttttttttttgcattctgatggattaaaaaaaacgatttggaactgtattacagttacaagtgctttagtatgatctttttgcattctgatggattttttttttcctgatatttaatcgtgagtattagatcacatatgagaagtgctttttctattttcccttcaaacacaacgatttttttttttttttgacaaatttgtttgatatggttctacttgtaattgcaaaataggtggagaagttaaagttggtgatagcgttgctgatgagccattacaagatactatgcttcttgataatttttggacgtttgaagatgcattcgatacccaagtagtagatcttgctgatgaaacccaagtcatggattttggcggagagactcaagacgtgaatctatgcggtgaaactcaagacgtgaatctatgcggtgaaactcaagacgtgaatgtgtgcggtgaaactcaagctttggatgatgtcaattacggggagtgtatggatacccaattattagatgtgtttgatgatacggatgtaagaaagagcgatggtgaagaaaccgacggtactgaagttttgggtgatgatgatgatttatctgatgatgtattcgaaagagaaaatggctctagatcagtggataagggaaagggtcaatgttcttctgtaagcaattacagcgagaaagaaccaatagagcaacccaaagcttcatgcaatgaacataacaattcaggttagtttttttttttatacctactggacaatattataatttggagtgatttttcattttcatgatgatttaagcatataccaagaagctgaagtcttgtttttcaaagtgacattacttatattattatttctca

SEQ ID NO: 29852 - DNA, 1518 bp, Cannabis sativa
ctgttggggttaacatcaccacaaatgtcaccaaatttcatgatgatcatgatcataataatcaaagggattcttgctctggtcgatacgtttatgtccataatctaccatccaaattcaatgaagagcttctcaagaattgtaattctctctcagattggttcgatttctgtccatacttaaccaacatgggatttggtccaagagtaacagagaagaaagctaaaaggaaaagagttttatcgaaacaaggatggttcaacacaaaccaattctctttagaagtgatatttcacaacaaaatgaagcattacaagtgcttgacctatgactcatctttggcctcggcaatctttgtcccattctatgctggacttgatctcggacgcttcctttgggactccaacacagcaatgagagattctttatctaaaagcctagtcaattggcttagacaaaggccagagtgggagaacatgtggggaagagaccatttccttgttggtgggagagtttcttgggactttagaagacaaactgatgaaaaatctgactggggttctaagcttatggtcttaccagaatcgaagaacatgactctgttaacaatcgaatcgagcttttctaacaatgatgttgcaataccataccccacttacttccatccttcaaagagcaatcaagtgtttgattggcagaaaagaatgagagccacaacaaggccttatcttttctcttttgttggtgctccaaggccgaatatggatgactcgattcggggtgagatcatcaagcaatgccagtcttcagggaaattatgcaagcttctaagctgttataataaggctccaactagtactaatttgtgtgatgagcctttgaatgtgatgaaagtgtttgaaagttcagttttctgtttgcagccttcaggagactcttacactagaagatcaacttttgattcgattctagcaggctgtattcctgttttcttcaatccaaattcagcttacaagcagtatttgttgcattttcccgggaaccaaacaagatattctgtgatgataccagaaagtgatgtgaagcagagaagagttagcatagctgaaacattgcagagagttccacaaagtcaagtgtttgcaatgagagaggatgttataaagttgataccaagaattatatatgcaaatcccaagtcaagtttagagagatttgaagatgcatttgatattgctgtgaagggtgttcttgaacgagtggagaaagtgaggaagaaattgaaggaaggtaaggattctagtattggtttgtcagagttaggtagttaatttgatttttactcggaagctagacagaagaaaagatacctccattcattgattttcatttggctgtaactattttttcttccttttttgcctgatattaaattgtgtacttttcttgttggagcctgttagtttttcgggataaaagttgctctatctattttgtttttttttttgtctaaatttc

SEQ ID NO: 29853 - DNA, 1484 bp, Cannabis sativa
cagaactgccatgtgttagtgtggctctggagaacaaacaagcgccaagttggcactgtcagcaaatagaaaggagccgtgtggcgctgacggggcaggcaagtcccactggacctgggcttgaaggaggcgggttgggcctgacttggcttgggctcttcttgggctgctcctttattatgcttaattttctttattttcagatttgctacttcttttctttctcattttgcttttagttcttttctcagaaacaacacactctaattcttatatattaactaaatagaatgaaaatcaaatatttttataaaaatattaattaaaactaaacttattatattatttataataaataaaagtatatttttaaccataattaagattttatttgatgaataaatttgaatgaagattaaattttataagaaaatgctcactaattgtaagacaccaccataaagtacctaataaaaatgctcttactgtaatcatatattagcaagatgagttgagtccatccttcaaaaagaaataatagtctttcatttattacattttaaatacctctttaaactaacgacaacgtggctataataatataggataatgcttaggtagagtcatgaaaaatgtatgtacttacatttttttcattatgtgtcattgttttataccaataattacttaattccttttatattaattttttttaataatttcatgacccttaataaagaaagttactatattcaacaaataatacccgtaataatttatctttatcttttatttttatttagaaaatatactataattttgaggatatggggagacgaactctagacatctgactaagtatgggagcatattcctaatgtgctaaatgctttttagtctgattttgttacttaaattgtatctgaatatgttctgctagaccttaccaaaaaaaaaaaaacaaagaatatgcatgctaaaaatattttctaggtccgcccatgctgtctgtcctacatacaaagagatcccttaagttgtatgtttcaatatatgaataataagagattccatattaagctacattatgaaaactacctaatttaattgttgtcatattctcactaacatgtagtacatacattgatattatatatagaatatatatgtaaatcaaacaattggtagatacaattttacctcttcaaccatattcacaagaaacttatgtgaaaatattaaatttttatttgttttatcatctaatttgtatactatttttttttttttaaaaaaaattaaattaaatcgcatatgtctttttgagcatgaagataaaatatctgattcccaagcaattaaagataacatgaaaggagtctgtgcaagagcttctatattttttcctggttgtactttcgatatggagtctgttccattcgacttgctaccatctttggtagcgaattttgatggttaataaa

SEQ ID NO: 29854 - DNA, 2586 bp, Cannabis sativa
tttggtaacgattttgtagctcgctctttttctggcaaatttctagcgatattgtgtatcattttgataaacggttggcatgggtatgatctactcaagaggatgtcgtcttggtatatattacctttatttttggtgacatttctggtacaccaatttctaccgccactgatagttaatgtgcatcgtttaggtgaagttttggaacaccaaactttaaatatatttatgttatatgtcgttagactcagttttaaatgtagaatataatgatgataattatttagctatttgacatggtattattataggtgggagtgctatctaagactggactaaaaaattggagtttgaaacttgagagcttaggatcatctttctaggaaaagtttaacgaattgggagaggtagggactcaacttgattattgaacgtgattttatatgtgctgaataatattagagatattctaatttttatgatttgttaattatttaaaaaaattaaaaacttaatctgtatatttttcaagactgttttggaacattgagtgccacacatatttttgtataaatatttatgtagtttatgatttttgagtttattcaaatacaatcgttatgctgccaaattttctagaaaataaaagagaatatgttattttgttattcttattatttgcctacttttagttataccgatgagagcctgttaatcatgatttgtgcatattgttgtttcgcatgatttgaaacttgctgctattgtgtttgttttgaaaattcggcggcattatctgtatggagaaaaatgagagatttatattgacacaaagagtctcaagtacgtctttataactcagaaagatttgaatatgagacaaaggaggtggttagtaggggtgtacgtcggtcataatatatttttacttagtttagtcgggttataatatatttttaccaacccaatataaatatcaggttgcaaatatttaattgtaacccacccaattaaaaattagaaaaagtttaatccgtctaatgattttgtcggtttggtcgggttaacccgtccaaaccgttcttcacttttcttttataattattattcttagtttctaattcaaaaaatttgatttaaaaaaaaaataaaaataaattatttatatttcaagttaaaaaaatgatatagtctaaataaataactttaatttaacataaatataattgagtaaacatgaaataattgaataaaataataaaaaaaagtaataatattatataaattttaaacttcaacttctttatccaaatgcaataaaaattgttaactataaagtctagattttaagttaaaatattaaaatgtccaaaaactttaaatacaaaatagtttgactaataaatataatttgtgtaatatattttatacacttttattaaaaaatttataaatcggtttgattgcggttaattgggcggtttagaataatttgtaaaccacccaatatattcattgggcagtttagatttttattgtattatttcgggttgtattttttgtcgatttattcggtttggtttgggcggtttattcgggttgggtggtttgtaaattttttgaacacccctagtggttagaactagtcaaggataatgactgttagatttgtatcatcttggaaaagccaatgtggtggctggcactttgagcaagaaaggtctcaagcatgtttttagtaccatagtgatctcaactcatttggctttggatatcgttaaaactagtattgaatttgtagttgggaaacttcataacccaacgcttcaatccgatttattagaaagaatcatatgggtacatttagaagattctgagttagtcaaagtttgagtggatgtattagctggtcaggctaattaaggaattctcaatctcaaacaatggaatgttactgtataagaattgagtttgtgtcatgaacagttgtgagctcaagaaagagatattgaataaggctcatactacaccttattcattggacccgagtaccaccaaaatataccaaaatttgaaaccctattatttgtggtgtagaatgaagtaagatgtaacggaatacgtgttctagtgtttaacatgttagcaaattaagacaaaacattagaagccggcaaggttactgcaacctttatcacttctcgagtggaagtgggaggatgtgacaatagactttgtggttgatttacctagaaccacatgaatgtaagatttgctatgggtcatagtggattgtttcacaaagttagcacactttctgtcggtaaagacaatttacatagtggaccaatatgcaaagttgtatgaaaaagagatattttgtcttcatagaactctaaaatccattatttcagatagagatccgaagtttacttcaaagtttttggtaagtgtacaaaggtctatgggtacaaagctgaaattcaatacaaatttttaccctcaaaatgatggacggtttaagaggatgatacagatactagaagatttgttacgagcctgtgtcatggactttaaggattcatg

SEQ ID NO: 29855 - DNA, 2331 bp, Cannabis sativa
gagagagagagagagagagcgaaatagattttttatttattataaaataagaaaagaaagtgtgggagagagaggcttattactttctatttatataaatattattattataatatatacctttttaaaaaatatatattttgttttttaaacagtaaaataaataagtatatattaaaaaaaaaaaagtttgaacagttataagatttataaccctatatattaataattttaatgttgattaaactcttgactaaaatttatatttatttcgttttctaacttgtaagttaaaaaaaattaaaataaaaaatcaaaatcaaaattaatttgtgaatttcttttgtagttataaatgagttttatgtaaattaagaagaataaatgaaatatatttttttgaaaaaaaaactattggtacagttaataaatattttttgtttactattttactacaattcctattatcttttatatgtaatatattactgagatttaggttttattcttttaataagaaaggaaaatgttttttagagataaaagaataataaagtataaatatagagagagagattaatgagaattttttatgaaaagttattaaagtaaaaaaaaaaattaacaaaaaagttgtgtaaagtaaaaaatattatttattaaaaaagtaaaataattattattaaaatattgatattgaggagatatgttaacttatattaattaagtgtcctatatatatattgtaggagcacaatgtatatttatgaacacaattttatcctgtgatgtacttttataaaatgtattccgtgatgtacgacagccgttaaatagaaaagttatttaatctgagagctgaggtcgatctaggaataattagaattaaaaaatggtaacatatcctgaaacttatctaatgtactacgaactacattatatgaaagtacattacgggacaaaatctgtccctatatactatataggaattttctatatatgattgaaggtcttgtgccactcattcgttgaataaaaagtattatcttttctcattactgtacgatgaagaatctttgaaagtgggcaaccctaaggacgaagaccacaaaaattataatatattatgaagactcatctttattaatggtttaacatcattcaattactcatatcaacactgcattaatttgtgaatgagaatactcaacaatatatgcactactgtaataataaagaagaaaaatactacacactataaatgtaagtgtcgcctaacagtataatgtaatattttagataaatttaagtggcatttggtttggttggaagtaatgaaatgaaatggaggaaataatttttattttatttttttatttagttacatactaagatattgaaatgtctaaaatggaatgacatttctatcattaatagtaaaaatgactattctatttcaaaatgaaagaaaaaatcatttcaatgcacgatgagaaaaaatttaataatttttttatcagtttttttattcactttaaatttattaattcttattcctatctcattttaatttttattcttatgtttctattcctctaaatcacatgctaccttaatgtttttgtgtaagtttacctttattattagatatatgttgggcctatcttttttaaagggattaatatttcacaaatagataaaattaataaaaaaaagttacaaaaatacgattgtacaaaattttaaatatttttgtaattttatttacaatatagttttttgatatatttttatgttgtactcttgtaatttgttgttgattttttgttatttatatgttattttttgtttttgtttggaagttattttcttattatttttatgtaaatttttgttatttcttgttatttttataagacaccgtaaaaacattaaaaaaaattattaaaaatgtaattttttttacaaaagataatgttttatgtaattattcatttttaatggaagtttacaataatatacatttttttacatttaatttacaataataacattactactattatcaacatatcacgttagctaaatcggacgttttgacatttttttacgttttttgatgtattctgatttttattttattttattttcttatatttttaaaagtaattttttggttactattagtattgataaaaaaaaaagcaattagttacgtttataaaaaaatactttatttttatatcatataatttgagatacattttggttactctctaaaaagttatttgtatacatcttagtaactaataattagttatttttaagtta

SEQ ID NO: 29856 - DNA, 4379 bp, Cannabis sativa
tgctctacttatgttccttttttttcctttttctcctcctattatatacttataaatacttttctcaaagccgacttttctccagccaagcctgccattttccgatcactcgccggataatttcttccttctttctcgccattctcgctctcctctaaggtcgaagctgttcactgtttttcttcttctctttcttctctgtaatctaatccttttgaagttttctttgcgaaaagccacacagatctgctttctgttgatacagatttattttttctttctgataaaagtctgatttagtctgctccggtttcattttcatactggctgatcttgatctaccattattgtattataatatcctttataaaattctcaaggttaatttcgtaattccgtccagaaagtttagccgttcgattatttttattattattattttcagattctgattttccgggtttctgaacttttcctacagatttactaaaaccattcagtaaattatttaatgattttaaaccctttttctttttaattttttactacactgtttttgttttcatcttagttgttgttgttttttctttcctatttatttatttattttttattttatccattttaagttgaaaagttgacttttgaaattactccaaagtctccggtgtttagagaagttaatagctttttttttttttttttttttatcttcttctttaatttctgtcaaaataaaaattaccctaattattttaattttgtacaagaaggaaagtggtagttgttgtgtttatttaattcttttataatgagaagtttggtgcttttaaacgctcagatttcggtagcgagagattattgggagagacatggatggagccaacagagaaacggggctaagaaacgtgggctctcattgctccatctctgatatggatgactacgatctctctcggcttctcgacaagcccaggatcaacattgaaaggaagaggtctttcgacgagaggtcactcagcgagctctctgttggtctcggcaaaatgggattggacaacttggatagctcctcacctggttaccgctctggttttgacactccggcttcctctgctcgtaactccttcgagccacatccaatggtggctgaggcatgggatgccctccgccgttctctggtccactttcgtgaccaaccggttggtaccattgctgcgtatgatcatgcttcggaggaagttttgaactatgatcaggtcttctctctgaacgatttcttttaccttacctttacaaatattgtttagtttgatggtactttaagatccaatatagctatataatttctgatgtgtatataaaattggttgaatttgttgtttgaacattaaagacgcccactgtgactgtactaatctgtaataaaacgaattgtaaagatactaatggataatagtttgggcaagaatgttaagatattgaataagggaaagttggttttttgttttaaaaaaaaaaatttgctattccttttacagtcaattaaggatagtaacatggtcatacattatgatatttacatctacaatataatgaaaaaggaagttagcaaaagcctccgtccttacaagttttgttggttattatcaggttttcgtacgtgattttgtaccaagtgctctggcttttctaatgaatggtgaaccagaaatagtgaagaactttcttttgaagacgctgcagcttcaagggtgggagaaaagaattgacaggttcaagcttgggaaaggagctatgcctgctagctttaaagttcttcacgatcctgtccggaaaacagataccattgttgcagattttggtgagagcgcaattggtagagttgctcctgttgactctggtttctggtggattattctgcttcgtgcgtatacgaagtcaacaggggatttgactctggcggaaacacctgagtgtcagaagggaatgaagcttatattaaccctttgtctgtcagagggttttgatactttcccaactttgctctgtgctgatgggtgctctatgattgatagaagaatggtaagacttctcttgcttttccttgttcacctgcttttcaataaatctgaatcatacttgttatggtatttgagttcagggcataaatgatattttagcagctacttaatttatattatgtagcttaaagtagcattttttttttcttattttcgaaatggagcttaaagtagcttgagtagctccaaactttaccttttttattttgttcagtgccgactatggaatgacatttatttgaattcataatggaatgccatttttacccatcgtctttggagggattgtttttatttaaaatgttggtatgatgatttcgcagttataataatgtatttaagttggagtttatttgcatagatttagctgaatgaaatttgagtacagaagtttccattttgtacactgatatttggattaagcattaagcattaagcctgtctttgaaggagatcaattaataactttaattaagaaatttcctattagcttctctattcacttttgtttttctacaattttaggctataactatattttttttggatgtatcaccaatatatttctttgttccgtaatcccttgcattcttggttatttataaatgagatttctagaaaagcaggtgatgtttttttcgtgaaatttttagaagccttttaatggagtgcaggtctcctttatttaattctttttttttaatatatattttccgttaaatttatttaacgcaaggacaaatttacggtaaatgattttacagatcttgtatataatgaatgaaatggaaaggttctttcaacttaaactgattgaagttaagcaaaagaatttaacctgattgattaacttaagagtttctcattctaattttcaattctgatgtattttaagagtgtttattttgatgatgtgggattgtaaagtaacatttgcttttccaaacactagtcttttcttttcggcaataactccattttagtttgcatttttcatattgtcttaaatccaaacgcacaagggctaaagttctttgtaatgggtagtctttatctctctggtcaaggaaacacctttatttattattgagatccttatcttttaagttgtatgaagaaacacatcttattcaaacttgtgataaatgagttgttttcttttgtatcagggcatttatggttatcctattgaaattcaagctctcttctttatggcattgagatgtgctttgcaattgcttaaacatgacgcagaaggaaaagaatgtatagagcgaattgttaaacgtttgcatgctcttagctatcacatgagaagttacttctggcttgattttcaacaactaaatgacatatatcgttacaagacagaggagtactcacacacagcagtaaataagtttaatgtgatccctgactcaatcccagaatgggtgtttgactttatgccgactcgtggaggctacttcattggtaatgtcagtccagcaaggatggattttcgttggttctgtttaggtaactgtgttgccattctatcttctcttgctactccagagcaatccatggctatcatggatcttattgaagctcgctgggaagagttggttggtgaaatgcctttgaaaatagcttatcctgcaattgaaagtcacgagtggcgaattgtaaccggttgtgatccaaagaataccagatggagctaccacaatggtggatcctggccaggttttactttttactttctacaattttccatttcttctaattacaattttataagataaagcttgtagttgtcactgtgaagacatgtcattttatctcaatattgtggatccctagatagatcataagttggctttagctttttcttttctttagtagtgtagaaatcagaaatgtgcataccctatgaaaagacaaaactcattacattttttagctgaaagctgcgtaatttgttaatgtttggacgaaaaaggttacgaactttgtgttgaaaagtaatagtccaactagtgccctctataaccggtgagggcagcgtaatctggtcacaaagtccaattcctattccatcctactgctcttagagggtttgaagattagtccgttcctgtttatagtgagagatacattttaggttcagttatcttgatagtaattgtgaattatgatgtacacaatatttccctcacgataatggctcggataggatcacttgcccgcaagggatatggctctgatatcatattgagaatcatgggagtccatctcaaaaccaattggcaa

SEQ ID NO: 29857 - DNA, 2048 bp, Cannabis sativa
  modified_base (1366)..(1374): a, c, t, g, unknown or other
ggtagacggcgggcgacagcggccggtggtggctggtcttggttttttttttttgaatataataactaattttattgctgagagtcaaacaatacattgggtcggtccttatttttttagtttttgttttgttttgttttagtttttattttatttatttatttatttataattttattttataacttgaaattattttcttaattataaattgtagtttgaaattattttttatcatttttaaataataatattaggtgtactaatatgaatgtgatatctgttataaatgtacacataagcagtctttgttggcacttaattgtggtaaatgtatggcactttaaatttgctaacggttcattagttggagcgttttaccactaaaatttgagcttagatagttaagtacaagtaaaatgatagtttggaaaaattaactacgaaaactctatttttttagtaaaataattaaaaaaattagagtcaaacaacattaaattttttataaaaaaaaaatcttttttcaaaaaaaaaaaaacctctaattctgaaggtacacattagagcacattatctagcgatgtggcaataacagctaccaaatgattatactttcgtgcacagttgcacataataatttggtacctagaaaaataattaagagagttatttcttgggaattatattatagccaaatgcagaaaattacaaaagaggggttgataatagtcagcatcagtcattaataagtgaaatttttaagtgaaatttttgagtgtaccacatgaacacacatggtcccgagtttatttatataccttggataatatgcatgcagacttggaatcccaattgttgttgcccaatggtaaatttggcattatcatttatgacactcccatttttagtgatgacgttggtcttttagtttccacagctatatacaatttggactattttcaatgtttggaatttcccaatttgggaataataaaactctctcaatataaatatatttatccttttcaaataaaattgaccacctctaattcaaataagttcagccatttaaattaaaaagcaaaatcagagcaaaaaaaacaaaaaaaaaaaaaaaattgaaaaacaaaatagttcaaattgcaaatacacattagtccaagcaaaatagtccaaattgcaaatacacattagtcagagcaaaaaaaaaaaaaatgactaaaatctaaaataatcttaaattaaaaaactaaattaataaatgtctactttttttaaaaaaaaaataaaaaaatagttaaatataataaattagctaatacaaattataaaaatatatttactacatattattttttaaaannnnnnnnnaataattaaattaagttatataatatttttagtattgtaaattattatgttgtaacaaaaacgaataaatatattagatcaatacatatatataataatatctaacatattatatcactgaaaattaataccgtagtaaataattaatactacaaaataaattataacaatattatattaatactcaaaaatatatacatcatgctaataaaattctatatgccatattaaaatatgtatacatactaaaaaattatgtataaaaaaatagaaactaaatattatcttaaataaatcatatactatatacaacaaatactatatatcatacaacaaaatatatatacttacaataaaaataaaacaaaatattattatttaaaaaaaaatcatatataccatattaacaaaattatatcccactattatacctggcaaaataaaaaataaatatcaactagggataataataatcatatataatacaacaaaacagaaatataatgtacaataaaatctatataccaccaaccaacaataaagtataaaaattaaaaaaaaaatcgacataactttcaaataattttttttttaacaaaaccaatatagatacaccataatctttaagtaatttgcttgtaattctaaaaaaaaatatgaaaaaaaattattga

SEQ ID NO: 29858 - DNA, 1264 bp, Cannabis sativa
gaaatatctccagccgtttgatccaattttaaatctaatcaatggttccccatttttatataaaagagttttatttaccattatcttcttcaccttattcgaaatacaaaatcagagagtaaaaacctattttttttaagaagtccttgcatgcctagtttttccttgactattttccttcgtgtgatcgacaatattttttcccaacctcgttctcgttatattccagacccttggtattggaaattcccagttagaaacctttaacgcgcttccaaaaaaacctagaaattagtaaatatctaaatttttccctaaattatcttatcatatatttattttattattagtttttgagacattattttcgcttagaatagataaggtgattattgttttagtgattctcttccctaaattattttatcaaaaaaattttgaactcctaggatattttctaatctatgaaaagaatgtttattcatggttcaaaactttgggatttagagtttttagaacaggaaaacccaaaattttctaccttaccttacaaatcgcgactagaacattcaaaaacaatactagaaataaacaacgaaagaattagattgttcaacgagaagcttgaccgagaagaaacttttgctcaatttaaacattttataaaccagattgttgatgggaaacatcacttttgtacacgcgacttggccagagtctcctattttaactaagtatccctttacaaggcctttatttttacctaaaattattgttgctttttctccaggtaaactaagatttgacatcatgtctctgaaagagcgtaagtccaaaataccctagaatcccacagctcaattcgagacctaattgattgaatccaaagttaggttatttgccccgtatgtgagtctatttttaagtcttgtgtcatcaaaaatgagaaatgatgtcgtatttgttctgtcacaccaggcaaattcagttgtgttcccccatctcgcatgttggatggtaaaagttgcagcactagcatcgactcttcaaggattggagcttggagaattgagcatattaaggcaggggtcgtccttccccttaggcaatacttcaaggacttctgtaattatattggggtcgtaccttttcaacttttcccaaatacttataggatcctggcgtgcttgaactcgctttttcatatcttagggtggaaatgtccaaccccatttgagattatgtgtttttatgctcttaaggc

SEQ ID NO: 29859 - DNA, 1092 bp, Cannabis sativa
cggccctgctccgcagggctcgccgcttcagcattgaaaacaagagaaggtaaatcaatagaagaagaaataccaacctcaaccatagaacctgtatccaagaccccatcccccttagttgaaccaaaagaatcaccacccgccactgcctgttagtcgactgcacccgcaccatttttcccccgatgcaccccacgagccttattcttaatggagagtcatcgccgttgattaacaccactcccgaagagccatgtgccttatccaccttcccatgagcaaagccacctcccgtgtcaacaacatcaacctcttgcaccacctcctttccttttaaagatgaacgcaatcccccaaagccatctgattcccgaaactgtaaggaactctcatatcaaccacacttcctcattttttgatcaaacactccatcgagagtctcacaataggcctcacctatattcgaaccccctttcctggttttttgattgatatccaccgaagaagaagaccctgggcaggattcacttaagtgaatattattagaatgcccaccatcaaccaattgtggcccaactccttttgaatcccctactccctccccttcaatagttttgcccaacttacattctctccaattggacccaagctttactaccattagaaggaatgaacctccccacaaagatgctacgtaacaatggaaacccgattctatctcgcacatgattatttagaaaaacctactaagtactactccatttaatatccgccacttcgcccgccatagtactgaatcttttaacattgttaagagtaaatacctttaacgggaaccctcggatcctaacccaagagaacactttgtccaatttggcatcctgccaattaccggaccttggccattcttcaaggatcaaaaaccctccattaaaaacccaatgttgtttgtccaatacccactgagcatcctgttttgattgaaaagaaattccaaccaaattagcgtctgtaaagccttcaagcaccttcactttccagtttgagacattcttccaaattctgttaaacatactttggaagagatttcca

SEQ ID NO: 29860 - DNA, 1702 bp, Cannabis sativa
cttgtcgacctgtttttgttgtgctaatagcagctggagggctggttttgtttgtgtcaggttcacaaggtggtgtaatatttggttcacaatctggtgcaatgtctgatgcacaatctggtgtaatatctggtgcacaatgtggtgcacaaactggtgcaatatctgatgcacagtcgggttgggaatttggtgcactatgtgatgcacgatcagatgcacaaggtggtgcatgatctgatgcataaactggtgcaagaggctgctgggcaggtgctgaattagttgctggtttttttgatataggtgcagaaacaaccgattgggtgaagtctgcagtggaaattatttctggggtgggtgcaacatgttgctttatatgagatgatgatatattggaagtggctggtgttgttgctggtgcaacaggctgttgataagggagaaccaaaggagaaagacaattgttaatctcatctaaggaagtggtagagagatagggaaaaatattctcatggaatataacgtccctagaagtgtatatttgttgagattcaatgtcaaataagagataggctttcattccgtgtggatagccaataaagacagaggcacgacttcttggagaaaacttgtgccttttagagggtaaagtggaaccatatgctaaacacccaaaggatcggagatgatcataagtagggggtttgttatagataagttcaaaagaggtattggtcttgagtagaatagagggtgttcgatttatgaggtaagttgctgtagcaattaggtgagggcaataaaccagagggagatgggattgaaatcctaacgcacgagcaacattgagaatgtgttggtattttctctccacaaccgagttttgttgtggtctctcaacacaggagtgataatgtgtaactcctttggatgcataaaaggaagaaagattcaactccttagcattatctgatcttacagccttgatggcatgagaaaattgtgtattaaccatctgaaaaaaatcaggaatgactttttgaacttcagatttggtttttaacatatatgtccatgtatatcgagatttatcgtcaacaatagtcaagaagtaacgatacccttcagtacttattattgggaaaggtccccatatatccatatggattaaatcaaaaatatgagatgcaaagttgttatgagaaacaaaaggtaatcgtttttgctttgcaacattgtatatatgacagtgagtatgaggatggtgaacaatagaagaaccaatctttttattgaaaatgtttgaacatacaaagatgggtgaccaaggcgattatgccattgatctacaattgatttatttaaaactaaaccagaaaaaccagcagctgttataggaggttcttggtgtaggagatacaactttccttgacgtttagctgtcccaatcaccacactccgagaaagatcctgtataacacaatctttggtgttaaaaaaaatatagtaagggaattaatcaaccaaagcagtgatggagaggagattgaatcaaaaatctggtatgtagagtacattgtgaagggtgagattatgattaatgcacactgtaccaactttggagacaaaaattttgtgaccattaggtagtataacatatttaggaaaagttaaatctttgaaggaagtaaaacaagaa

SEQ ID NO: 29861 - DNA, 1229 bp, Cannabis sativa
gaagagattgaaggaaaaattaattaaaatatattgaaatatttctaaattttatttaaacttgtagctacatatagctaaaaaaaaatagagaagaaatgtcttagagcacttccaacaacttctctattctattttttaaaatgcatcactaaaattttactttatctattttacctcaaccttttacattatatcatacattaatttctctattttttctatatatcatttaaatattatatttttaatatattttattcattttatattaataattcatataattacacacatatatagaaaagttaaagaaaataatattaaaatatgtttagctcaatgaaagttatctctacatttagctaagcactatttattgagctaaaaaatatgtaaaatagctaaggtttacctcacttgttggatgctcaattttgtaattttttctctataagttaaagattgagctattttagctcatctattgagaatgctcaagaagctttttgctcatgtcatcgagataatttttttttgcacctttctttaaaattttgaagttttaactattttaccaacattattgtgaacttgtgagtactcttataatgtaaaatttgcgtcatcaatagattattgtttatttatatttatgtcattttaattattttattattatactttaggaaaattgcggcaaaaattcttaaaaagtttgttttgatgaagataaattttcaacctcgaaaaataacggtaatagtccacaagctcgtaatttttgtaggtctgttggtcctaattttaacaaattcgttagttgctcaaaaaatatcatgcattgatattaaattgcggaataaattctcaaaatttactttgattcagataagtacctaatattgaaaaaattgtggtaatagcctcaagctcaagatttttgttagtccacaggtatccaatttaactgctctattcgtaattcttaatattgccacatgtcaaaattttattggccaccatcataaaaaaatgattaaaaagtttaataacttttttatattttcttttattaaagattaaaaaatattatatttaaataaaattacaaacttctataatttgccacccacccttcttggtggtagaggcttactgccgaccaatagcatcccttacaatataccctaaaacatttttttaaaaataacctaatctaattaaaa

SEQ ID NO: 29862 - DNA, 2183 bp, Cannabis sativa
tttgaaaaaaaaaataaaaaaatagtatatggggtaatttctcaattttctaaccttttgcacgaagcgatgaagtcataattataagcaaaatgactaatgtgtttggcagcctttaactgattaggattcttttggtcttcaaagtccactgatgtggtaaatataatataatattagctattggatcgggtaggtgatgcttaattcattaataaatgtcattcctacatggaaacattgttgatagtgacatgtgaatgtgcgtcgtcagtttagaaaggaaaatgtcaaagtagttggcgttggctaaaaaggtaatttcatttttgttgtgagcctttttgtggtctgacacaagagacgaactgcttaatctctcaagattgtgttagaattatgccatgtgggttgacttatgttaccttaaatgttcccaaatgcctttcgtgttatgttcctggatgcctcctggggcatccttatttgacctacacatgtttgctcttcgaatgtctattggtcgatctgaattcgggtctctagatccaccgttgagggttaacctcgatggaaccagacatcaagtccgacttctcccattcttgatggataggtcgtgcatttgctccacatggacttagggaatgggtctcgtttctgtattgggtctctgtcgggacccacttactagctatttagaaacatgaataacactttaatacttgtgcattatttttaaaaaaattgataataaaaaatataaatataaatatgtgtaacattaatattgaatgttcaaatactaatatataaggatgctagttttttttcatagagatatttctatttttgacacgtgtagaagttttaattcattttttgtgtcactttttgaataaaatcttcagattttaataaactgaaaaatcagtcaaagcaatggcaactaacttaggagacagaaactcctcctggatagtgcgacctgtggagaaacaagaagctcgcgccatataatgagcagctttgtttgcagatcgtttaacaaaatacaaagacacaaaagacaaacgattaagcaaagtcttacaatcaaaaacaataaattcaaattgagaaggagtgagaagagaactcaaaatggcttgaacacggactaaactatctatcttaagaacaacatcatcctaagagaaactatcgatctaactaagagcctccttgatgccaataatttttgccatctcaggttgaacccgatcttcaaaagacttgttgaatgcagccaacactttcccatcatgatcacgggctgtacaaccaacaccataacgtccaaactgctcaaaaattgcaccattgacattgacctttgataactcttaagtaaagagttatttgatatcactttaaacatgttttttttatatgtaattgtgtgtcattgtagttattttgtcttttaatttgtgaaagttccagtggtttatgtttttgtgtgtaatttgaagctgttagtagaaaccaataacttgtgtataaattggcaaagaaaatagcaagttagtcaagttcttaattttgctgaaattctgtgaagtttttgttgcagcaaacaagtcagtagctgatttgttaattttcttgagaaaaagatgagctgacacttcattaaatgtggtggcatttgtggagatgacatggcattctaggagtggtggttggagcaattacttcgagaggctagatgcatgacatgtgtagggtttatgttgggcaaatggtacaaaatctaggaggttctcaaaaagaggtagcctccattttcagaaatagggcagcacgtaaagggaatatatattctgtcatagacttttttttttttacagaggaagaaagaggcaaagaagaagaaataggaagagaaagaggagaaggacaacaagattcaacatctacccttttggaaaacttctcctctattgttgtttgtcatttctttcttttctcttctctaactctagcattcaaactccatggctgaattttatattgtaatggtgattattaagttagctatgagccaaactttttatggtttgaattgttgaagaaccctatgttttagtttagtaattttcttatgcaaatatttagtaaaaattctcatgttcattcaa

SEQ ID NO: 29863 - DNA, 2714 bp, Cannabis sativa
atattttaaaacttctaccatttattattttgttcataggggagagaagatccattttttttacacgagaagatccaaacttagaatcttttctttgtgagaagaagtgtaagtggaactaataattaagttatttctatgtctacttctatcatttacttattaaattgtgccatatataaatttattttactaacatctcaaaataatttttaatttaattacatttatgctctctaataagaaatttttgtttttaagattttattacattttataatattgtaaatgatttaataatttatttttgttgattttactcttggagtgatcatatcatatatcatggaatagactttatttattttatttattgatgaatatttccgttttatttagaaaaaagtacaaacaattattataaagtaatacatttatgttttatcctatgttttttaattatcataaataaaaataataaatgttaggtcaaccgtgcacgtgctatttttcttaatatatatatttgaaaaatcagtctcaaatatagcaaactaaaagaatacaatataaatctatcagccaaaaaaaaaaaaaaaacaatataaatcaatgcaaatattgtaaattaaatgtggcaagtgaaaattataattaagatgtaaaaaatagtgccaaatataaatattgtaaaaacaaaataaaaaattgcaaatatgccccacatctttgtgtagggagtgaccctttctgttatgtaacagacttttttggtaatatacactttcatatacatatgttagccggacaaacaagattatttgttataccgtaaccggagtattaatttcctaattagagccacataaaaccgaaaaccttaaaaggattaattttgtggtttaaaaaaaaaaaaaaaaaagaaaatcttaattttgtcaaactatctatattaaacaccggcgacacaaaagtactcgtaaacttatagaagaaaaataaacacaagtatcacctaaaatgaaaatttaaaagcaaccttttcactctcattatatacaaacaaataaatgaatttataacctttaaaataaataaataaatgaattcataaaatggaaattgtactacactcactagtaaaaatcgctttcatatattttttcctcttaacaaaaagtcatgaatagattattgccacgttaattgttgaccaataatcattttcgcttaaagtattaaagagttaacaaaagctcatgatgaaaagtggtaaaaacatctgcacaaccaaccaaacattggttgaatttttgtgacatggatccaacaccatttatctattttttttttttcgagggcaactatttttatgacatggatccaaccatttaccaaaattactatagcccatatttacaacttgcataacaactaattaaaaaacatttttttgatggtaacttaatcaaaaaaattcatacaaaacaaactattattattattattatggaatcaattttgtcccttttatcgtcaaagtggtagttgcatggttaaacagcaagctatagtcatcatcaaatgaaaaatgagattcatattttcgcaataaataaataatattatttttgttatatttgggagattgaggtggtaccaaaagaaaaggggccatagagttagttaaagttgtgacaaagaagcaaacaagaaaagatttaaacaataattaagaaccttacttcaaatatagaacacctagaaaaagcatgcttttaattccaaataacagaaataataataatagtaatttttttcttttaagtaaaaataaataaaataagaaatcttgaaacgaaagaagaagcagattggcatttttctttatcatcgccaccagcacctcaccacatacttccataccacgccaaacattccttggcaagcaccaccaccaacccacctctctctctctctctctaactgctttactctatttacatatatacccctctcttcattccctacccttcaagctactcctcactcactcactaacacacatacacacacgcacgctctcctgctctttgagatttctcgtttctaaacaagaagtggagcgcgtcggtacacgcgttccgttatgcccgtaactgtttgatatcgaattttcatggttcccttggagggaaaccgacttagctattccggagtataatcggatgcttgtctaacatttctgtatcttttatgtactccaattaatataacccacgtcatcactttagacaaattgtggctttgattcgtactgttgtatgcgatcccacgatccttcaccgtgcttgattattacccacctccgctcaatttgcgaagtgtaacagatttaatagctgtctgtagctcctcctcactttcgcactctttctttcccgcactctctttctctctctctctctctccaactccttcgtctctggtttcaagagcaaagtaaggtttcagagctatttctcggttctccagagttgcgtaagttttcttcttgcagctgttcttaattatcaatcgataaacaatgtaatttgcttctgctaatataatttatcgatagatatcgtagttgttgatcttattattcctctaaaactttcgttgaaaatgttggagaaaacacaaggcgttcgattgatttaggttttttt

SEQ ID NO: 29864 - DNA, 1638 bp, Cannabis sativa
tacttatgaaaatatcataatattttactttcgtagttaatacaactttaactttttttaaaaaaatggtacaactactctaagcattaatatcaattcactaacaacacaaataaatgaattaattatcctcgcacaattaatatccaaacgaaaaattaaatactattttaaactggatattacattcttcttcttcttcttcttcttcttttgcttagttatttaattatgaacatgattattgtggttattatgtttgtaattatgaactaaacactctttccagagtgttgatgaaactattttagattatgaattaaagtttttagattattcccatatttgttcttattatctatttatgcaattttgtgttaattatcatcttgttaatgttttatcaccattaattagtatagaggttttatattttacacttgagagaggtaatctaaattggacttagaattgcatgacataagaaaaatgtgagattgagagattccactaattttataagcttcatttaaaaagaatcatattgattgagtaatattgaatagagatcatgttagttgattaagttaattctatcaccactcgagagaggttaatagattatattaggattcttgaaattacaaattatagaataaattgagataattggtaaactgagattcatggtttgaaataagaaaattaatgctgtaggtatttactttccgattaaaattgttgtttttctatttacttttcaattattttattattttattcttaatcattatttactttgaatttctaattgaagcttaaaaccaaaaactatagtaattagtgacatttaataatcaatcattgtgggttcgacaacttttttagaattaaaattttgctataacaacattgtacgtttgcagtaaaaattgtgtatcaattcttcctatggatgcaactgtggacatgttgactaaggaagatggggccgaagaatttggtttaggcataacacctttgttaatgaaaagaatctagttttaagtttgttctagagtggagcttggaataccttaatcgttaccagtgtgctaatcgtaaaccatctgcaatccttcttttcgagacgtcatctggggttcaacccgttggtttttatggtccatatcagagttagaaaagtggaagcggattcgataaaataattttattaaatatgaaccataagcccaaggatctcaacataatatatatagattaaatctagactaatgaatagagagataatacctcttgtagcctatcgggtgatccttgctatcttttagtattattatcgaatattcaattcaaaaaatttactgaagagttcacaccacaatcttccaagtgagcctcaacactcgagaataaagtgggctattaggttctataggatgagtataattatacaattacaatatattctcaactcatgagataatgtgatgagatagggttgatcacaaagctcacaccacacttgaatgtgtgtagcgtgtgagattgaggagagagagagaggcgtgcgagttagagaaagagagtgagagtgaaagtgaaaaattcaatcctattttctctctctctctctct

SEQ ID NO: 29865 - DNA, 1314 bp, Cannabis sativa
ttttttttttttttttgtagagacacgtacttgtgttcaacaagacttcatcgtcaatctgattcaatcaaccaccaccttaataaataaataaataaggccaaaaaccacctcttaactatagctctcttcttaatcagtgaaaaaaaggggttttattttggtttgtgtaaaaggacaatggtgaaggaaatgagagttgattcgaatgtgttgaagcacaaacatttggttgtgaagttggcagtgtcttttctcttggtgggttttgcttttcgtctcttgtatcctgattctttcagattttccaccgacttagtagagaccagctctaccgacttggaagagaccaccacaaacacagacccctctttgcctttggcttcctccccaactcaaacgcctcttccttttgatttttttgaagatcaagcccaactatctcacaatggtaagcaaaagggcattctttttttctttttttaattgcatgtacttatttgtacatatatattttaatgtttgatgtttatggtctatatgagttaaacaaaaattaggcaccaagtcttgggttggaaattgctgattttgggagttttttttttattgttgtgaaaatggtcagttccagaaaaagaatatataaaaaataatttgattccagctcttctgtcaaaacaaaatcttgctatgaaaatctctgtagttttgtcacgagggaacacgaatagagttcaatggttccatttgggccatctcaatcaaaatttaaatttgagtatctaatgcagagacagaagattcagagtccaaaacagagaaatgtgagatattcagagggtattggatggcagacacatcagggccaaggtacaccaatgagagttgtcaagttatagaatctcatcaaaactgcatgaaaaatgggcgccctgattctggctacttgtactggagatggcacccaaaggactgtgaaattcccagactcagtcctcagagatttcttaatctaatgagaaataaatcgtgggctttcattggtgactctatttctcgtaatcatgttcaatctttactctgcattctctctcaggtacaattattcctgaaattcatacagaccaaattttgctttattgggttttttttaactttaaattttgctctttttccttgcttctatttttgtctttgaattgaatcagatgactcttgaaacttgttaaattgatttttttatgctttagttttcaaagttggttaattatatcatgttacctttgcctaatcagtatataaactaataat

SEQ ID NO: 29866 - DNA, 1988 bp, Cannabis sativa
cataagatcaacaacctagccagccaccatctccacaggctggctggccatagtctccttcaaatggccagacaattctccaacgtggctggccacctggtctgtaccctagctagcccaatctgccaaaagtctgctctcatacttttggtctactatgactagaagtcaacaacatcttgctagcagaatcccatgacaaaagggaaaaagatgagaccaagccaactcaatggggcatgtccacccataaagagttaccaggctcttcaacaaatagatcgaggaaagaaattcttcgtaagagacttattccctaaagaatattccttgacaacaaagatcatgcagcaagcatgcttggacccaactgataaggtttgcaccgagttacaagataacaataaagatgcatacaagcctggtgagtacaatgagaacttggagttggctcttctaccaaaacacgataagtgctctcactagccaacttgtatagtagttcttctaacatctcaccatgtaggaatccataaaagagctgatacccatcgctcttcagcgatggcctcccatcactctttagtgatggtctttgcacggtaagcccatcaaaggtagccaaatataaagggaaatttgattttccatgcatattttaaggtgaaattggttaggaaaactaaagttacatgtaattgttagaataggcacactttccctaaaatccaaaataacccctctcaaaaacccaccaactcgtctctctccctcccttgattctctctggctctcttcgcccgaaacagcatcccaacccaaaacccctaccacaaccaccgtcccaacccaaaatcacggctagaccaccatttaaactcgatctcaccatgaggaccaccgtgactatccaaaccccaaccacaaccacgcacagagatgtctaaggtaagttttgaatccctcctttaaaaatttatgcatttgtttgttttatcttttaactgttcattgatttagggtacattattattttgtaatgcctgatctgtggtatgtgtgagtttgattagatttagggtttgttttgggtcgtgtctgtgttaccacaagaaaaacttgggttttagcttaggcctgatgcatgtttgatataggcccgatataggtccaatgtaagtggatatgagataataatagaggttgaagataaaggtctgatagaggctgatataggttcgacataggtccgatactaaaccataaagtcttaggttggatagaggatgatgtaaggtccaataatgactcagattgattatatgttttatgtttttttataaaatgtgtctctgttcgacgtaggatggtagtgggtctgatgatgggcccgattgtgtgtcccacatttgtacttttgtattgtatttctctatgtatgattgtgggtctaatatgggacgattcttgtccgatagtacaatagcattttttataaacatgtaggtccgatagaggacgatagtgggactaatagtgggaccgataatgattgtgttttcaatttattttgatgtttgtgtgtctgatactggtccgatataggcatgatatttgtgagatatttcgctgcagaatttctaacttgtattttcctgtgtcatttctctaggattcaagaccaccacgccttataattctagtctcaaagtattaaactggtcgtgtcacttggcatggcaaaagttattactatctgaggattaaggcaaaatttgacaaatttcaattatgggataaggtgaaggaatcccctttaaaacaattcttcgagagaaaattgctaaactttttgagagcattgatccatcagttattcatgtacaagatcaaatctgagaagccagatgaggtacacttttattttgcaaagaagagatgcagattcagccaggtcgagtttacgttggtgatggggttgaacttgt

SEQ ID NO: 29867 - DNA, 1421 bp, Cannabis sativa
gtcaaagtgtgttggactagtatcggaagagttattaagggtggcaaccttatcttgagtgatttttattttttttgggaggtccctgaatttagtccgatgccatgaggagagatgagtagagattgcagccatgttctgaataacttgagtagcaggatttatagcagcatctgaccaatatttggcaataatttcagagcaaaaatcctcttgaagccatattctttcgaaccgaaaacgagattttggcttctgtagagccaaatgttgcagaggagaaattttggccagtaaagctctatggtcagactgataaaagtctaagtgtgtcacagaaaaatcattgaagacttcataccagtaagaattaacaaagcagtagtccaatctctctttgacatttatgccattgacattgttattatgccaagtgaaacgttctccctcaaattgaatttcatgaagatcacagtagtcaatgacatctctgaaatcatcaatctgtttttcgtttttcagagggccaccaagtttgtcagtgtgcgagatgatttcattgaaatctcctagcaccagccatggtacaagaggagcagtgtctttaagtttttccaacagttcccaagtgaagagtctttgggaaacaacaggagctccgtaaaaaccggagaagtggcaagtaggaccatcatcaagagccaaataacagtcaataaaatttattccatagtttaaaatagttacattaatatgcgacttccaaagaaaaagcaaacccccactaagacccactttaggaacttctataccattaggaaaattaaaagcattacgaaacttagtaattgaacctacactaagtttagactccataataaaaattacatcaggtttattttgattaatgagcaaacaaagctgacggaatgacttcaggttgctcaaaccccgagcattccaaccaatgatattcatgatgagtggcgaggctgctcatcagccttcgccaaagaaacaccgctgccatcagctaccagtgagttgtgtgaaatctcagagataggctcaggttgttggtgagaaatacaattagtggagtcactgaaaggagcgcctctagtgcgacagcgttttaaaacatttcgaacattgcctcctgtggtaaccagttgtcttttagcaaagagagaagacattctattctctttgaaagcatccgaatctgagttgaaagtagatggaagaaagttcacttcagcaggagaaatagtcggtattgtagcagtggtaggtgtagcaattaatttatcctggctgatagagcaatgagggatagtagcatgaaggtatgcagggggaacgactattggcagagcaattgatccactcggagtagtagatgaagattggatcatgtg

SEQ ID NO: 29868 - DNA, 1669 bp, Cannabis sativa
aacttcctctcacatttgagaaataggtatttctaaacaaccgaaggctaaagttgcccatatatatatattttcatcataagagatattagtagaaggttatgtgttcattttatattattaaaataattcaaaataaaaatctaatattatagtagtaattttttcatatagtatcactttctcaacttattatcattggaaaaccaccctaatcctaccaaccataaaattttctatagaatatgatttttcttttctagtaattgtgagaaaagtagtaaagcaaaaccaagtatatcttactttctatctacccaatctttcccatcaccatcaatccaatatatatttatacatattataccatcgacccatgacatgatcatacatacatatacatcatatgtcacgtgataccgccaccatgttgaccaataaaataaaataaaatagaaaagtgagtgatgggagaggacaagtgggctacgcaaagcacgatgagtggaccaagagaagaagagatggcttccgattcccgccaaagaggtgcctacgtggacccacaccaactcattttcccgccaaaatacccacttttttggcccacctccaactacgctctgacacgtgtctccacctatggacaagtggcgtcttgctgttgatgataaggctaactctcactctctttcctatttcgtttgtttacaattaggaaattgtctgcctatgggcaaccacttttctccctttattaatttcttttttttttgttttttttgttttagtttaattttattttataaaatgataaataaaatattattctgagttttatttttaatataattagatatttttaactacttgggaaagaaagtgcatgagtcttggagaatttaggatagaatctcaaattgtgcaatgcattgtatatttaaacgcttcaatcaaaaagaaaaaattgaagataatttttagtacgaataaatataaaaaatgtatttagttttatcgtaacaactctaaatttaattattattaacttttatttttacaaaaaataagtttatggcaatattttgtactattgtaatggttgaatcttcttattaataaagttaccatttttctttaaaaaaaatgatatttaccattttttaaaagataattctaaattaagttataaacaaataaatatagtgagactttatttaaggatgacaaacttagaaccgacccttaattaaacatgtcaaaaactaaaactcaaatctaaccagtttataaacggattgatatgatctgacctgcttatatagtagattctctatctaaaaaatacacttaggactaagttaattatattaaaattaaaaggttataactaaatagaattatactaaaaaaaatcaaaacataaaaaaatattaacgtaaaaaaaaaataacaataaataatccttaatactacattataatagaattatttttaagtaaatataatatttatacatgtatcacaatttagaataaatttattaaatatatgcatatattttattacatatattttattgagatgtaattattcttatatagatgtatattttgttaacaagggacttagaaaatgtataactaattacaatttagatgttattctt

SEQ ID NO: 29869 - DNA, 4285 bp, Cannabis sativa
taaattattaaattcaaagactgttttctttttcttttattttattataaaaatacatgttatttctttgttaattccactatttaatatttatcacaaatttattatcttttcgtgtagtataaaaataataattttattatttcaatagtattactttagttataatgtacacataaaaatattatattttaaattatatcattacataagtaaaaaaaaaaattataaaatgtttacaaaagttgaacaatagaacaatcgcgcggcttagttctctagttgcttcataatggaatagaaatggccgaaaaccgtggataataccataatgaatgataaggcgctaaagatggccaatttcaatattaaagatctcatagagcacactaaactacaagggaaccacaaagtacaattaagaacagcttctgatctaaaactggatggaattgaccagtaatttcgtttattagctaataatttctgtttatttgattttataaaaacacacgtgcctctttatgtccatatctcggcaaaaactactgttcaaatgacatctaagttgatatactcttgcagtcaaacacttgcattgtacccacaccatgttgcacgtgaacacttttaccaaaggaaacaatgatcttgcatttccagtcacctcctcacggtgatctgaaagcttcaccagcgtaacgtacactcccaatttcctcttcaattcgcagtagctgtaatagatgaaaccccaaaagtgaattaaagcaacggtcagataaatgcagaaaattttgatagaaagaacaataaaagaatcatgcatataaaaaagctagtagaaaatctatagcattctacaatattaaaaccaaaacaattgagtagcgttattgaagttttgaagaaatcacaaagtgcatatgccattttgagcagttctccaaatgaaacaaagacaaagttgggacattggaactgatttgcaaacttcgaatctatcccggccaactagatagctgagcatacttaaccaccaccattgggatgtcacatttaatgttagcatgtttattttcccaagcataacatcaatgcaatgtactactaccgtgggttagctttgaacaggaagagtatgggcgatgagtattagaccccaagatagcagaatatggtagagattaaataaaaagcgtatatgagtcattgtcttgaggggtggttttgtgagtgagaattagttagtatatataggagagtaaggaagaagttatgcatgaattgagatttctctctacatcaaggtctgaaaagatcaatgtcttttctgtactaagctttccattactgctcttattttccagtcaatgaaactactctattattgattgatttgttactgttccattgccctgtgattacatatgcataggtgactatccggtgcaaatcaaccagcgaggagataaataatgatttacagcttaatttgtagaatacaaatttacaggtaatcaatgcagtcaaattagttagtatatcatgctctataggcatcaatcatgggatgggaatgagatttaattgtttagcatgccaaacatgaacaccatgtgctacaatcacgagtaagttgtaagggagatagagtcttgacgagagatgaaaacaaataatgatcaagtatttaagtgtacctgattgtacttcgccaatcgctcactacggcatggggctccagtcttgatctacacaacagaatatgcaattatcattatacagaacatttactaaaaagtcagtaaggtatcaaaaacaaaatagtcaactacaaacctgtccactggccagaccaacagaaagatcagcaataaagttatcctcagtttctccactgcgatggctaaccataacaccccaaccagcagctttcgagtcaagtgctgcttgaatagattcagtaactgagccaatctgattaacctgcaattcaatgaaggaaaggaagtgagtaaaattggtagcaatattcacagcgtccaatattcatccttatatttgcaaagtaaaaataaataaaagataagtttcacgagaagacttgagctgaaagtggagatcttcaaaaagaaaattcctattaacgaaagtaagtgcaacacagttccaaatgctcgtgcatttttctaaaaaaaaaatggtcttaacattgtaaaacacaacatcattacaagaaagaatgaactaaaataacgtagttatagatgcttgcctttaaaagcagaccattgcaagccttcttctgtattgcctcagaaattttctttgggttagtgaccagcaaatcgtctcccacaatctgaatatcaacagaagactgcagtgaagtccatgaactccaatcatcttggtcaaaagggtcttcaatggacacaatagggaaatctttaacaaactccttgtagagatctcctaggctctgagcagaaagtacatgagctccatcatttggttgtttcttaaagttaagatcatacttgccatctttcgtgagaaactctgaagctgcaacgtccattcctattttgatctgtagcattgtttgttttgagtgcacatacagataaaagtataaactaataaccatatagagcaatgaattaaaccaatgagtcctaccttgccagtgtaaccagctttttcaattgcgtcaatcagtaaaacaagtccctccctattatcctggacatttggtgcaaaacccccctcatctcccacgttgcaagcatcttgtccatatttcgctttgataatgcccttcaaaatatgatacactgtttcaacaagaaaaaaaaagcagagtacgttacaacatgttaaacagaacagataacaatgtttgattaacaaaaattaacttaaccaaccttcactgcccattcgaagtgcctcagaaaatgagcttgcacctacaggcaatatcatgaactcctgcatcgccagattgttccccgcatggctaccaccattgataacattaaaagctggaaccggcataacaagctccttcgttcctgaaatttcctgaatgtgcctgtacaagggtattccctttgctcccgcacccgctctacacacgctcagagacactcccaatattgcattagccccaagtttcgacttgttcggagtcccatcaatatccagcataatcgcatccacatcagcttgatttcttaaatgccagaaatggagaaacaatcataattacagaataaaaaacattcacttatcaacaaacttcaagaacttaataattatcatcaaggtcaacaaatatataaatgaaagacgatggataacgtaaagggcacagatcattgatagatttgtgaaagaaaaaaaatatcattataatattttgatgagttttaagttacatcgtttcttactgcctacaacactgaaaaaacaaatgagtattggaaatataaacgaaaacgaacctgacatcaacgccaataagcttgggagcgataatctcgttgatattctgaacagctttaagcacacctttacctccataaacgcttttatccccatctctgagctccagagcctcatagatcccagtagaggcgccactaggcacagccgatcggtagagattatcagtgatcagatcaacttcaacggtcggattccctctactatcaatgatctgacgggccttgacagacttcacagcgtgctccttagtaaccttggcagtcgccgacggcgcagcggtgacggagcatcgtacggaatgggaaggacggggagattggaaagaagggatggaagtgaccaaatggggtttggagaaaagtttggtagaaaggaatggtttttggagaagaatgttgttagtggagggatgagaagccatagccatgcttctctaagttggtaatatgatggttttgttgatttgaaagagaaataaaaggaaatggtgtttgatattaaaagggagggaaagtgtgggaaagtccgccaaggaggcgatgaaagcaagcagtgcagtgtgtatattagaagagagattaggtggcgttattagggtgggttggtgaggctttcagagagagccgtcttttgaacctttggacattttgaacctttggacaagcgaagactgggaaaggtggctgcgttaggtgagtgagtctgttagtgcatgtttttttattatctatttattattttttcctttttatgtttttgtttcttttgt

SEQ ID NO: 29870 - DNA, 1985 bp, Cannabis sativa
atattacatttttttgttcacgtaatttatttttaattagataaaaagatgtttatgaacaatgaattgcacatgcttaaatatttttatgtataattatgatcattcataataacacatggcacacacatatatatataactatgtataaaatattataacgtgtacgcacctgtctaacgaaaccttcgagcgtagagagcttgttcatggcgatagccatctggcccatgtagttggccatgttaggagggcagcttaaggagtcagaagttattgtgtccgaaagtgactggttcagagactcaagcccttgagagagagcttcttcagtctcttgtgtcgactgttgtaatccacatatgcccaatatttgttgctctgttaatggctctatttgactcagaataatctgaaaaatatacattttcactaacataagggaaaaaccacactatcaatttaatagatatatataaatatctttttaaaagtttgaaataatatttaaagtatgaaaataacgttcttttcagaatattaaacgactttactcaattcagtttggttatggttacatatatatgtatgattgtatgtaataataattttttcttatttgttaacaataaattaaataagaaaaatataaacaaatgaacatgaaaatatagtgaaaaggacagagagagaataatagtgccgtgtaactactttgctttctctctctctttttcaaaacccaaaaattgcaataacagataatagctttatcggaaaaatacctaactacaccttattttggaaaccttagcgatatagtacttttgtcatttcacttaataacattcacacaaacacaacgatatctcccttagccatagccatagccatatagcaatagttatagccatacagacatacatacccacctccatgcattaataaacttcttagtaaattaatctctatctctatatatgtaaagaacccactactatttccccatacctgttgatcctactttttatagcaaaatacttacatttaaaacgtgccccctgcgcccattcttattaataatctcattttgatgtgaccattcttattgactaattatctataacatatataaaataaaccgaagattaattaacaagaacgtgtatgatgtaataccttgatgagctcagaaggccgaaatccaccaatccacatgaaacatcgttcggctggagttttccacataccggaaacaagatgaaatacgtctgatttggcgaccatgcccttgagattcatcattaggtcgtaatgtgccaagcaattctccacatatattcttagctcattttcaggcaaatgctcttgcaccgctgccctaagctcgcacatcagacggtgctgctcctcttgccatctcccatattccatgtcgaaaaccaccgcttctaattaataatcatcacttaattaataagtccacaattataattttaaataaaacatttattaataaatgagagattaatcaattattaccttgactagtgttgttaataccaattggaaggccttgctcacctccaactagagttccaccattgaaaaacattccctattatgtaaaatcaataaataaaacacccaattaattctttgaatgaatatttcataattatataaaattatagatttcattaattgtgtgtgtgtgacaatgtgagtgtgtacctgtgctctagctctttgtagttcttgttcaagctgagtgagttttatcctactggactctaactgttgcacatatgcctggagatgaaaacgacaaaagcaataattaataagtaccaaaataatgaagaaacgacattatattttccaattttatggaataattatcataattataataatatcaatatataggtatcaaagccaaactaacctttttccgaagtctgcttttcctagctgcctcccta

SEQ ID NO: 29871 - DNA, 2058 bp, Cannabis sativa
ttggatgatgcccacccctaattgcagcaatgacaaagtatgtgtgggcaattgcaaataaggaagacaacttgtggatccgatgggttcactgtgtatacatcaaagatgagaattggtgggattaccaagacccacctcaagcaagctggtgttggaggaaattgattgctgtcaaaaatcaagtcaaatctactatggatatacaaaagtttgatgcggctaagtatagaatatccaatggctacaaggcttttttccccacacaacccaaagtgtattggagtcatgaggtatggaatagacttaatatacctagacatagctttttcttatggatagctatacaagatatacttagaacaagagaaatattgcataagtataatatcattaatgaagatttctgtttgctttgcaagaaccaaactgaaacttcaaaacatcttttcttctttgccccttctctcttcttcgtctttcttatgtgaaatcatggctgggatggaatgttgaagctacaacacttgacaggttgttaagatggctagaaagagcaaaaaccagcaaattctgtaaagttgactttactgttgcattagtgtatcatttgtggaaaaattacaatgaaatcttgtggaatttagggcaacaaacacaggagcaagtaactcatgcgattaaggctgatgtgaagaatagagtgacctgcacttggccaaggaaagtgcacccgattgatgtagaatggttttcaaggctgtggctttgttatttgtaactacagagagtttatttgtattatttatacaaacatatttgtatagatagattatccaggtcttcaattgaagattctaaataggttttaaattgatattttggagtaatgaagttcattgattgacaaaaaaaaatattataaatataaatatatatatgtatatatatatatataaattagatcaataatataaatatgaatgtatatatacataaaaaatcatatcggtaaacaaaattcgatcaaatatataaatatatatgcatacaagaactcaaaatataatcaaaacagagatataaaattcaccttgataccaactgttagatatttatatgtatgaaaagaagcatatatgattattgtatgaagtgtggaattaatgaaacatatatgtactatataactataggatcgaaatacctccagctatttaatctttgagcttcaatctcacacaaactttgatctgcaaagaaaactaattattgtaggtaatcgggcttccaagctctatctactctctttatatagatttattgtgtttcacagaatgagtagtgagctcggggaccgagactctatatttatataggtgagaccttccatcaaagtctctgccacaattaattatcaaaatattttgacaattaattctagaaattaaattggataactgaaatatttggtaattaaatctgatcgtaattagaatatgttaattaattagtaaataattaattatattttataaatcaaatcaaatcaaatatttaatttgttaccttataaaaattattctaatagtacacatacttaattattatatattattattgtgttctataatatatacaaattgatcttaagtttttttattaatttttcttacatagacattaattaaactttagttgcaagacagtcactaggagcacgccataaaaattaatgaacttttaaagaaatttgcaaaccccgagcaattttctatagaaacacctcattattacttaaaaaagaccatcatttttatgtaaaaacttataagcttccttaactgaaaaaggccaatgaatatcaaaggatcaataccaatcatatcttcagcaacaaaagagctaagataaatgttgaagatgagttcttaatctctctcagtaaataaatatgtaataattttggaatcccaagttcttgagtctaccaccttaagatcagaaattaaacaattatcaataccaattaaagaaatggtaacaaaaggaaaagag

SEQ ID NO: 29872 - DNA, 3234 bp, Cannabis sativa
ttataaatagaagcccaaatagagcgatagacttaaaaacaccttatgaaatgtggtacaaaagagcccccaaccttacacatttaagaatatttgggtgtacaacacatgtacaccaatctattaacaactaaaacctagaaccgtgaagggaacttttctatgttatgccttaggtaccaaggggtataaaatatatatatttctaagaagggtaagccaaaggttatcattgctagaaatattattttcaatgagttggaatatcctcacttgacctctgggaaaggtagtgtgtctccgtgtaatgaaggaaaaataaaaaataagaacactaattgtatggaagtggattacagaatgaagctactggaagaaggttcacatacgaaagctagtgtggaactgaaaggtagtgcgtagatgaaagttgatgctgagctggaagataacaaagaaaaagtagaggttttaaaaggatttggacatacaggtttagaaggttataagttggcgcgtgatagaacttagagagagatttaccctccggcaaggttcgtggaagtaaactcaataccatttgcagtggcggtagtacaacaaactggaattaaagtactcgaaagctacaaagaggcaatttcaagtggaaccaagtcaaaatgactttaggccatggatgaggagatggattcactctggaagaacaagacttgggttgttgtatcaaagcagagaacaagaaaattgtggagtgcaaatatattctcaaggtgaaagagggaatcaacgagaatgaaccagtaaggttcaaagccaggttagtggctaagggatttagtcaggtggaaggaattgactacactaaaatcttctcacttgtggtaaagtacaaataataagattgatactatctttagaagctcaaatggagttcaaagttgaatagcttgatgttaagactgcctctcttaatggattcttggatgaagagatctacatgaagcaaccatctgggcttcaagtggaagggaaaggagttgaattagtgtgcaagcctaaccagtccctatatggtttaaaatagtccccaaggcaatagaataaacactttgatacttttatgcaacaaattgggttcaaacgatcaacatatgatcactgcttgtatttcaagaaatcttcacccatgttcttattgctctatgtggatgatattctcatcatgagcaaggataaatatgtgatcaaaactatcaaagccaaacttaaaagagaatttgagataaaagagcttggaccaattcaaaagatacttggtatggaggtttcaaggaataataaggaggggacaatcagcttgaagcagcccaggtgtattaagaaagttattcagaagttcaacatggaagatccaaagagtacacccgttctgttaggggggcagttcattttgttgaaggaacaatgtcctaacagttcaaatgagaaagaggaaatgaaggatgtatcctatgctattgtcataggatgtttgatgtatgtgatggtaaacactagatcagatattgctcacgctttaagcatcctaagtcagttcatgtctagtccgggtattgaacattagaaggctctcatatggttattaaggtacttgaagggcatttaggattatggtctgaccaagaaagcaaaaggagaattggagctaaaagggttcgtggatgctgactatgcctcgtacagagatactgaaaaatcaaccacttcctacattttcttgacaacctgaaactgtataagctggaaggcccaattacagtctgtggttgctttttccaccacgaaaacagaattcatggcaactacaaaagcattcaaggaagccttatggcttcgtggaattctttatgaattgaaacaaatcaaaagaggagtgactgtgtattcgaatagccagtcatccatccatctttataagaaccgaatttatcatgaaaaaagcaaacatatagatataacactcttttggaaaagagagaagatagaaaaaaggttggttaatttagagaaggtcagaataaaagataatcatgttgatgctgggattaaagtctcaacagtaaacaagttcaagcattgcttgatcaatctcagaagttagtatgctgagattcgtagaacaccaagcatgatggctgcattctttctttatcctcgtcacacttttaatttgaagtaactatgtagaatttgtgatatagttccttcaaataaaaaggtctccaagagtttcttggaaagtagttgactcgtgaatgcaggtccttaaaggctttcttgtacttatgggaaggatctttaggaaagctaatcctcctccggaaaggagttttggatggctagctattcctcctggaaggtactctcaaatagtcgattctagctagctatttcttatccgggaaggtccttcagcgagtgccttggactgtgactccaaaagccctcatactcactcccagatgcactcttacttaggttgacgtggagacctcgctcaaaggagagttggttaagttagttattgcctaataaacttaaaaacctagcttcttgtagccactgactttaggattttaatcctaagcctataaataccaccaacacttatcattttcatagaacaatcagattgagttgagagttagagagagaaaagattaagaggtagagagagaggtacagagaaatgagaaagattgagtttgggttttgtaagaagaatcttctattaattaagaagatattcttaggtaagagtgtgaaagtagaaacacttttagagaactcattagagaatcaatctcagatgtattgtacctattcttgctcaattaataaaaaagatttggtggtgttccaaaactagagtagagtcataaatcacatcaacctatcggacttgaactagtatatatctttgtgttgattttattattttactgtttcgattggcatgtggtttttccatactctgttcatccctattttctccaattattattcatgatttataatttttttttattatttgattgtctaaaatttaattgatttgttcatgcaccattagttataattttcttacaaaaatatataatattttgattatatttttctcatatataatcagaatattatataatattttaaatgagttacattaaaatt

SEQ ID NO: 29873 - DNA, 1545 bp, Cannabis sativa
aataaaaataaaaagtcacccataaatttctcataaaccaagaattttagttatatagacacactttatatagaatagattttaagaaactagaatttttcctattttattttaacaaattatcttcttatatatacaaagcaaattcagattaggagaaatatatacaaaatgacattaaggcatatcgaaaagtggtactataataataaatttgggtataatagcatctttcaaaataaaataattatatagggtagtggtttcgttcaagaaatgcaaaatgatataaacttccattgttgtgtgaactgtgatatgtgatattttgaaatatgtgtttaaaaattgaaaccttcaaaggcataagaatttaataacataatatcatatatgtaggatttaaatgtatattgaaatgcagaagttaacgattggagaagtaagaatagataagtatatggtataaggtgtataggtattatcaaaattaattgataataagagaaaagtagttcatatatattttatgtatggtatttagttttcacacattattaacgtggaattctctaattttttagatttaattttacttgttcaatctaattattttgacttttgagaaggaggtcattatatttataatcatttggagcatattgtctacatccaatgtgaaataaaaagtgattattgctactaaatattaatggtattaagtattatttgggatgacacttaataaataattattaatattttataataattattaaattaaaatatatgagagtaaatttaattaaaattgttagtgtgaaagaatctcttaaaataatcaaatcaatatgtgattcttttcaaatgcaatatctctttctgttttgattattttactgtggggatttaatggttagttaattaatcaatgtttttattatttttgtgaaataatacgaacaaagctgccaatttttggcaaattctgtcaaatattagagcaaattcttattgaaaaaaatatataatttaccaaattggcaacatgttatagtaattaaggaagcattaattgatttgactaataaaatgagtaaccaattaattatgtacctcactcctaaagccaagaggaatatcatacctaactatagaaacaatacattacaattaaattttaaattttaatatacacctctccaccacatagttgccaccaactcacttttctttttctttttttttttttagaaaaaaaaaactgattttgttttataataactcttttcccttttgtgaggagtgataagaagaatgagatattttagattgtggaaatgggtgtgtcgagtatggacggaggagagtggtgatggaatgggccccaagtgggtgagtgagcggcttagaaaggaaacttgcgtaactccagcgaagcacataccaaagtccaaaactaaatcctcgaaaatgagaatttcaaagcacgaaaattcatgtctctaaataaataaattgtttgttgagagagagacacgtcat

SEQ ID NO: 29874 - DNA, 1559 bp, Cannabis sativa
gaagcgcttgtctagtatcacttagtcgaccactaagtctgccacacggcctgcctttcacacaccaagcatactttattgtttcctcacaggaacgctccctttcccaagcttcaaagaatctaaaaggcttgattcccctatggttccccacatttgagtccatgaggatgtaaccatggtttgagacggaaattggagtgttcgtcaccatagccgcatggaaagcaatgatccagtccccgaaaccacaactctatcaagactctctcttgtgagcccaccagagaagtgattgttctgccaagtgaatttgcatcctcggtagccaagatcaacccccccgtattttgaaagaaattttgcagaattgcggtatcattggccaaaactctcctaccaccacttttctcccaaggttgggctattaaatttaaatcacctatcaccatccaaggtaaaacacacctattgatcttagcctccatcatatcccaaaaacctcttttctcattgtcatagggccttccataaacaacaaacatacaccacttcgcacgagacattgactccttaatcaaaacttcaaacaccccccagtagtcgtcctttgggtttatttaattgggtgaggtattgattggtcacttgagctactactagtgcggaaaatgtcggttcactacaagaaatgtcacttttactagcacagttcgctactgtgctggtaaaagtttactagcgcatttcacaaactgcgctgaaaaagcgatcaaagttctaataccaacattgatttgccaacccccttttgccaacacatcacaagcatctattttaccagggcaacacctacttttgccagcacaaaaatgtgctgataaaagtgacatttcttgtagtggtttggacaataaaagagatgtaattgagtagaaaagacagtaggagaaacatatcaaaagaagatgttatgccaaatttaaaataataaatttggaatgaattactcatagaaaattctcgctgaatcgtgaacaatgtcctttcttttttgagacattttgcgactctagcaaccaaggcgtctccatgataaaatagcatctgtatacaatatgttctgcactgaacaatatcgttcgattacaccctaaattattgctctgagaaaacttgtaagtaagaagaaaattctttattgtgttgaaaggatgtatccttccgtcgttctgatacgacctatatagagaaatcgacgatctaagatattaaacggtaatataatcgtgaaggagttagatcatggcagtgaaaagtggataattgactgatcgtttttactacttcattaacattaaaaataaatataaaaatttatttaattaaataatttttcttttaaaattaaatgacagctcacccgcccgctagcccagctcgcctcgcttggacgggaagggttgttacggttagaattagaattcgagttgcggttctgattcttaaaatttttgccattaggcttcaaaactgttggtgtggacttcttagtgttg

SEQ ID NO: 29875 - DNA, 3360 bp, Cannabis sativa
ctcgagaccaatcgatatactctccaaagggagaatgttttcgcgagaccatgttattatgaaaataagattccttgccatgaacaatttgacattgttccccctaaatataccaagcagcaacaaaaaacaaactgaaatgaaacctcttaagcctttataacaatcagctggaattgaatgtctagtgacaaatttaagggtgtttgcgatgctggtggcacagtttttaaccatttttcgaactaacccgcacatatagtttttctaatttcccaaaccgcacccgcaccgtgaaactaaaaaccgcagaaactgcactacatcgcaaaaattggtgcgatgcggtgcgatttttgcaattcctgtagtttagactattattaaataattaaactatcacaaatacaacaaaatttgagcaacacttatcaaaaataccataagacttaaaaataaatatgaaaaaaaaaaaattaagtttcaacaatataataataagttggctttaagttgaacattcacatattggatctaaataaatataaaaattgatatttttataatgtgcagtgcggtgcagtttgaactgcatattaacaattcaaaaccgcaaaccacaccgcgtcgcgcagttaaggaaaaattcaaaccgcaaccgcaaccgcatcgcaaagaaattcaaaccgcattttttttgcggtttgagcgatttgatgaagacctcaacaatacaacataatagatgattaattatgaattgcataacattacaaagaataaaatccgttaaaaccattttattcttcaaaacacgattctctcaatctcaagttacctagaaaactagagtcgatgacaacccaacatttcagaaaatttattagcaaatatagcagtcaatttaatatatgattcattttctttaggccacaactttaggaatactggccattgctgtatcaatcctttcctttgagaaagacaagtcaaccatatttccttgcaagaacttgtcataagctggaagatcaaagtgaccatgtccacacattgctgttagaatcacctttgcttctccagtttctctgcacttcagggcttctctgatggtagcagctatggcatgtgttggctctggtgctggtatcaatccttctgttctagcaaattgtatagcacctaaaacacacacacacacacacaacattcatatctgcaccattttctatgcctaatatcacaacacactcattaagctcaaagttaccttggaaacactctagctggggaatcgaaatagcttccatcattcccagttcataaacatgtgatatcaacggtgccattccatggtaacgcagccctcctaaacaaattagtgtaatcagataaggagaggatattgcattaacaaacacttaccgagttctatatcaaaaccaattggcaatgagtacaaattatttacctgcgtggatgggatcagggacaaagtcatggcctaaagtgtgcattttcatgagaggagtcagtccagcagtgtcaccataatcataagcataaacacctttagtcaaagaaggacatgctgatggctcaacagctctaatcacagggttcattttcccattgagcttttctctgatgaaagggaaactaagtccagcaaaattggaacccccaccagtgcatcctattagaatatctggtgtttcaccaatagcttccatttgttttagacattcttcaccaatgactgtctggtggagcaaaacatggttgagtacacttccaaggcagtacttggtatcgccattcatagccgcaacctccacagcttcagagatagcaattcctagacttccggggctagaaggatccatctgaagaatattcctaccagcttcagtaaggttagatggagaaggatgtacttttgcaccccaagtttgcatcatcattctcctatatggcttttgatcataagatgcacgaacttgccatacctatttataccacacatatcaacaataagtacctcatcttaatctcataataacaaggaaagataaaccaacagtaaatcttaattcacctcacagccaattccaaataagctggaagcaaaggccaatgaactcccccattgaccagcaccagtttctgtcacaacatttttgaccccttcttttgcattataatatgcttgtggaacagcactatttggtttgtgtgaccctgctgggctaacaccttcatacttgtaataaattctagctggggtatccaaaagtttctccaacctcttggctctgtagtcaattcaaaagtgtaagattattctcatcaagctaagtaaagaatcaaaaagaaatgtatacactaaagtaaaaccttatgagaggagttggcctccaaagcttatagacatcaataacttcatctgggatatctatgtatctttcactagttgtctcctgcttaattaactcatcaggaaagagaggggacaagtcttcaggctttactggttcatgagtccttggattcagtggtggaggtggttttatagggagatctgctattagattataccattgtctgggaatttcgactgattttgaattgttattgagaactgctcttgttctagtgacactagagaatctcagatgaactgggtttcttctctttaggggaaaagatccaatccatttctcctcaactaaaagcacataaaaaaatagtttaagagttacactaacaaagtagtatcaagtagaatggatcagaagaaatagcttaaatgaaaaagagtgtatttaatatccaatgtattatatacatgtcgtgcagctcaatcaaatcccagatcaaatgatttgggcaaagaagaaaaagaaaaaaggtaccttttttagactgtaaggtagatgaagatgtagtgaaaagtgagcctgcagaagaaaaacaatggctggccataccttagttggggctttgtagttttggcactaaaaaaatattagagaaatatagtgaaaagattttaaatggatttagtcaagtgcttggagatggagaagacaaaatagtaaaataatgatctaatgagggtagtcactaaaagccatgtggaagaattaagtgaccatctgtctctctcttgcctttcatgttttgaattttaatctcagccttaaaaatactgtaacggttgaatccaacggtgacagcatatagacaacaagattgatatttggaaattggtaccacaacttgacctgtttttagtcgtatagtatgtagtctccctatccctttcattgttacaaatacgtaagggatttagaccat

SEQ ID NO: 29876 - DNA, 2004 bp, Cannabis sativa
ttccatcagttctctggttgaactaccttatcgcatcgttggcctctctattgcggtgatgtaactctacttggtgagatcaaaggatgtacttttggtcatccatccaccttagaaattcatgtttctactgagcgaatacatcgcaatcagcagtgcgtggctctttagttaggctggcttgaccaacgacttctctaagtctggctagctcaagatcttctcctaagtccacatggggcttgccaactactagtcctgtctctgtagcatagtatcggagatgagatctaattgttgttcctggggggctgtcgcccatgagtccttccttcagtgggaggtgccaatggagggtcctcccttggaggcaagggcttgctattcagatccactgggatgtttgtgtcagtttggctagctgtagtggccagacttgtggtgactgtttgttgtgacaggattgaccacatctgtagtgttcatagggattccagttgtggctagagcatggacatcaatatctgccgttttttggtctggagggagacccaaagatgcagtgcaattggagttcttcttgtgttaaccaatgcatttgatcaaatacaatatccactcgctctcaatgaaaataccaaactgttgacctagaaaagtgatcagccaacaatgagattgcatgaatttaacattttccatgtgttacataattagaattaaaaagtaaagaacacatagaattttatagaggttcgaaccccttagttagccgataatgacctacttcccttttagttgtattgatatcgagggataagactattcagatcactataggtgggatctaatatagctttcttacgatacaaagtatgaatcaagatggaaaatctcatgtgttgcgaatgctatatgggcgtgtgagagagtgaggaagagagagagagagagatatcagacttggagatttagacttagaatgaggctctagcccttaatgacttggaggctagaattagacttaggttttttaggttagagttaaggccctttatataagagagcttaaaccctaattaacaactgaaatccttagatatttatatattaaattgattaattacaaaagactaaaatactcttaaaccttgatattttcaagctactttattgggctgttagggtccaagccaagctcctgcatggagcagactgggcggccatgtgttgtccaaaggctggccagccagctcctttaaggaaatcagttgatgtcccgtttgagtgttggggtccctattggctgagatgctaacctgaccttcctcttggtgagctgtattgccacatggtactgacttttaccgcgtatgcaatgccacgtcagtttggcaaaaataaggataacaataattattattatttagttattttttccaaaatttaattaatttttttatcaaatactatataataatacacaattaatattttttttagactacatgaaattatttttattttaagagattaaaaagaaacgtcaccattgttgaaacacaaagccaagggtcaaaatttttaaagaaaaaaaaacataaaaactaagagaaaatctaaggggctcgactaataggaaagaaaatcgcaccaagtatagaagaatatgaaaatgacaattagaaatggaaatcaagagataaatgttgtggggagaataaaacaaaaggattaaaactgaaagcgaatatttagtaaatatgaatattacatgaatggtgaaagtagtaaaaaaaatagaaggattcattatcctaaataatttgaatctccaaaacgtaggatatccagatccattttagatcgggctcatctatatcgatccccaataaaaaaaaattaattaatattcttctaaatctaagagaggagttcgttgttgtattattcaaaactctgaatgttctttatgtaaggtaatatagtaaaattattttgtat

SEQ ID NO: 29877 - DNA, 3674 bp, Cannabis sativa
  modified_base (904)..(907): a, c, t, g, unknown or other
  modified_base (1421)..(1428): a, c, t, g, unknown or other
  modified_base (2654)..(2656): a, c, t, g, unknown or other
  modified_base (2870)..(2871): a, c, t, g, unknown or other
  modified_base (2897)..(2907): a, c, t, g, unknown or other
aactttaaacttcagttatgaatatagagaatcatttatattaagtaattacaaagtttgttctttaaaaattacttaaagggcatttatgtatgattaaccgaaattcatctggaagtacattgtatgatgcgaacccgtcatttcaattttttttttgaaatttaaaggttctcgactaaacctctttgacgaaagtggagtcgaatcgttataactccctgaccaaaccttttttacgagagaggggtcgaatcgttataacaccttgatcaaacctttttgacaaagaagggatcaaagaactataatttttggtttataacctatctgacaggaaaggaaaattaaaagttatagctcgcatataaactgtatagaaacgattctcgcaagctaggaaagtacaaaacgaggcatcacgatgccttgataaaagtacttgaacctagaaaatagatagagtatataactattcatacaggcaaattaaaaatatacaaagtgatagaatcattaaagggtatttaagttttctcaaggaacaattgacaactcctcgaaaatctacactttggtagattactaactacttaaacaagaagattacgagtaatggaaaaatccgaaagtactgtacatttgatcaaaatatagttgtttacattgtgaataaaaatgcaagcaaacacaattgtattaagttgaaatgaaaatggtacaaggcatttaagataaggaaaaacctaaaactagttacacctttgcctttaaaaaaatgccactaggggcaaaccattaagtcatcttccgaaactaaggatgagaggggaagtcgatgaactcaagaaagaccgttttcacatagcttaaaaaagaccgtctacacgtagctcggagaaannnnaactacacatagcttgagaaagacgagctacttgtagagagccttgatctctgtacagacctcattcccctagtcatcagaagatcccatttcctgaagctgagatctttttcccagcctttggatattcctcgataccagaaagaggttggcgcaaaagtcttttggggtaggtttgggccttgggttggctggattctcagatagaaaccatgccaacttccttcccagatcaacctgaaaccatgtcaatcttcctctataattcttcatcagcctgagaaagacctttaagattgctcacaagatctataccctcagggatcacttgtgaggatcgaccatggcaggctacgttgttccccgggtttggattggtcagaagctcctcaggcttggaatcagtcgttttcggctccagttgaggctttaagtctttaggagcaaatggaaattggttggtgcgtcttggtaagatgagtttggaaagatgaacttctgaactcagaagggnnnnnnnngcaggaaagagatgatccattctgaaaatggatctcaccaaaaatccagaggtttgtgaaaaattacaagattgagctgcctttttatacacaaagtacagtgacaagaaagctaaagattgcaagatgggtagaatatgaagacacaattcataatgatcatcgaaaccgtaaaaatgccagaatcaaaggatgcattttttccaagaaaggattttggcgaaaatgcactctgtaattattaaaaagatctttttactaaaaaataattttttaaggggcaattgttatacccaaaattcggttgccccctccttgaaagacacctgtcaggatgaagggaatgtgaaccaatgccattgatcttatggaattactcattaattacataagagtcagagtatatttgtaacacgttgattgtaaggtcttaggcgaggaatcaatgtacaaattggtacttggtatattagcgagaaaggatatgtcgctaaatgcaaatagcgaggcaccggagaaggtggcacatatcaaccataaaattccttagcttctactgaacaaactaagtgtaaaagtcgcatcggctcaagaacaagtaagcgaggtgaccatctcgctatgggaagacttcttatagcttcatccagctaacaggagcgaggcttacaaccttggcgagtcaaaagacttctttgtaaataaccacaatcgacacaagacataaattatcaacctcaaaaggaagaatggccccagctcgctcttgggatcattacaatcaagtttttgtcgagacatctccagattcaatagttaaagacatgtttaatacaagatagttttgacctagtaaaagcgggaaaatcacagttatacgattttcaaatcctaaaccgcatttaaactacgtgataattttaattagtaaataaatagttttggcatttataggattgaaattgcaaaatatagtatttgtgaaaaatagataaattgttgagaaaaatggaaaaaatctaactagtgatggacccacatagggcccgaccactaagtctattctttgccattattttatcattttttattccaaataactcaatcctaaccctaagtgaattagtataaaaagaaaagaatggtctcataatccaactaatgactcttgacctagttttcttcttctcaaagaactagaaagtttgagacttcttcttcttctnnntcttttctctcttctaattcaaattctatagtgttcttcaccattaaaattcaagctttagtgattgagtgcatgcccacccataacaagttagtcgtcaatcatagtgtgtaagactgaagaatccaaacaactgaaggagtttcgggctcagatcttgattatactctgaggcaaaaagcagataagggttagagatctggggggaaggagnnatttaattctgctgcaaccaatgtannnnnnnnnnnactttatatgtgtttattttcatcattttagaggttcatatttaggatgctaaaaaaaaatttgttactaaatctaggtcctgctaaaatatatttaaacaaatggctctagcagaactcaaggagctaaaaatacaacttcagaggatgattgatttatggtttacccgacccagtgtatagcccttgggagctccagttctatttgtgaagaaaaaggatgattccctcagaatgtgtattgattatcgagaattaaacaaggtgacgatcaagaccaagtatctgttgcccatgttgcccaggattgatgatttgtttgatcagctttaggagaagactgtatttgcaaagattgatctacgatctggttatcatcagctcagaattcaagaagaagacataccaaagactctatgccgtacaagatatgggcactgtgagtttttggtattgtcatttagattgacaaatgctccggtggcctttatggatctcatgaacagagtattcaaggatttcctcaataactgtgttatagtgtttttttacgacatccttgtgtactctcaaatagaagaggagcatgagcaacatctctgtatggtattacatcgactcaaggatcataagttgtaggcaaaatttaaaaagtgtgaattttggttgtcagaggtgtcctttctagggcacattatcggaaaagatggaatcatggttaattcagggaaaggttgaggcactgaaaaattggccgaggccaagaa

SEQ ID NO: 29878 - DNA, 2468 bp, Cannabis sativa
  modified_base (2221)..(2234): a, c, t, g, unknown or other
atcgtctgagataaaaaaatcaaagaaatataattaccttaacataaatgcccaaacatattattaccatcgttttttaatgaaatattaaatgtatttttttaaatattaaataatttaatatcaaaaaagtaattcattcaatctgcattattgtagattggatttaaattattatgtggattagatcgcatctaaaatatgaaatcattacttagtgcggattaaatgttgtttgactaaaatagtgcaaatttaatcggataaacagaaaatagtgtctttatatatttttgagatttttctaaattacaagcaactaccacctagagtacacaattggggagtttaaagtgtagcctggtcccatggagtggcctttatttaatgggcttgatctcatgttaggaccatctctattaagaatgtaatatataatacagttcaaaactaatggtccaaatttaatctgcaacatcgctgaaattgaaaaaagaaaacacaaaagcatcatcactccaccgccatgtgtacggcactgctattctgtccaaagattttgtttagaatatattgcaatttgaaggatcaaaaccaccgacatattctttctcataatatatggagtcgctttctaatcatgccaaaatataagggtgtgtttcagaaattttactgaaatggtgtattgtattcttatttattttagtatattaaataatatttatttattttaatattttacgtgtattatgtatattataattatttaagacattttgtaaaatttaaaaaaatttaacacgcctaaaataaagttcaaatagtgtattgactattttattttatatgcatgtcaaatgaattgtttggacactactttttatattgtaaattattctagattttttaaaattttgcagaatatcttaaataactataacgtacatgaatatgaaaatacaatggtttaaaaaaattcttcagcatgtcaaaacaaatagaaagtgcattagtgcatcactttttaatagagtacattgtagaaatatcctaatatatatatatatatatatttatcttattaaatttgactatttaataaaaattgttagtttaacgtttttttttccattaaagtaaatggttaaaactaacaccgttaataatattatatctctcaagggttaataatagggttttgtttttcttttttttttacaaaaatactggatttgagtaaaagtttacaattttaatgtgacacgacagaatttacatttatattgctctccccctttttttttcatttatattgtaaacgcaaaaaaacgaggtctccatcttcaacacccacaaacagaaccaccacggaaacattagaatagccggaaaacaaccattagttctggcgagattgagcaaaaatagtgaaatcgacgtcaaataaataatcatggcaaaacaactgtaaaacaacaataaaataaatcaaacagaacaaaagggaaaaaggattaaagaaaactaattacaatcttctgcgcagcttcaacaccagatgcaagcgactatatttgcaagtctagtcttgaaaaatcagaataaaaaaactagtaaaacaaaactaaaacaccacaaaaataaatgtaaaacagtgaagcagatataaccacttaaaaaaaatataaaagaatcacacacttcaaaatcattttgacagttagctggtcaaatgtatttataggggaatcaaaataaaaaaaaaaaaaccacaaaaatagccatagagaaggaagaagaaatgtatttatagcctctatctttcacacacacagacagaaccaccacaacaacgcgacaacactcaaaaaacaatcattaattatggggagttggagcaagaacagtgaaatcaatgtcaaataaatacaacatggaaaaacaaccgtaaaacaacactaaaaactaaaataaataaaaaacaaaagaaaaaaaatgattaaaaaactaaacatcttctgcacaacaataacaccagatgcattagaggctatttgcaaacccagtcctcaaaaatcagaataaaaaaaaccacacttttatcttctctaaaaacgtgactgaaaatttaaaaaactaaaaaaaaagattaagaagaagaaccgaacaaaaaataaaaaaaaaacttatatgttaatgaagagagagagagagagannnnnnnnnnnnnngagagagagagagagaagagaacttgaggatgacgagagtgaaaaaaaaaaaagatgtatcatcaaacacaaagaagacgaggggagagagaaagagaaatgagataaaaataggcttaacacacatatgtattgtaagttatatgaacttttcatcatcaatttaaattaaaaaaaaaaagaaagaaagaaagactatcacaaaaatgtcaagataagacaatataagagcaa

SEQ ID NO: 29879 - DNA, 1293 bp, Cannabis sativa
aatttctcataaatcaaaaattctgttatatagccacattttatatagaatggatatataaatataatccaacaaaatggataaaaatacgtaagatataggcagcaatattgtatatctaaattatacatttagttacatttaatctcataaattcaagttttggtagtaaaaccctttgaacttcacttctcttttgttcattacacttctatccaaaaatcttagttaagtaccacagtggactacccacgtatacacttgtgtgcacataacaaatttttagtggtccacatttttatccaaaatttgcgcatctgacatggcaccaacacgtggcataatccagccgacccttaacatgacaaggaatattccagataaatgcatgcctggcaggtcctatatggggctaatatccatgaactgtaaattaccttccaaaagtatctggtcgggctatcattatgccaacagagaaaagaagattgactcgccttgcaggaatgtttcacaagtaatcccacaagaaagacaagtctctgaaagggcctggccaagtaatcaacaagccggccagggtgaacgatattaagaatattgggcaacgctacacaagccttgatttcttcctcaaacaaatcccacaaatatctctaattgtatcctacatatgcggatatgattgatcttgtaatgccctaacaataggaacgtcacgcacggcgactaaacataaactaatcttgctaaatcggacggaatctactatagctgcgcgcataaattaaacttttaaaatacagaataaaataataacttgtaattaataaattttacaaacatccaaaagtatacattttattttgggatcccataaattttttttttcaaaatattacaagttatttatacacaccaacctaagcagcaaaagtggagattgtaacatttttcccaaggtagacctaaccattgtggtctagcttggcctgaacatgtacaatacaccacaaaaaaccctcgacctcatgactgatcaataacagatttactctttcttgcacaatagagcacccgtgagccaagacccaacaagacagtatagataaccatatgaatattaattataaatcacataaatattgatgtcattgcacctactgtctatttgacataaacctacgtgttacgctaacacgtctatttacaataaggccttacaatagtttatctcggttctgattattgagtctaacctaattatggcttaatcgcataattctttatatc

SEQ ID NO: 29880 - DNA, 2107 bp, Cannabis sativa
atgatgaaacgacaacgaaagggttgaaacgacagtggagaaaggaaagactccggcgaaggtgtgagagatgaggcagtggcagagagagattcagatctccctgtatttcttcaagcgtagctagcaaagattatggcctatttgtaggcgtagttttggggattaaagtcacaaattaaaacccagtcggactccccatatataattttttattattgctgttttaatttggtttattttattaattgaaataattaataggatacacctgacatgatatatcatatatattcctaattttcaatatgatacacttctatatatatatatataaaaaaaaaaatagtttaccattgtactagaataatcacacgtatttgacaactcatatacatattttaatgactcttttacgtttgagaaagagcaacagtgtattcaaagtgaagaaacttatattttaaagctagcttacttattattataatatataataacgtagattatacatacatacgtaggtatatatatttattgacgtgataggagaagagttaattcagaaggaaaaaaaaatcaaaattataaatattgcaaaacacgtattatatatatatgtgttatttgaaaagtggtataaaaattgttgtgttggtatgaactatgaaatgctactctgcttggacctatcctagaagagtccttgtctagatggtggcacattctggagaaagtctcatgattcatccggcaaattttagacagtaactcatctcatggcccttgcaattggagagagtagcactattgcttatgatctccttgtcatgaccctgccctatacaggttgtgactagacgataaaattccaatcgcttataaggatttgtggggagttgactatatatctacataaataatgatcaatctaataacatgtcatatccatattcactactatcttctcaggcttttcctttgtttggagccttctctacattataagccacataacaaacttatagttttgagtgatcattctctcccaatcacatttagccaaggtgactttatctttttgttcaaatagtagtttatgcccaagttggatgctatacttttgagaaacaagttatcaagactcaatttgagcttgattttatttttacagccaccaatctttttcaataccaactagaatcgaggacattcatagtcctatcaatattaattcttgagataaacactattgatctattttacaaacaatatataatcttaattaattcttttatatatatttatagtgaaatgtcttacatacaatacattatacatacttttaatgtatattgttagtgctttaaatatgggctggactttatgatatgacacgagctcggaaggcaccggtacgattagacacaaaaaaatatagttttgagcacgacacgacatgatattataactttgtgcgacacgacacgaaaaatatatgattaaccacgacacgacatgaaaagcaccaatagaatagtctgtaaggcacgtcacgcgactaactcgaaaaacacgccaaacattaaaaaaccctataatttaatatttataattataacatatatatttaacaattataaataagttaaaataataataaagtttgaatataaaattagatattataatttataattaaaattattaaaatttataaaactaaaattatatattaatttatttgtagagtgtgatatacaaatttttatatttataaataaatattgtaataattttaattatatttttataactttcaacaatatacatataatttagtagttaacttattaattgtaaaaaaaaaaataaagaaaagtaaagtacaaattcaagccgaaatataaaaacggcttggcttgtttaagaaaaagaggtaagtacaagtaaagcaagcacgacacaaaaatattaggcctactatttaaaaatattgttagcacaatacgatacaatccatattgttttaaggtacgatacgacacgacccatattataaaaagcacaaaaaaaaaataggtgaattaccccatatactattttt

SEQ ID NO: 29881 - DNA, 1483 bp, Cannabis sativa
tggccttttattagcagctgctaacttatgtgtttcattttggaatactcttcaggtatgcaacaaaacattattaaaatataatataatatatttttttaaataattgtgaatcttgtcttattgataatatgactgaaaaaacacctaatataacattgagtattgtattttttgtacatataatatatgaatttgggaaattttgtagttcaatgtttttttatggtaagtgtaaaattttagagaaacttaaataatttataatgtggaaaataaaatttgagacatacaggggtcatactaaaataattcctttgagggtctactgttgacttatcttataaaattgtgtattaatatattactcgtgtttatatatttataataataatatatgaaaatggtgatgatgatatgatgatcaggctggaactgtgaaacaatacccacaagtgatgaaagtggcatcgttttacagcaccattggaacactccaatctgctttactttcagccttaatcttcgaaagagatctaaatgcttggaaactagatcttaacaccacccaactccttcttattgttttaacagtaagtactaattaagttctcattaatttattgattattaaaccaccaacaaattattattattattattgtttgacgttgaccaaccacatttatatataattaataaaagaatatgcattgacttattaatattatatttataggcaagctttatgggtgttattcgaagttgtgttcatctatggtgcatgaaaatgaaaggtccattatatgttcctatgttcaagccatttggtgttgtttttgccactatttttggtactagcctccctgcaagtactcttcgttacggaaggtacgtatatatatatattgttattattttatattatgatatgataatttctagagcattgttataataaatatggtgcattgtgagcagatccagtcttaagttgaaataggtcataggtaaaaaaaaaaaattggacccttactataaaattcaatagtattttaaaaaattatttaaaaaatatgtattttttaaaggttgtattttttttatttggacccttaaaataagccagccttagatacggggcttagccctccttaagtaagggtcggccctgattgtgagtgactaacgattttttatattatttattaaatcaaaatgtgtaaattatgatatagcagtactatgccacctcttgtttggtacctaagtgtcttttagcatttctctcatttttttatagagcattgttattaagtattagtagagcttagtactttttagaagtggcacctaataacaattggttagcgatatttcctaataagagttattatattaaattatatgagacttaatacttagttgtactaatagtcgacacataacaacgagaaggaagtgttaataactactaatgttt

SEQ ID NO: 29882 - DNA, 1438 bp, Cannabis sativa
ccacccacccaccccccaaaaaaaataatcactttacaaatttgaaagctgcagaatgatagatgaaagaagaacatcgtcacggtgaaaattgggtcaacgagttatatctctaatgacaaattcaaattctacatggttgtacactatttttggcactggatctggaagcccttgattaagtataagataaagctctcatcaatgagaattgccaggtcaacaacaaatcagaaaaaatcacaggtgaaacatctgtgagcaaccaatatctctgttccgatgcttaattacaggtaaactttaaccatccatcctccctatttgcgtggacagcaggaataagaaacaagcaaatccgcataacataaatcagtttccacaaagtgacacaggtccttttaagacttcaccggagctttgcaaattaattcagtaaccacaaataaaacaaagcatcacagctcataactccaggcattagaaaaacgaacaaatagcatgttggcaacggcaaataaggcttggccaatcaaacaagaatccacatcaaataatcaagtctttacttaatcataagcaatgtaatagcaaatatattttaaaattattatttttattattaaacacgaataaataaataaattcttaccagactttagatcaaccctctcaaccttgccatatcttctaaagagccgctcaacctcagtctggcgcgagtcaaactccaagtttccgcaaaagataggcctcattttcttcaaccctaacgacagtcataagaaacccttcaatagaaatacaaacaaatacatataacatacattcgcacaatcaatatcgtcgtttaaattagaaagtattgcctgaatgacccattatttagggcattcaatctaagcttattttatacagagggtaaattggaatagatacataataaaaagcgggaaaggaaagtgaaccagatccaaacgaagaaagaacggagattggttaccttctgggactttcggcgatccaaaagctctagaaaaccctagacagaaatttgagatagctaaagacgcaagcaggagcaaaggttgcgaatagaaaagaaatccaaagccaagcaggtttgtttcggcgcgacaactaacaaggttattacagtcttttcattttcctttttaccaggttattacggttattttcatattcgtgttatcaccaaaattttgtttacactccacaaatttttaaaacaccttattttaataatttttattttatatttttcaaaataaaataataataatttttattttatataaaatttagagtgattctacaagaaaattttgattttatatacttaaaaaactaaaaaaatttattcttaaaccaatacctttaaaactaaaaaaactatgatacttttttcaaaacccca

SEQ ID NO: 29883 - DNA, 2094 bp, Cannabis sativa
cacacacacacacacacatacacacatacacacgagatttgccaactttggttctcacattgtaatcttagtagagttacttcaaattctagtattatctctagtatcaatacaaccaaaagaggagtaggtcattactctctatctaaggggatcgaacctttataaaatcttgtctctcatttacttttgtgttcttattgtgtaacacgtggcaagaaataacattaaatacgactccgctgctggttggtcaaatttgaggtcaacgatggtcatatatcaaaatatatataggcagttcagttagccaaaattactgagttcagctacaatttctaattcacccaaatttttctaaagtttaccttaattatttaatatcatcgtaattgaaatcaaagagtgttttctttaaacataatgattgtaattaagagattattctttaattttggatgagttgaatctaaattaatgattgtaattttgtatttattttttaatatttccaaatgtgaaatatttacttaacaaccatcttagttgtttttttttattattttattagaacacaaatatatttgtaattttgaaaatttagtatagtaaaagtatagaaagaaaaataagtgacaataaaaataataaaaaaaaaattaaattttcattcttttgactattttcataaaaacattacatcataccactagctaacaaactggataggttgaccgaagtgaagagcccaactacaaaacttggattcttgtaagcttcttctctcccatctctagtttgggaccaaaactaacgaaaaagaccacaccaattcaactatatatatataaccccattctgaggtctaaaataagacccatcttttttactcaaccatgcttatagttgacttgactggaaatcattgtgatgtattaactagtagtactgctacaaataataatggttagattaatccatagtccgactcatgtttttatgaacacagagttcaagtacatcatccctaacccatatttaatttcatattaaggcccaagtttattgacttttatgtcatcctaatccaataggcaatgtcatgtctggttctcacaatgctctcttacgtataaaaggtggcttttttagttaaagtcgatcttttatatagttaagatataaatgaaacataacgacaactaattgtccattattgaataagattctaatattctacactaccaactacactcaaatatttatttatgaatttgtgcattttcttatcatataatagcatagcaaaattgatcaaaatatacacattggcatttgcaattgaagtaaccatatatataaccgtttgactacgaaaacctatggaaagagtgtagattttctgttaattaaaaagttacataacttaaggcaaaaggaaaaattacttaatttctcaatttatttcttttgaatgtaaggacttcgaacaacatgtgcaaaaaagcaaataatttagctacacaattatattcacacatttactcttatagcaagtatcacccaatttttttgtatggggaaaatattcagtaaaaaagataaaagaaagaaagaaaatgattattggggtgtgtgtgatcattcggaggatggagaagagtccgtcgttaatattatttggagagccacctaaaacgacgccgtctgcaatggtctccaccaatcctcatctgaaccttctcaaactcggatgctccacagggtatggtgatccgacccggatgattgaagccatggactttttcagcctccttcaacagatccccaaacaaggggtgattgaagtatatgacaggcaccaagtacatctgagtctggtgcagtgactcacccacgtacacagccaggtgacctttaggtatcccttgctgttgattcggactatcaaccgggtcatgggtcaaggggacataatcacccgacttgggtgaagaagaacaaaggtgtttagctcctcttcgaaaagagcgagcaaaggtgagaactttggctatgggattgctatgcacgtttggcatcataactaaaaaa

SEQ ID NO: 29884 - DNA, 1257 bp, Cannabis sativa
ctaaagaggcctggtcaacaccattacttgtgaaaaggtcctggtagtagtctaaaataatgttcaaaagagcaggaggatttgtttgagtattaccattagcatcaataagctttttgatctgattatttttcttcatagtgctagcatgcggatggaagaatttggtgttggagtcccccgattgtaaccatgatatgcaagatctttgatgccaatagtcctcttccttagctagcaattcatcaaggatttgttctgaattttgtaaagcttgcaggtgatcactatcatttcttttggaattatgaagtgtagaaacatgcttatgagtatccttgatctgctgcttaagttggccgaaattcgaattatgccaactctgaagtttagcaacaacattagagatgttggttgctagttgagcaatattgttacttgaatcagttggccaattatcaaaacttaatgcagagcagtgttcctcctgtagccaaattttttcgaaccaaaatatggacttgaaatgtattccttgtggatgttcatccaaagcaccaacaagaactttgatggcttgatggtcagacttgtaatagtctaggtgctgaactgaacatgtttgaaaggtagattcccagtagtcattaaaaaatccataatctaacctttctttgatagtccctctaccttgaccttgactactccaagtaatcctatcaccctcataaggtaaaagattgagacaacaatttgctaccgtgccacgaaaagcttcaatttgagaagaatttcttgttgaacctctaatcttatcttcatttgagattatttcattgaaatcaccaagtacaagccaaggtaataatggagcaatatcatgacatcgtttcaaaattgtccatgtgtgatgtctttgagaagtacatggatgtccatagaatccagtgaagtgaaaggaaggcccctcaagattttctagaaaatagtcaatgtggttggtggagaagttgtttaaagaaacagtaacagtggatttccattgtaacataaggcccccaccttggccttgcctaggaacctcaataccatgtggaaaacgaagagaatgtctaactttatctatactaccaacttttaacttagattcagcgataaacaacaaacagggcgcatgctcagagacaagcaagcaaaggtatctgaatgcactggggttccccaatccccgggcattccaacttatgcaattcatgg

SEQ ID NO: 29885 - DNA, 1463 bp, Cannabis sativa
aaatcaatactttattctcattctgctaaatcaatcattcaaaccggaacaaccatcgcatctctccctatctacatctgataaaaaaaaatgaatttggtatattataatataatataatctttacatttattatattatatataagtataattaaaaaggattttttaatatgggaggccttgtgtaataacccaaacttgcttaattcttgggtcgaccctgagctcatgcaagctctgctaaagggacaaaccctacaataatggcttagagtcgacgacatagggtgaataacaccgcttacataagttcagtaaaagagacaagacaagaaaagcacatctcgttggataaaatccgtgtctccctttttacatctacaaaactctgagagctcaaaacaagaaattgtgcaaggagcatggatgcctgaaaaagaaacccaagagctagcactaagaaccaaaaaagaaggaagaaaagcaccactctactgcctaagcatttgcctaaaaaggccatcacacgactccaaccacaaaatcaaaagggagaaggccattaacatcccaccacaaccgcttccaagccatccacgaaatcataggtaaggagaaccgccatccataacaaacaggtcgacaaggaatcaactcttgccctgagggttgcaaacgaaaacccacacccataaaactacccagagcatgtcttaccaaaagggatatttgccatcgacgagctgctaccgagaaggagagtcacaagacgccactagcccaaatctagtcagtggggccctaagaatatgatgaaacagagagaaaaagagaaccttatgcgtgagagaaaacacaatttcttttttaaaaaaatataatttaaaattatatttcaaacacgtataaaataaaagagacacaaataaaaaatattatttaaactttattttgttttatgatccaatttgatttaagtttgacttttactttctataattataaaaagttctgttggaggtgaaaaaatgaaaagtattctcttgacaatttttttattttggagaagttagggaaattttattaagtaaagttatttatttatgtaatagtatcccaacacagcaataagtcaaagctataagtaaacaaggagtttcattgaatgattttaaaatataattatattaaatagttatggttaatttaattatatattgaaacaatttaataattaatacattaaaattgtcctcgccggccggtgggaaagaaactgcatggtcccaactcccaacttccaagtcctaaccctaattagaagtttctttatttataattcaaaataggattttttttcaattttacacttcaaaataatttttttttttctatttttacgaaattctacatagaaacccctattgcagctagcgctgcaacttaaattataacaaaaaa

SEQ ID NO: 29886 - DNA, 6292 bp, Cannabis sativa
agtatacgtgcctcgcacgtagtttttttactagtatatatatacacatttatatattcacatacaaatttaatattaatatgtagatttccattcgttacaaggtgaaatctagagagtaagaatctgtttaaaggcaggaagtgcctgttatatattacccataatatgagatgtttacttcaattcctacaagaaataaataggagaccaagcaaccgagagagaaagattaattcttcatcgctgaccaaccatatagaccatattgatgaccctttgtgaaaactaaggttgccctggccttattacttgagaagaataagattatgataccatcacatgtcactagtgtaacaacattttttgcattttcatgtatgttgtgcatacttatctctaaaacagctttagtctagttttctcgcaataaattaaaatttcatctgaataccaaatctctctacacaatagctaagacgttcacgttgatgcgaatgcttactctagccagcattctttcttcataagtcaagcagcaagtgcatgtgttcgtgaagcaaatccatcatgcatgccatcattggttcgatactttctaaataatagctcttgtacggtctcaaatttatttttccattccatcaatgggttagcaaacccttgagtttgagcctacgcataactgtagcgcacatgtcgcttctacctctctcaaatatagtcatcctcccatctcatgtgtaccttttagtactctcatcaagaatgctcactacatcttgtcaaaaatattccatactaagagcaagagctagtacacaaggaactaattaaaatatacacatgatcatcaagcaaaagctagtacaatctgtccgtctaataacacctgcataagtacttaatcctatttctagagacacaagaagtctcctctcaagaaacttactcagaactttgatggcagaggtggtggtaaagaactcacaccaagaaataacattttaataattttaactttctcccgcaacaaaatatcttaagcacgtcgctaaaaacatatatacagtatttagattttgttcagtgcatgccattttgttgaccacaaaaagttagggaaattattattgttgttataatattcgcgcaactagaaaaagttacaatggctagcacacgatacttgtaaaggttatacatctagccaaaggtaatacaaatggaaattttatataaatatatatatatatatgtctgtatatcttaagacatcctacatgtatcctaacctgacataactgttacaaaatatagctttcacaaacaaaatgttagtaactgctgggcacttattttctgcttgaacattaaactactacattcaaatataagtcaggatattaatatattagttgaaagatgttttggtgtataactttacagctcatctaactttgtagtccaatatttctcacccgagattagaattttccccaaattacaatgtacatatgtggaactacaattgcttatgcagtctgcatgtacatgctgtggggctgtggaccttggattatcttagtaataagatccctcgtagataagctgcacattaatcatgagtagttttcagacaagtatgaataaagatacaaatatatggatagacaatatacctacatttacgaccagcttagtaaaattttaactaactaataggtgcaattccccactaagataacctagccaaatactgatttttattcttcttttggcctctgaaaaatgctttgggagaaacatcaataaaacaagatggcaaatgtaatacatccaaacccttcagagtgcatgatgaaaatgtgaaaactcaagaaaaggcacaaaaaattccaaccagtagtcttttcttaagaatgaaatttgtctatcaagaaattgaccaactgaaaagaaatatcataaaatgaaaattgtggacattttaaatcaagtgagacaaaagaccataaatataagactttgtccaacatgggtgcaagcaaaagtgcgcttgcactgatggaaaatgcactagctccttctaccatttcccataatgagaccgacaaaaagactaaagatgattgtattgaatatttgtggggtttacctcggtaagtaatgtacatttattaatcaaagatcaaacctccttgccatctgatgtaagaagccccattttctccgtaagattatccatattctgagttttgttccatccattctcttttggctgtacttcatcaatatctttggtagttccctcaggagataactcctctgccattggactttgcagaagaagatcatcccagaatgtagtgctttcaagcagtgcatcaatgtcaggatcaggggcaatatcatcaagatttattgacattgacccatccagtcccaatgactctgggtctaaaaatccacctgtctcattactcaagaaattgtcttcaggaaccatttcaggcatttgagaaagctcaggcattacaacatctccttgcgaaataggaagtgaaggtgcattttgtgatccaaccagcatacttatatctggaaattgagctgttgtaactttttccgaagtcaaagattgtggggaagattcggaaacagcaggtgcagttactcctgaagacactggaacagaagatgtctgccctgaggttggtaagacctctcgaagcgtaactccagatacacgacaagatgagcttctactgtccactgcagcagatgatgatgatgatgatgaacgatcactaatcaagaaacaatctgtactgttattgaaagtgtccatcccagaagaaggctctactttcaccatctgcctgagcattgcctttgcagattcattcataggaggctgatacttaacaatctgtccatcagaagcagcagaaagattactctcagcaactacttcctgtcttagtctccgttttttgtttgcttctgatattcgtctactactctcattttgttgttgaacaaactgagccaagaaaccagggctctgcacagctttagccagaaatgacatcatttgctgctgccgctgctccattccttgcagacgctgtaccatggtttgcagctggttatcagtagattgctgctgctgcctcagccgaacaagttcctgcataagaacattcttatcccttttaagcctctcaatctcctcctcaagaccaaacttcccaacctctacgcatgcccccaccgtattctgtccatgtgatggctgtggctgttgctgactgtgtccatgggcaggtttccgccgattaatactcttaagaagatgtttttgaccccttaaaaatccctcattagcaaattcccaccgatcaggatcaacctttctaaaaccctattgacaaacagcatatattataaaaaaatttctaaatggaagggtcatacaaacatttctgcaaagaaagaaaaacaaaatagctaccaaatctctgcagttaaaaaaataaataaataaacagatagtttatgcctaatgttatcacaaaatcatcattagtcatatagtgcttttaagatcctctacgtgatataatacactttatatctagccagcaaggttttaaaaatttaattaaaaaacaaagcacatgttcctttatgactttatctcagcaaggcagatcaaggcacaaaacctcagccataataaccaaacacctaaaaattatttactgatggaaacaaaaagggaaaaaagtaaaaggcaataagaataaaaatagttataatttagttcatggaaaaaacaaataactggattcataaaactacctaatgaagccatcaaaagttcggaaccatcaacttgagttgttagcataggagtagaaccaagaatagaatgcaaaaacaattttcttagctcaaaggtctaagaagtcctcattctcattatcattattattactattgtaatctcttgaagaaacatcaacatatcgtgcaactcctgaggaagatctgtctttatgttctagtcctctatggttttgtttactttaagtgaaatttaatcaagatttaaaaggtccaaacgaattaaaaagtgaaaaacacatgggaccaactaattttcaggttcaacccaatgccctaaatagaaaaccacgacagttaagcaacctaaatgcaatgtagaatgaataagggcagtcgaattcacagcataatagtcatagaaattaaattggtcaccatagcagctatcacgacaaatatttaaaatccaatctctttcagcaataaccaatatcattcaatcatagttagaatctagaaactaaatccaatcccatacaaagtactaatctaatttgatgttggtgaccttaaatgattaaaattttaaacatcaatccaatcaatcatatgttcagagtaaacatataaatatacatatacaaagaaaaggaataagaagagctaaaataaatccaatatgattccacaacacacaaaagggttatgcctgagtagccaagcccattgtttgctcataagtctaagattgattcctgagatctagcattttactaaagtttcctgcgccaaaaagattgtagggtataacaggagaacaagaatacatgtctattggaatggaaactaagcatttatagcaacatcaattacacattacttttccagtgaaataactataatcagttctcatatagtttgaattagattgaattgaaccaatccaatttaaactgaacttcccatctaacttaagtagattggattggactggtaaatttttaatgtagtaatatggtcacccaaaggcattttcatagaatgcagagtctagaaaaaggaatacaagcttccaggaatgaaataacagaaattacaatagcagaagtcaaaagatgcatgccacattaagtttaagcacacctaagtagagtgaacaaaatgttgaatgtaagtagataacccacaaatccaatgcaattcacataggctatacatctatcttatattgaattgataagatttctaaaacagaaaagtattttggattgatgggtttcagttgttaaatggatagcacagatacaatcatccaagaattccaagctaatcctggtcaatgtgtaacttacataaaccacaggtaatcttctattggctttcaaaatgattatccttagacaaattatttatctcaaagatgaattgatttgcacatgttaagtgaattggacatttaatgcaaaatacatatcaatctatgcccaaatcctaactgaactgaagttcaggcaatgattggtttatacggtattagacataatctttgagaactgctcatgattggattgaattagttatttattcctaaattccataaaactctaaccactgctcatctctactggcaaacttcaggttttattttgttttacataatattaagaataaactatcctattgtttcaaagacaacaatttatggttaattgtcctattatatgagtatgacaaaaaaaaacagcgaaattggtaaaatgagaaatcatcctcgaccttgaaatcaggtgatcatacttcttttcccttttttcttcttcagctgcatttggctgctgagaaagtataagacgaagaagaagcatcacattttcaaaattttgtgggaaaaaaaaaatcctatcactaaacccaattgcaactacttaaatgaaagtaatcaaacaattcgaatattaacaaacaaaagtaaagacaaataagttccagaaacacaaacaagaaagaacttgtttcttttttttttttggccgttcaaaatattaaagaacttcaacgatagtactttgtaattgtaccttagaaccttgtcaattttctcaatccattctatgatttacagttccactcaatatcactactatctaacctatctatctatgtattatatttctgatggaagtataatactcaaggctttctaccataattggaaaacaaataagccatataattcttgagcaatcactaaccggcattggtaccacacaaccaaaaaccaaaagtagatgagtaacaaaacatacataggtgttcaactgtctaacgaagcttgagaaattgctatgcttgaagtacttgggcaaaagatccctggcgaactcaggcgggttccacaccacgaagctattgttggtagggctccacgacacgatct

SEQ ID NO: 29887 - DNA, 1410 bp, Cannabis sativa
cccgtacctgcaggaggttcgggggccgaggaagatgggtagctgtaatgaagcgagacagcaagcacgctgggtgaaccccccacgggctgaggtgaagattaatgtggatgctggtgtgcggcaaggtacgggtcactcgagttatagctgtgttgtgcgcgatgtggaaggccaatgcatttttgcttcggctactactgtgccgaaggtgtactctcctctctatgtagaattgttggccattaaacatggcttacaaactggaatacaacgccggatagaagctgttcatttaatccattcgaaggaggacggttgtcgggacgttgatgggatactatgttgtattaggcaattgatgttacatcgttttgttgtaggtgtctcttttgtgtatagggaggctaatgcagtagcacatattttagccaattacgctttgactaataaagtgagagctatgtggattggggttattcccccttgtgcaagacttgcctaatcctttgtactgatttctatgaatgaagactttatgttcaaaaaaaaaaaaaagtcatatgggtaagttttatgtaaaaacttttagagtatatggctgaaagtatgtttaatgataacattttaaaaaatgtttaataaagtagaaaatttaggtactgaaatataaaaatgttatattattagagatgaaaaaatattcttaaaatttgtattcatgtcacacaatgacattgatgttatattttttaaaaaaaacaaaaattaaaaattaaaactgtaatatttatatactgatttaataaaaaaaaatacatctttagaagtaagagtgctaaaaataatgtagaagaaaaataaaataaaatattatatctttggatgatataaaaatatttaacacattaaaaaatgttatcattagggatgctatcaattttaaggcgtcacttaggaccaatctaattacaagtttacaaccaaccaattcaatcctaacagatctaatataatcggatatacaattataatgggatcaaatcaaatataaattttgaaaatctaatcggatcggatcgattgttggatggaacatctgatccaataaataaccgaatcaaaccaatccaattatcatctaatgattatcaattatatttatatattttaaaatatatttataattttatatatttaatatatttcatttaaaaaatatatatattaattaatttaatatatatttacacgtgagattaaagaaaaaaaaattaattctaaaatattagttctcattttcttaaacgttaataaaattgttattaagtattgaataaatttcattttttttcaattttattatgggattatgataactaagttagattaaactaatatttattatgt

SEQ ID NO: 29888 - DNA, 1561 bp, Cannabis sativa
tacaaaccagagatgtaacacgccaaaacaagcagctttctattaaagagaaaaacattacagacccaaacaccaagttttgaaagcttggttctctcccagtgagcagtagctcaatacaaataactgattccatggtccctcattcactcataagccctatatatgtaactaaccataccattagaccagctcctccactaattacaaataccaatagacccttctactgataacagcctatcaatttcctacctttaagtgaattcttatcatatttgagaatgaaggtctttctgaactatttggtatagtgttaggagataaagtattctagataacagacaaggctagttataaccaaaacccataaaccggaacactaaggcaatgtttactgatgattagtggacagcagggggagtaaggaatggaaaaatgtgtctccttcctgatcgttcaagttacctatttgatacacaaaattgggagaatgccatgaactatcagtgaaactgataataaatgactaaatttcaattccttcccattccttcaaatcttttccctttactattcttctcattatagattagtatgcatgtcctgaaagtaaatattgattatagtgccatctaaatattgtcaatgtgaagcatgcattcccttgagataaacatacctgccaagttccaagcaacgccgtccttctatccatgaccgatgttcaactagccattccacaaaagcaaatgtaccaggccagagaagattggcattcagttggtgaaatgaaaattctcggatggtcaacacctgggaacgccaaattagaaagcttagtataaaacacacgagcttttaaaataccaagcctcattttcttaaaaaataaaaacaaaaacaaaaaaactaggatccccgcctaacccctacaatattaggagatcaaaaaactactgtaattgctatataggtacccatgaggaggggctcgaaccttagacatttgggggagcaaaccacatgtctatccatttgagctactcctcttgggtagaataccaagcctcattaacaagctttcagtatcataagacaaaaggagagcacaagcactacattttacccataaaaaattaaacaaacaattagtatctaaagatgatttagatgtccttattccataacctttcgcatacattcatggtgaataagaaacttgattggatgaactttttttatctttgttttctctcattattattttaataacgagttcattattcaaaaaaaaaaaatgattgagatgtccaatgaagaaaatcaaaatgcttcttagtcactgctctatttaatatgaaaagtacatccaaaaacaaaatagtaacagcattgacatgaaaggtcttcctataatatcaatcaactatctttagctattttttgcactcttgcaaaaaaaaaaaaaaaagtttaatactatattctcaataatttgcttactttttggtagcaacacaaaattatacaatcactcatttaaaaaagaaaaaaaaaa

SEQ ID NO: 29889 - DNA, 1355 bp, Cannabis sativa
gatgaaagttcagagggcgtaatttagtacatgtcaaagttcgaggggcatgatgtggtaaatatcaaagtttggaagtatgatttagtacataaacaatctttgaaatagtaaaattgaatgaaaattgacaaaaatccttaaatctaacaatttcaataattcagggggtatttttaacgactttaaaagttcaagggcatatttggtatttgtcaaaattcaggggacaaaaatcctaattagcctaaatttaataacagaaagcataacttttatgtaatcacatacccacgcaatttatatacttaatcacaccaaatataaattttaggaatttttacatcttatttttatctaattgttaaaaataatttgactaagtattaataacttttttcctttgtttaagtgtatttcaatatgtatatatgtttttctttttcatctttttctctccttaaaaataatttatcactacgttattattgtgatggttaattttacattattgttatattatactttgttgttataacatgaaaacaacattatttgtagttaaaaaaatataactaaaaaattagtcaaaatataagaaaaaatataattttgagtacttttatgtaaatattcaattttttttttttttggaataagttgaaaattactattttttattatacattaactaaatataacttcaaaataatttaattgataaatattttttttttataattaaagtatcaaataaaacctcacataatttattaaaatttaatagacatgatttataaaattaaatataaattaaagagtaataaaataaaataaaaaataaaaagtaaatatataatgcaattttttcaaaatatttagttattccaatcccattggcgaaaggggcccaaaatgtatggagccagttaggctagagacataaaacccttggggcaccaatctttcattcataaagctcacacacactactttatcctcattactcattcctcactcactcactctatcctttcctcttcaatcaacatggcttgttctgcagcttccactgctctcttctccttaaaccctaaatcttactcctcttcctcccttgcttccccatctctttccattcccaaatccttcgttggtctccgcaaaccctttcaatcggcggtcccaaagtcatcttctctctctcgctcctcctcctctcatgccagaaagagcttcgttgttagggcttctgtaagtctgcattcttctatgttttctttatccaatttgtgtgcttttcctttttgggtgattagatttctttattttagtcgaattgtttgcattttatg

SEQ ID NO: 29890 - DNA, 2018 bp, Cannabis sativa
tgtgcaattgcagttgattcatccgaagttgagaagaagatggagcatgtggatttcatacccaatgtagatatccggctaagtgatttgaagcttcttcttggccccgagttgaggatagtatatcccttgattcttaattttggtgttagtggtgaacttgagttaaatggcctagctcatcccaaacggatacagcctaaaggcatcctcactttcgagaatggcgatgtaaatcttgttgctacgcaggggaatccaaagtttttctttagtaaatcttgtttataattttagtttccttttattgatttggctttttcatttaaaatcaggtgagacttaagcaagagcatctgaataatgcaaaatttgagcccgagaatggactagatcctatgctagatctggttttggtaggatctgagtggcaattcaggatacaaagtcgagccagcaattggcaggataaactggttgtgacttctacccggtctgttgagcaggattctcgttcacccactgaggtaatttttacgatcaagttttagactttcttaattcaggaaataataagtccatatcatgaaaagttaagatgaaaaactctgcatatgcaaaacgagcatccttttcggtgtaaattgttgatgatatacttacacaggagtttgaagttgatgcgatcatctttttttaatttttttttccgttgcacaggctacaagagttttcgagagtcaattggcagagtcgatcctagaaggcaacggtcagcttgcattccaaaagctagccaccacaactctcgaaaagctcatgccaagaatcgaaggaaaaggagaattcggtcaggcgaggtggcggatagtttacgcaccgcaaatccctagtttgctttcaaataacggcgcaattgatccccttaaatctcttgccagtagtatctcattcggtacagaaatcgaagtgcagctcgggaaacgtcttcaggtaattttacaactgattaactaaccattcatgacatgacttttcctttacttaccaaaaatattcaactctttttcttctggtaggcttccattgttaggcagatgaaggactcagaaatgggaatgaagtggacattaatgtaccagcttacgagccgattgcgtgtattgttacaatccgcgcctttaaaacgccttattttcgagtactcagcttcatcacaagactgatcgttttcctttcctgcaaatgtaaaatgtaaatatagcttataacattcttttctagtgtttttagtattctttctttggagatatatagaagccacatatgattcatctctgcataatctaacaatgaatcaaaaatatcattctttgctcaacattaaatgagctttgtttgtataatttgtagtagtgttccaacatcttaacgttgtatatacactaaatatagtactaatgaaagataactgttctaaaaaatctatgttgtattgtatcactgtttcatattttatcataatcatatggtcatgacattcacaactttacgtattccctattagtaaaatataataggaactaacacataattcaaattaggaatgattaaaaagctagaacttaagagagagtgatgatggtgtattatatatttgaacattgttatttattttgagaatcctgaccagtctgatagatcaaatttgccaatcaacttgcaccggctacgtggatcaggctggtcgggatcctcagaattcaatcagacctttcgaccaatttgcatttgtcatgtgaattgagctagttttagtcggacactcgggatgtaaaactttattgtatacattcttaccatataagtactttattaataacgataaatttaatgaatttaaaaaagtattcaaaagagttttctatagcgactaagaaaatgacaacatgtaatgttacaaaaagtcatttcctttcttcttgtaacattattggaaattcttttgaataattttt

SEQ ID NO: 29891 - DNA, 1163 bp, Cannabis sativa
ccatccatcgaatttccactattattaagtagaaaaacatgaaaatattaaaatgcatatgtatatcatatacgatacacttagaattcaattaaatcttgacaattgataaattataatccaaatgcctatattttgagaatagggcccacatgacataatacacacataatcgtataatgcaattaatcaacgctaattgtctactaattccatatcttaagtatgttcattacaattctggttttacatttcacatgtgtccaactcttgaaaatttcattaattatcaaaaggttgattgtggcattgtactaatgggaaatgacaattcttgaagggtcattagcataggcaagatggaaatcaaccactttaatgatactgtttggatgttgaacaatgttaggcacatactaaatttaaggaggaatttggtgtcacttggtgtactagaagatgaaggcttcaactataaatctacaaattgtcacatgaagatctcaaaaagatcacttactgtgatgaaagaagaaaagagaaatggatgagacattctgtatggtgagacaattatgtcttctaaagctgataccatgagacaccaagaatcagaaatttaggtgtggcacaatagaatgagacatataagtgaacaatgatcaaagaattgaacaaacgaagttttttgggaaatttaaaatcaagttacctcccattctatgaagcatgcatattgagaaagcaccacaggctaaaatttactattgtaatacatgagtccaaaagactattgcaatatgtacatgttggcctgtagggatctcacaaagttggaactcattcaggtaaaaattatttcttttgtccatagtagacgattttagcagatatgtttgggtatatttgcttaaaactaagaatgaatccttcctcaaatttaatgaatggaaaaatgaggtggaaaaaatataatagaaaaatgaaagttttgagaattgataatggcttggaattcattaacgttgaatttaatttgttgtattctgagtatggtattgttggacacaaaattattaggcacacacctcagcaaaatggtgttgctgagagaatgaataggactatgttgaactaagttagtgttgggctttgtgccctaa

SEQ ID NO: 29892 - DNA, 5281 bp, Cannabis sativa
agagagagagagagagaaacaagaatgagctttagacctttcagggtacttagttgtgcctgtagcaatgagatattccattttaatcttgtttctagagtcattctattagcctacttagaacttacatccattattctccttttatttgtattagtcctaggaaaagtggagttgcttgcttttcctttcttttcgaccctcataactctttcaagttcctaccttttttagtcatttgctttggattttttttaggttctcattatgggggacaacctaggagatgcacgtgaaactcaaataaaaaattccatgatggagggggacccaacagggaatggcaacattaatgccttccaacaaccccaaagggatatgggtattaatgtagagctctcagaggagggatttgtggatagccaaataatgagggacagacagcagatagggatctgaaggtccttcgtaaggacttttttgattctacgaccttagaacttgagccagattttgaactcaattatgagatagtcaaaactggagttcttgctagttttttcttttacggaaaaggtgtgtcaaggtccgaacttaaggatactttggacaagatctagaaacttaatggccattagagaatcaagattatgaaagtaggggtctggggttttttctttgatcaggagtaagactgtttagaggtcctgaacagtatgccttggatcataaatggaaaattgctgattattcaagaatggtcgaagaaaggagattggtactttgcagatatgggaaaggaaattttttgggtccaagacattggactttcaaccccttacctcaactgggttaacaccccaacaatagctgctaaagtaacggactataaaggcagtgatacagctaatcaaagagctattattagaaggggctacctaaaattccaagtcaaaatttctacttatcatcaaattatttctagcttcttccttgatgttaagcggggaagaaaggagtggattcaatttcgttactttaagttacctaaactttatttcaactgtggttatctcaggcacgaaaaaacttatgttcgctcatcgggctcatatcccccgaaagggacggcaggccttgcctatgggacttggattaaggcagagacgactatcttcagttgttttaacaccagaaaataacttgactagtttcgagatgaggcaagacgaccaatttcgatgatcgggagaccctctagaatagctacgatgaacgaggataaagaaaaatgacccatccatgaggttcgtacttcgccagctctgcagtcaaacctcaaaaaaaaaccattaaagaaagtcatcagagtttcaagtaatgcttcaggagctattctggaaaaaaattaaaagttgtggaaaaattaacccttttcccagtgattttaatcagagatggctcagttgcaaagtcatcttctcccattatctcattttgtgaaaggaggactcggtcactctcacctggattcatgcgtagacacaagaatggcaatcctaactttgtctcaaaagaagagattatttcaaaattttccgccagacctctccgcaatgaaactgatgctagaatcctcacaactataatggcaaagattgggcccacttatgagcaaatagttgaaaccacaagctgagctttgcatgtccaaagaaccccataaataccctgagcccacttactttccttggccaatttatgccaatgaaattagattggctgaggaattaatgggcccaactcctattgataaattcaatcccactcctaccttgtttcatgaacccattgatgtttctaactagatccatcactgtccacaacctaagaaaatgaaagcaagtctcaacttagtccttttcgttcaaaggacacctgaaacaacctataaattctctcaagaagtgcctgagctccccaaattttccccgaggccacttgaaactcccatcaagatgggatcatgtgcttcatcatcatctctgaaaatatataaaagaagaaagaatttctctcattccagactgtcagcacaaggaaaaagcagaagccaagctttagatgggatcaatctcgaagcacaaaagaatcttatggatgctttgaatctggttgaggttcaggttgaaagtactgaaaattttcatttaggcgaggaggcggcccttatcaagccccccagccccatgaaaatatttttgtggaattgtcgggacatcgcgagggacccgacaattcaagacttacacacatgggtaaaaaaatacaatcaagattttttttttatggaaactatggttaaaaggagtaaaataaaggattcggcaaaaaatttggggcacttaggggctgcttgtatcagtgcagatggtctctcgagagatttctgtttgttatggaataacaacattaaactccatgtgaattaaagtgttcatgtttttttcgaagctactgtttaggatttctaaatcaaccaatcttggaagttatttacgatttatggaactccttatgagaaagataaggatatgttttggaagaatttggaagttgaagtaaatctttgtgtcattccttggatggttatcggagacctaaattgcattagtaactctaaagaaaggttgggggagccagagttaaatactgtggcacaaaatggttgttggattttttcaccacactggaggtgttgaccgcttctttaaagggaacaaatttactttgcagaataaaagattcaagggtggcttaatttgtgagagactcgacagagccataggcttttgcaattggatttctagatatccttctccgggtatactaaattttccaattacaattttagatcatgcccccattcttttttactttcatatgtttgctaaaagaggatatatcccctttcagttttttgaagtctggtccacaaaggcctcatgtcgagaagaaatagttagggcctgtcatcactctaatactgaggcctgagtatctcttcttcataacattgatagtaccaggaaaagcattaggcttggaaaaaatactttatgggcaatgatgagaggttgatcaaatgcctagaaaaaagaatacaatggcttcaaaatcaaccaattttagttaactatagataggaagaaagtaagattcaagatcaattgaaggaggcttgggcttggagagaaagtatgtggaggcaaaaatccaaagaggtgtggcttcaacttggaggtacgaataccagattcttccatgcattaactctcattagaagaagaagaaattatgtctggtctctcaaggataggaatggcaaagcttggaatgacaaaaagcatattggaggtattattaactcccattttcttcagctctatccctcttcgaacccttcttttggtccagactttgatgaattttttacaaaaaaagttagctctcaagataatagtgcctttatcgaaattcttaccgatgatgaaataaagggtgtggtgtttaatgatctccatccccttaaggcttcgggaccagatggcctttcgagatgtttttttttttttgaagtattgggatgtggtgggaaataattaatgtgatgcaatcaaggaagtatttctaaaaggggttgttaactctgaactcaattctatgttcgtttctctaatcccaaaagtggagtatccttcaaccattgaccaatttaagcctatgagtctttgcaacttcccttataaggtttttgcaaagattctctccaatagactgaaaccacttatggatggtttggtgtcgcccactcaattggcatttagtctagggtgttggatagctgaatcctccattctcactcaagaattgttcataaaattcatcatcataggggttcaagaagcctcgtggctttaaagcatgaaatgcataaggctttcgataaaatggaatgaaattttcttgaacaggtcctttcgacttctagttttaatgagaaaagttactgccttttgatgacttgtgtgagaagtgtttcttactcggttctcttgaatggcactccacttaggaattttttcctcaaagaggcctacgccaaggggaccccatctccccttcttattcttgctttgtgaggatgttttatcaaagatcattcttataagagataaagaggaaagtctcatccatggcattaagattgcaagatctgtcccttcaatctctcacctaatgttcgcggatgatactatcttgtttccctatgcaaatgagagagagagagagaggaaagaaccttgactgaatgcctttctttgtatgaaaaattgtttggacagtcttgtagtgtctccaaatctagtgtccttttctctaaaaatttgagtagtgggaagaaaaattcaatccaaataatgctgaattttgctcaagttagaggcgaggagagacaccttggaaacccttttatctttaagagaaagaaaagggaagattacatcaggttaaagacaagcatgttgaatagattggaaggttggaagatgaaacttctctcttatgcaggaagacaaactttgattaagtcagtagcatcttctgtgccagtttatgctatgtcgaccaacaagatcactctatcaacctgtcatgaaatggatgcaattctgagaaaatactggtggttgggtaatgttgaaatggacagattcatggtccttagagcttgggatcacatttgtcaacccaaggcttcagggggcttgggaataagaagatttgaggatatagatatagccttactggctaagctagcatggagtctagcaattagacaagagaagtcttgggtcacttattaatagagaaagtattgttatcatgacaacttttggagaacagagcaaaagagcaataactcctatcaatggaagtgtattctggaagtgaaggatactatagccaaaggctcggtttctattaaagttggaggagaatctatttttttttggaatcaaccttggattctttggatagaccttcaaaattttaaggagacaatgctcgagcttaagagtaagcacttcactattaatatttttgtaatgtccctgacttaagccttcaatgggcccttacacacacggaatgatgactcttatacacgagtacgtcactttggctgcttcccagattgatgacttaccctacagac

SEQ ID NO: 29893 - DNA, 1938 bp, Cannabis sativa
acacttgctaaatgttcaacttaatttttatggtactattacacattcatttgagtatattcatgtaaatattgtgttccataattctaaaattatgttttttttttcacacctctaaagatatttcaaaagatcaacttcacatcattcttttctttcttgtcgaaacaattcaagttcattattgtgaaaaagcacaacatgatatgaaaggttttgttttattcttattggaatggaatggcaccttcaaatgtcatctttagcttatttccttttcattttttttttcaaaggcatatctatatggttaattgaaattggaataaaactttaagttggaggtaaaatatgattttattggttaaaagtttagtttgttacaaattttcacaaaataataaacgacacacttacctatatgttagactatttttaataggagatgtgaaagttgatctcttatctatatttggtacaaataatagttttgtgacatttttgtattaatttttactattatgctccaatacataattggaaattttgatataaaatttaatatgttagttattgttcatctaataatttattgttcatctaataatcatacaataataaatataaaatttaataataaaataataattatgaaaattatttaatataaatgagtatattaactaaattttaataataaaattttaaaaaatgagataatggtaaatataaaatcataacatttattgtactgcaaattttgcatcatgctatattgtgatccaaatttaaattactttttgttgtgtaagatatttgcaccacaatttgacacactatcaaagtaaatttttaataaagtggattatatattatttttacatcatttatttgtatctctatgctcttacgaacaaattcaaaaatatgttgacctctcttaaaaagattttttctattaataatcttactttaaaagcatctctaatttaatatattttaataatattgaactggtacttggatttgaaactataaatatttaatattataagttcaaatttaatcaataaattttattataaaagttgaaaatatagatattttaaggtgagagtagaccattgttgaaattaaatacaaattatagttgtaaaacattgacataatttgtctttaattaaccagacattaaatgcatccttgaaatttgcatccacaaacaaaatattatgaccccactcacttattaataaagcaatatgtattaacggtattaaaagttcagttacattcaactaataacttcctttattttatattattaaaaaaaatctaaaaaatcttttttaaacaccatgaaaaaattatactatatttgttactaaaattgattttgttatcttctatatataattataggactgaacatcaagcaagttgattgagggtccaattaataacttttgcaatatacaagatttaaaatagtatttaccttataatataataatttattctttcaattaaaagaagaaaagaaacattaatttaaattttaaaccaaagtacaaaaatcaatccaagtaacaaacaacctggtcatcaaatttcatattcatgaatcacaaaaataaaagtaaaaactaaaatatttcaaagtccatagtctataaaaatagctaagattaaaacattctgaatgtcaaaaacacgaagagagtacatcagtatacgtgcacagtagaagtacttaattttagaggattgttattgggcatcagtggtgcctagcacctttcagacgtgtcaccttgcgattggctagtgatactccctaaaagctattatattaaattgtatgagatccgatacttaattagactaataacgatattgacacgtaaaaaggtacttggcaccagtggtgtcttttag

SEQ ID NO: 29894 - DNA, 2343 bp, Cannabis sativa
  modified_base (645)..(647): a, c, t, g, unknown or other
agcttttccattcaccataaaaagctttcaaatcactagctaatatatacttttttgttcaagaatataatttaatgtctactagtactttctatagtttgacaatgttttcttcaatttgcatattggtatacgtactagattctacacatgaaattttttaggtaaggatcaattttattaattattttgaattttaatttttataccgtacattattcagaattttttaaaaataatgagatgtatgtcataattaagtacattaatatacaaagtccacaacaaaaaaatgtaacctttagtgacaactttttagacatgataaattttttttaactaaatgtgagacatttggttacaacaagaaattatttgtgattaagacataatatttaaatataagttatcattaatttaattttagtcataacaagtatagtcacaacaagttgtgatttttgtgactaataataactaaatgtaactaaaaataaaaaaattgtaaccaattataaattatttttcctacgttgtgactatacttgtttataattaattacaatttttttttattgtgattaaaaataaaaaaatttataattagttacaacttttttatttttaatcacaaattttattgtnnntaaaaataaaattttttatagtgattaattaaaaaataatttttctaagtataccaaaaataaaaaataccctaggtaggattggaacaaaattggtgccaatatacactttattcaaaatatttaactttgttgaatttatttatttatttttgttttccaccacaatataatatatcctactttctttacacaccctataattactagtttagacctaatttacaatgagggctttgcccaatgaaaataccaaacaatatatttaataattaatttgatatcatcatcatcatcatcatcaaagctatattgcttattaactgaaagtttattatttaaaccctagggttttcgtacatatattgaataagatcatgtactaaggcagcttcccataattttcctaaaccatcatcatcataatcccattttatattttatcaatggagtttgaggttttcatcaagaaaacaacttttgtaaaaccatcatcaaaattatcatcatcaccacaaaccattgaattgtctggattggacagaatttcacctgccattctgaacactctcttcttttacaaaaataattcaaaatcagaaaaagatgaagaaagtgatgatggggatgatgttgaaagagtagttataagaggtcttgaaagggttttggtgagttggtttccagcagctgggagacttagaattaatgagaaaaaagggaataagcttgagatcaattgtaatgatgaaggggttcttttggtaattgcacacacttcttctaagcttcaagattttggtgatcatcaactccatcaatacaacccttcttatgagaaacttgttcctcactttcctcacaaccctccaaaaatatcacaaaatccactcgttgctttgcaggtttatataatactttaatttcttttcttaatttgattaattgccatttatatattgatattataagttctctgttatgttatatgttatataaatatatatatgcatgtgtgggtaacagcttatgatcatatctatatatgatatgcacgtttgcttatttgttaactaaaagaaaccctaaccctaaccctaaattatttgtgtatttattttatcaaaattaaatagaaactttgatatatggttgatagggcttagatctaccaataataatatatagcagtataaattagctaaaattatatatattcagcaatttgttttggggtgttatattaactttgaacaaagcaagaatgtcctatttcttttttcatatatatatttgttaattgtggtttacatctttatttgagtttgcttctcttacgggtttaatttggcttttgcattaattaataaacagcttttgctaatcttaattttaataagattattaattaattaatttattaatagtacaaaagatatatataaaacgtacgaacaaaagatatataaaatgtctataggtatgagcagacacgatcattaattttaattttctttatatatatacatcaaattattactcatccaaatatgtatatgtacaattaaagtaattatatattgttcagctgtttaattatatatttcattcatatatagtccatcaaattaaggcactacgccttaatttctgctccatatgccaccactacgaaaggtgcaaaaataaagcatat

SEQ ID NO: 29895 - DNA, 2019 bp, Cannabis sativa
ttattattttattaaatataaatagaaagtcacacccatgaatttctcataaaccaagaattcagttatatagacacactttatatagaatagatatacacttgcaaacaattgttccaaagcaatgtgtaattgattcttaaaggacctcaaatagcacattttttatttttttaacaataattctccacttaaatttttaaaaaatatttttatcaagcagtaatctaaacaatagcattaagcataaataaaagtatctttcaatttaaatatttacgtagtgaatacaactttttatatattagaatgactcataatcttgaattctatctctaacgatatacaacgcataacctttctatggtatattccaaaagtcatgtgttaatggtcatgcacggctatctcaatatagtgagcgctctaaaaaattttgcccaaaatttcataggaaacggtcccgctcccacattcacacaggtgagtctatcaagagtactcttgtagctcggtagtccactccacttgggctaaagaactcattaagaacatctattaactcggccttatttcgcttcaagaatttatacttcaattttgatataattatagcatgatctcatttttatcacttcataacttgttattatccattgaatcgattttttgggatctccagtctatagattgggttacccttatgagtgattcatcatctaaagacaatagtcccattcctttcgatagtttaaggcctttctctctagctaaacctttcttcaaaggatcaactaagttatcatcagtctatagattggtttacccttatgagtgatccactctaacagcacctgttaagaaaaactcttaaacaatattgtgcttacgacgtatttatctctcttaccattgtaattacggatttgaacttttgcaatagtcacaatactattgcgatggaccaacacagctggtataggtctcacccataaatgaaaataaactagcaggcttctcaaccaacttgcttcttcactggcagtagctagtccaatcatttcagactgcattgttggtttagccaaaatagtctgtttcttaaacttttataaaatagctctatcagctatgttaaagatatagccactagttgccttggagttatttgataaagtattccagtcagcatcatattgtacccttcaaggacagatggaaacttctgataatataatccaaggtttcatggttcttttaagttatctcatgaccctctaaatagcatatcaatgttctacactaggcttactggtaaacctacttaataatcccacgacataggcaatttcgagcctagtacaatcagtagcatatcggagattgctaataatgcttgcatatttggattattttatatcgtcactagtgttcttaaataattttacaccatgatcatagggtgtacaggcaggtttacaggtttacatgcagttaaataattttgggctggtcttttgttttaacaatagtctggccctgttttctccagttgttatagtgagatttttctcacctagaaactcgagattggactcctattaaaaagacacgtgtactcactttcctcgaggagagctgagatgacgatgaaagacctctcgagtacgaacctcgcctgaactagactcagcgagaggatgcaaatatgatcgagtctaatcgcattcgaatggctcgcgttatgtaggaccaaggagcggttctaaactcacatacgtcagggtatatgcgagtatcaccgtgatcctcctacaaaaacgtagagatcgattctctatgttacgagctggtcccattgacctaactgtcttgataaaccgatatagactcgcatgtcttagttctatcagcttgttataagatgtccatatatgcgactccgagaaggcgcagacatcctagactcgactagtctcaaacgcatcctaagcctgcgagcttatgcaagaatatgaa

SEQ ID NO: 29896 - DNA, 1775 bp, Cannabis sativa
tcttatattaggataacaagagcagccaaaggttttgaaactagtgtaatctggtgagatattaaaaagagtttcaataggtgatttatgtttaaggacaggtgtaggcagcttattatggatgtacacagctgtcctaaaagcttcatcccaaagccttaaaggcatggaagcttgggcaagcaacgtaagaccattttcaactatatgtctgtgtttacgttcatctaatctattttgttcatgtgtagtgggacatggatgtctacggattattcctgcttcttttagtgtattcgtaaatgacctatactcccaccccaatctatttgaaaaacctttacttttgtgccaagttgcaattcaaattgagctttaaaatgttggaatgtttttagtgcctcatctttggttttaggcatgtaaatccatgtaaacctagagtatgcatcaacaaaagtgaatgtaatatttatagccatttatagaggggatataagagggttccataaccaattctagtggcactgtgtatgttgtttgagaggtttttgggaatggaaatttatggattttgcctaaacaacaagctgaacacagagaattggaatttttatttgcattttcaacattacaagcatggagcatagactttacaaccttcttagaaggatgacagagcctgttgtgccaaatatcaaaatcaaacatatgatgtgtagtgtgaaaaggtgtagaatcagtatttgaagaggaaattgaggcagtagtagtgagagtttgtggtggcatatgctgtaaaagaaagtacctgttggaatcagttgatgaaatggaagagttcatcaagttagttgtgaagaatgaaaggaatacaggccattctggtatgtcccagtaagcagcaccttgtgatgaacccgatctttgacaagacaaacatcatgatgaaatttgaagaacacatagttattcatagtgaatttagacacactaaacaaatttttggttagtgtaggaacatgaagtaaattgctcaatatgagaggagaagtaataaatgaattagagagaaaataatgaccaatgtgcttgatagacaaacctgtaccttcactaacaaacagatgtttagacccttcataagtggaaattgaagccagattttgagcatctagggtacaatgattggtggccccaaaattggggtaccaattagtgtcattgtgactcaaagtgtgcatcagattagcttgagaagaaggggcattttagcacttaggggggaattcaagctctggtaccatattaggattgttaatccttctattcatagttgtaacaccaaagaaaccacaatggagaaacaaagaaagaggaagaagaaagagtaaagagaaagagaatctaaaagactagaaagagagagaaagaaaacaattgtcttgattattttgttcaagtgttcagaatatacaagagggtcatatttatatagacaatagtagcagagagaggaaaggaaataaactagagtaacatactaacagcaatccaactactctgtaactaccaataacgactttgtaactaactctgaacagaatgtccctaatacccaagaacaatacaaagtaaaaagatcaaaacctccaaacacaaattcgcaaagcaaaaggaaaatcaataaaaacattgcaaaaaacttgctatacatgattcaaagctacaggttcagagaagaaggaaaaggaagaactaattgattatttaga

SEQ ID NO: 29897 - DNA, 3270 bp, Cannabis sativa
ttcgtaggcatcctatttatcaaaaaagatgcagtaagagtagcatcaccccataaatatttaggaatttgcatataaaacttcatagtacgagctgtttctaacaaatgtctattttttcgttcagctacaccattctgttcaggtgtatgtggacaagtagactgatacaaaatacctttttctgtcaaatttttttcaagaattttattaaagtatttagttccattatcaattcgtaagatgctaatttttgtttgaactaagtttcaaccattttgtaaaaagctgaaaaaatttgctccacttcatttttttctttcatcaaataaaccaagcaaagacgagtatggtcgtctataaaagttacaactattttttttctagaaatagtggtgactttagatggtccccaaacatcactatgaaaaagattaaaaggtttggaagaataataaataattttagtataagatttacgttggcttttggccaataaacaactttcacattgaaaagacaaaggattaaactttttaaacaaagtgggaagctaatgttttaaataagaaaaactaggatgacctagcctataatgccaaattattatttgatcataaactatagaagaattgatgctactaagcccttgatcaattttattcttaaaaatattatcttcaaaataatggagaccatttatcatcctagcattgtcaattgtcttccccaaactctggtcttgaaaaggataataagattcatggaagattacacaacaattagaattccttgataatttactcacagacagaagattgcattaggaacatgaagaacaaatttgagatctgttctttcagataatcttataagaccttttcctacaataggtgagaaattaccatctacaatcctaacttttttatcacccaaacaaggtatatatgagtcaaacaaattagaagaatttttcatatgattagaagctccagaatcaactacccaaggagcataatttggaaagaaacaatttaaagcatttatttctttacctgattgggcaacagaaacattaggaataacagaagaggacgaagtggatttcagcaatgcatgaagttgagccatctgctccttagtgaaaggactagcctcgaattcatttgtagtagggttgtgactatttctttccgccttgctattccaatttgctggttttccatggattctccagcaggtttctcaagtatggcaaggtttattacagaaatcacaccaaacacggagtttctcatcaggttttggcagatgtggagtgtccttactgtagcctcctccaacaacaaaggttgatccttcaatagtagtgccaacaaccctttttctgagcataacactcctcctactctcctctcttctaaccttaaaaaaacttcgccaatagaaggtaagggccgccttccaataattctccccctcacctcatcaaactcaatagtgaaaccaaccaagaatttataaatctggggtttcttaattgttttcttatggtgtttgccatcttccacaaatttctattcataggtatcgaagagatccaagtctttccatattcgcttcagcgaattaaaatacttcgtaacgctatcctcgccttgctttatttctccaagtttaagagtcaattcgaatactttagagtggttttcgagatcagaatacatcttgataacattatcccatagttcctttgctataggatagcacaaataattcgagctgatatcctatcctcctccatggaattaacaagccatgccataaccatagaattttcagcatcccaagtgtcgtaagttggatctgcctctgttggagccttcttctcaccatttaaataccccatctttcctcgacctctcatatacatcttaactgattgataccatctcaaaaaattgtcaccattcagcgaataatggtgatttggacagagtgggattcaacagtggtagatttggctggaacaatagtggtctcagagggattgatttttatggtggctgactccctgctttcagacatggtgggattagagaaagggaagttgggcttagggtttagggttgtgtatttgctctgataccaagtcaacaaagaggttaatttctgtatattatttctcagaaaaatgtatgtatttaacatgtacaagaatcccttaaaggaaaaaaaatcaaataataataacagaataaaactcttaactataccctaaaaatatgcaacaataaattacaataactacacaagaataatactaaaaatagaatgatcttcctacacttgaattcttaatacaaaacgagtatatcatttatggcaagcaatttttcaccaacaccaggatcttattcttactcccagtgaacatgtgatatatacacaatcatcaaaagcttctatctcaaaaccaaatgagaatacttaatgaaaattgtgtaatcattgacgagaagcttacttgagtttatacatagatttttcttaatttgcaaattatattctttggatctttggatacaaaattttttggcggcacaacataattttttttgtcatcaatattaccattgataaatgacactttaataatctatttgatataactcaagaccataatgagcaatcagtatcatgcttgtcttaaaatagtctttcaattaaactaaaagaaagtctatttaaaatgaatatatgctttatgagtaattctttacatacaagacataaatgcatctctccatgttgcaattgtcatccctcttgattataaatatttatttataaccaagtagttttacaccatatagcaataggaaaaataccaaagctttattgtctcatatcaatttgtactccttatttatgatatcaatctaattttgagagttggatccttcatggcatgataaaagttggttggatcatcgtctatcattctattaatttcttatgtcatttctctcatagatttctgtaatgacacggatctttgaggttgttgagtttgattatctaaaatatttaccatatcttgaatggatagttgcttggtattgtcttatcaaggttctggattcacttattgatcaatgaaagtcatggaaacctaaacactgtcaaaagtgaaacctaaacaatgtcaaaggtgatagttggaattgagtttaacgtcaattctttctcaagaacaatatctataat

SEQ ID NO: 29898 - DNA, 2584 bp, Cannabis sativa
gtgttacaagttcaatcacacacctatctctaaaattccaaacaccagcacaagtaggtgtggtacgaggcgaccaattgttggctcgtgaatgttatcgcgtagaacttcaaaatagaagagccaaacatcaaataattgtggtcataatagaagaaggcgagaagaaagaagagaatctagaccctagaatccaagacaaaaataaccagttaaaaccaattgaagaacatgaaggggtcgtgttagatccagacaatcccactaaatgtttgtttattgggaaaaatatggatgaaaaactaaaatagcagttaattaactaactaaaggaaaacccggatcaattcgcctagagccattcaaacatgataggaattgaccctaaggtaatatgtcatcgtttaaatattgaccctaattacccagataaaagacaaaaacggcgacccttagactctgagagacaaggggcacttaaagaagaggttgaaaaattattgacaaatgacgttatacgcgaggctttttacctctcatggatttcaaatcctgttcttttcccgaaaccaaatggcacctggagagcttgtattgattattcaaacttaaataaggcatgtccaaaatattgattcccactaccaaggattgaccagctaatggatgtaactgcaagacacgagctaatgacattcatggacgcatattctggatataaccaggtcaaaaagcatgtccatgatcaagaacacacaagtttcgtaacaaatatgggactttattgttataaagtcatgccatttggtttaaaaaatattggggcaacatatcaacgactagtgaatgggatgttcaaaaagcaaattggatgaaatatggaagtctatgtcgatgatatatttgtaaagtcgataaaaagtgaagatcacacgaaggatctcgcagaatgctttgaattacttagaaaatataatatgaagcttcacccgaagaaatgctcttttggagtttcctcgggaaaatttcttggcttcatagtaaatgcgagacgaattgaagcttacccagaaaaaatgaaggccctaatggagatgcctttaccaacgaatccaaaagaagtctaggccttaacaggaagaatggaagcattaaacggattcatttcaaagtcagcagataaatgtctaccattctttaatgttttacgaggcaataagaagtttgaatggatagaagaatgcgaggaagcttttaaaggcataaagaaacatttatcaacacctctagttctggctaaaccaataattggagaaactttataacattatttagctgtctcggagaatgcaatcagtgcagccttggtgcaagaagagggaaagcaccataaacctatttactatgttagtaaaagattactaggggaagagtcaagatatccccctcttgaacaactttccttatgcctgattcatgaatctcgcaaactatggcctttatttctaggtgcatcccataaaagtcctaactgatcaaccattaagacaagttttatctaaacctaatgcttcacgaagattgataaaatgatcaatcgcgaacatcaatcaaaggccaagctttgatcgattttctaattgaagggataatctcataggaagatcaacttgtcaagcatgatactgaaacttggaaaatatatgtggatggagctttgaatgagaatggcttgagggcaggagtgataatgatgttgcctaataactttaaattcgactatgcgctaagattccaattcgatacttcaaacaacaaagcagaatatgaggctttgttggctggcttgagaatagccgaagctttaaaagttaagaaccttatatgttatattgactcacaatttaatgtgaatcaagttctaggttaatgccaggtgaaaggattgaagatggaaaatatttagagaaagtttgtaagaacttggaaaagtttgattattttaagattgaacaaattccaagagaacataactcaaatgtcaatgcactggcaaaattggcctcgcaaaatgaactcgataagttaaatctggtactggtcaaagttttgagcgacccaagtatatgtgaaaaggtagaagatgagatgatagatgccttgccaacatggatgacgcccatagtcgaatatctacttaatggggaacttcctacagacaaaaccgaggcacgcaaactcttatattcaatacctctccatataatagtcgagaaaaaaattatacatgagaggatattcgatgcctctcttacaatgtgtgttaccagcagaagctactgaaataattaaagaaatccacgagagctttggtggagattatgcaggttggaaaagtttatcaaagaaacttattcgtcaaggatactattggccaatgataaacaaagacatgcatgaatttctcaagaaatgcgacaagtgccagaggaattcgcatatacctcgcgtaccactaacagaattgagaatgatgacctcgccatacccatttgctgttgcaatttattttaccaggatctta

SEQ ID NO: 29899 - DNA, 2255 bp, Cannabis sativa
caataaaaatgtaaccattaaaacctcctcaatatatctcatgaataacgttaaattaaaattcatactatatataactacacagtatatccaaagtattatataagaaatatttctctcaaaaaaaaaatataagaaatattaaagaattttttttatttataatttatatattgataagcaaacaagttttattttttacttgaattaacttggcacacatttcacctaagactattatatatataataatataaaattaattaagaatattctattaataattgtatattctattttcgtgagaataggaaagtttgatttgaaatattttaaaagagttaaaaaaaaaatcacccaataatttctcataaatcaagagttttgttatgtaagtgttaagacagagtatttacccagtaaaacagaggattagtgttaattattttcagcctttactttgttacttttactgtttgtccttagtgtaacaacttctgttttgccttttttgttttcctcactatgtacggcgccacctggcacacctttatgctgctgttatgattggagccgttaggccctttattctataaatgcatctttcctcctcagtctctaattgagctgagaaaatactttctacactttctctattttctgacttagtatcagagaagtagaggcttgcgccatgtctactggagaaaatcaaactcctcgcagaggaggccaaaatcctggtgttgcaggagtcactgaccagcaagccggaagccctggtcatctcagcccccctcatgtcacaaacggtggctctcaatctaaagctcattttggatctggaggcttcaacaatattccatttggtaacactcttactcaaccgttttccattaaacttgatcgtaataactacactttgtggagaaatctggtgtcaactataatcagggggcacagacttgaaagcttcacgaatggcacaagaccatgtccacccgagttcatccctgctgtagcaagtggtgataatacacctggttttgggttacagcccaacccagattatgagaattggatcatttgtgatcaattactcatgggatggctctatggatctatgactgaggtcattgctactgaagtaatgggatgtacttcagcacgctcactctgggttgctttggaaaacttgtatggtgctcactctcgggccaagatggacgatactcgaaccaagatccaaactatcagaaaaggaggcacttcaatggctgattaccttgacaaaaaatagcttgggctgatagtttggccttagctggagatccctactctgaagctcacttaattgctaatgttttaagtggtcttgatgcagaataccttactatagtttgaagctcacttaattgctaatgttttaagtggtctcgatgtagaataccttactatagtttctcaactcgaagctcaagccaaatatctctctcttggcaagaaatgcaagaaactcttctgagttttgacagtaaattggaacggctgaatatttttttctacaaatggcaaaaaataacactccaagtgctggtggtccttcagctgctcttgctaatagacaaccccactatccatcaggcagaggcaattacaacaatcatggtcgaggaggaaggagttagaacttcaacaacaatgctggtggaagaggcagtgcccctagtagaggccgtggcagggggaggaacactaaacccacctgtcaagtctgtggtcgatacggtcactcagctgcctactgctacaactgatatgatgaaaactttatgggatctgcaccaaataattccagcaacaacagtcaagacaagaaggatccaagtgcttatatagccacaccagaagtagttgaccatgaaggctggtatgcagactcaggagcaagcaatcacctcacggctgaccaagataacatgtccaacaaagcctcctacagtggtaaggataaactcacagttggagatggtaatcaactgtctatctctcatgttggttcttcaatcttacaatctgattgtggtaacttgctgttattaaatgatgttctacatgtccccaaaattactaagaatctcatcagtatttccaaacttactgctgataataaagtatttgttgagttttactctgatgtgtgttttgtgaaggacatggcaacaaagaaggtggtgctgcaggggagacttaag

SEQ ID NO: 29900 - DNA, 7748 bp, Cannabis sativa
caatccaatccaatccgtgcaagtacagatatccgcattttgtggattggattggattagatcgtgcggattggattggatcggctacttagtgaacacccctaagattgattctctgtatatataatttgttgattaaatttttcaatacaaataaaataataaaatttctaaatagaattaagtaaatatacattgaatgttactattatctgtgtatatagcttttagctaggcggtttaaaaaaaaaaaaaacattcatagtgtatacatgcatatcaattaattatcaacaaaaagagaaaagtaattaatagcaagctaaagtaaagccaaacccaaaaatagtcttttcttacaaggttttttcagtcttgaacagttgatgagtgagttagatgaagaaaagaaattggtagcaaattactgcatgcatcatacctttatgcaattttctaccagaaacacaaatttttttgtgcaatttcttttaattaacttgatgaggatgatggagtcttttttcttttttcttttcaaatcaaagcttagtgtcataagttgtatttgatagtaaagtaatgggtgtcagaagcagcataccaaaataacaaggttgagagtgataataacaatgagaagaagagaataaaggcagatgaagttgatacagggacacttctacttccatttccagacatctcatctgtatagtcaggccctgatcccaaaccacttgttccaccatttggtcctgtgctccacattcccacattgttgtccctgtaaattcattcattaattattcacatctttaattattaatattttccattaataagtaatgatatcatgtacatgcagaatattgcattcaaattctaaatattgaaaaatgctaattaaagataaatggtataataccatttaaggtaaatatgataatgttattagtgtgatttaattaaaacttaggtaatatattttaatttaataattattataaaaactaaaataatttgcggtgaaaattttttttggtttaatttttatacacttaattcctttatcttgtttttttagaccactaaaatttatttttctttacaaatttgaaacgacagttaaatattaccgttaaatatattaattagatgaccactatatacacctatgtatatctaacagtaaaaccttaaagtcgataccgtagtcatccagttagaatttaacggtaatatttaactgacaccttaaatttataaagaaaactaaatttaaagaagttttgcccaaaaaaaaaaaaaattaaactagtgtataaagtttcgcctcaaattcctctaaaaactactaaaccgcttataatgcatcatccaatggtgatgcacaaatcgttattcatcaataaaagcaatcagattaaatcaagtagtacgactaagaaagttcttattagatctcacatatctaaatattgtcattatttagtgactaaacataaattgaaatgatacattgaaattagacaaaaactcttattaatttatgttaataactatccagataggattatttaatggaaatattggcaagtggatcctaactagaatttgtattagggttataaatagtgaagaatcactagtagaaaaaacattatgagacaaatagtaacagtgatgtcaccaaaggtgacgacaaattatatatgttttgctttcaagaaagggactggatacgactaatgagtacatgttcatatgtagtccaaccatataaaattattggaggatctcatcatcagccagcctagcatgcatccaacttttggtttgaaaattttatctcttatatatataccctatatactactacttactactgtttatatatttatagggatattaatcaaagaaaggaagaaaaagtaattcataatggaaaataaaatcaaagaaagaaaaagtgatgaggaaaaaaaatgcattagtatatatatatacctgctaccaactccaagtggaccagcatgtaatgtgagcatatcgataagcacagctgatttaggctccacactataagccttctcatacttaacctcaacgccttcacctgaggccacaaagtatgcaccattcaccattatatctccttctgatctccaattccagctcctccattctccttcgccagtctctactctctttgttacctgaacccaattcaaccactcaaattagtcatactcaaaataaaaattaagaatataattaaatatacttgtattatacataatattaacctagtatactcaaaataaaaattaagaatataattaaatatacttgtattatacataatattaacctagtatactgtcactttcgagcaccttcaattgtagtatttttttaaaaatattaaaaatttccatatcatctaaaaatataatattttattttatctctttttcacatcatcttttatacttttaactctaaaaacactccaattgtacacccttcaagaatcatataattatgatttcattcattattatttaatatattatttgttttaattataaatattagcacagtacttattatttttatttttattatatattttttttaaataaagatagtatatcatgtaatagtatcaacacaattttttatgataatacttatttatttttaatggtatagtatttttatattttgccaaataaataaccgtaaacatccttcaaaatttaactattggatgctcatacttgtcataattaaattttattttatatttagcaaatataaaaactattatatctttagtgaacttttatgaaataatattgtcagtaaatttaatattttgggatgacaatttttgtaaatatcaaaatgttcgtatttttcagttttattattattattatttttttatattattattgtgtgctaatttaattttattattattaccacatttattattaaaattttactaataataaaaattaaagaaataaattttgatatttgccttaagaatcctttatcgattttgctaataattttagtgttatgtggactaattttgctatgtgaatgtgatttgtggagaacatttgctgttatcatagttttataatctaaatttttaaaaaattacgagggcccttgtccctttgtgtgtttaccataagaatcctatatcgattttgtgtgtatttgccttgtcccatcggttgtgtgtgtagatttttttggagtatttaaattaattcaaaccgtgaaaccggataccatttgttaataacctgtgatgtattccgtatagattgttacagtaaagttgtttagctattttctcttcttatttttcacttttgctaatctacgtttctaaatttattcagaaaaaaaaaaaaaaaagaaaggtagatatatataaatattaagtaaaggggtgaaattaaaaaacctccttggcattgcggtcaataggcgcagtgtagcggttgccctggctattaatggtggggtttccgctaccgccgatggcgtacatctcccaacgagtgaaatcattattaacgacgtggatgtagccacgtcgacagcgaggcatgcgctgaacgaggttctcgccgaagtggttgaaggcaatggtgacttgcatgcctgagtcgggagtgtaatcatcgctgtggccgagcagcatgacctcgttgtggtgggagaagaggttgtttgaaatggtgattcctgttgaacccatcactgcgtctattaacccatccttacagtgtgagagtgagcagtggtcgatccatatgtcctttgccccaaatatggagattccatcaccgtctgattctgttctgtatccgtagtgtgatgggctcgaccgcacattcgcattccctatgtatacatatatatatacatacaaattcggtcacattagaatttaatactgattcttgtgcctatggtgttccgtgtttctattggaaaattttcaattaattttacgacctgtattgtagctggtgggaaatgggtaaaggacgaccaccagtacgaccatttatgtgtaacaatataaatgtgtacgtcacaatattaaattcttgtaataagggaagagactcaggttggttttggtcaggttacttttatgtattccaaaaataataatgatatatactcaattcgcaaatatatgcttttttttatgttattaaacttaatcaacacaagtatgattaaaaatggaataattagcatttttctcggtgaattttttatactactaaaattgcttcttacatctaattatactccacaaaatataattttttacagtatacactattagtctttctatcacattttatttaattttattgtaaaataagtaatagcaaaagagaattgataaattgatacaaattaattacttgcaatgtagaaaagctgaaaaatatttaatttgtatctatttattaactaccatatttcatgacaaaatattgaaaaaacaataataattatgattatgaaaagttatatatggtatatattaaccccaacaacaaccggtataattaccgttgtgttggtaaaagatgagtgtccctatcactaacactactcttaaaaaaatggtgttttgtgtccaataataagattgtgtttggtaggaaagaaaaaaataggatggttgaagactagaatagagaaagagattaagaatgatgaagattgaagatgatagtaactcttttggtattttgagtaaagttgaaaagataaagagaaagttattaaaattaacatataatttgttttaagtatttgttattttttaaaggataatgtggtatttagtatttagtattttttttttaatttctctttttcataaatcctttcaatagtggagggatcaattttttgagatttggagggatctcccctttctccctccatttatcctcgccctccctttattcttttactaaataatagattccacctccacctttactctcttctcccacccctctcaatctacccatccctatcaaacatagtgtaagtgccatattatttaatatcactaaacacaaaagtaaaacaaaaaataagtctaaagtataaacctaatcaagtagagaatgtagagtgtggagtttttttataatgactggagttaaataggctaggatccgtgtattgaaagggagttaaataaagttcttcaaatattcaacttgtcagaattacatctcctttccgggtgattttcattattaaagctaaactatttaacaataattatcaaagttaatcatgcaatgttgggaccggtcggtatctttaaagtgtagctatgcacatatgttttaactttatagccatattatgtagtgaataaatacataacatatatacatacacacttttattctctttgtaattatctaatttcacatgtagcagatctagaaaacctctcttttcctcgaggaggagcttatactttacaaaagaataatactaccaagaccaagaaagaaataataaggaattaaaaataactaaactaatagtaaaactaataagtaagttgagctatatagaatattgtataatgtacctgaaacatgacaatgatgaatatgaatattgtgtataatgacattgcttatatactgcagagtaatgcaaccaccaccaacaatgtgtacgttagctcctctcccatccaaagttttgtagctattaaagatgagctcttgggacagctttataagcatgttctgtgggaacacaatccacagtggctccgtctgaatgacggcataccgaagcgtcccgggcttcgggttgacagcatcgtcgtcagagctatcggtgacaatgtagtacttgccacctttacctccgacggcatattgtccaaacccgattgcgcaatcggcaaggcgctgccggttgttgggccagtccgggtcgcatttccaacaatcatctataggattaccggttaggcatgaagaatatgttgatgaggattggtctcttaaggatgtttgtagcatttcccttcttgctatggatgcatttactttcctgtaaaacagtgaaaaagataaatgttgagaaatacataacactgtatgttaagaaaaagaaatgataacgtggaaagtagagagaaaacaacaggggtctctgttttcaatacctgtgaacatcatgaacaacctgttcaggaaagggatgctggccgggaagagtgaggttaaggtatgcagcaccaaggtatgagaatgagctcagaataagagagattattacaacaatgcaggttctttgaaccatctttgaagttgcctactagtgagtgagtgagaatagtagtatatatttaaaaagttcacactacgtagtaagaaaaatttcagggtgttttctagtactttttaatgcttctaaaaattggagttaagaaagtaattagaatgggatgaatttgagcttcttcttctatgagtagtgatttagtggagaagatagtagctttgtagtttgtactacatagaactcaccacgctcttctctcactactaatctattttcttcttactgtgcttataagcattatcaatatcatttctagtctttatttataatcattgtaacggacttttcatatattcacttaacgaggtaaaagtataaagaaagggagagagaatggagaagtgatcccgcctgctctagggaaatggcctctctaatgacctcttttttgggtaatggtaggtttgtttataataggacaatttaaatgaccgaaataccattggggtttttttaataggacgtagtatatgatgacatggcagtatcccattaggccgatttctactaagctcttgtcatatggaggctcagagggtaggtaaggaaataaagttacccgttgtgctgatataaatttttgacttttttgacttagcaacagtataaagctttagctactatagtctgaagttaaccacactggtggttaatttgtagaaatttgttcagtgtaatttaagagctcgttgggttattggttttacaaaataattagaatgtctttttcttttgcttttggtgattatatttaaggcgaattgagtcccttttcatatgcttttgaaaaaaccagtatatctaattagttagatggtcctacgtatagaatccagtttcccacgtacatacaatatacgtaggcctagctcagtaaccaatggaaatggcatggtgcttctctcctatcggcctgagaatccggggaacaaactgtcagttatttcatcatttatatttccctacctcctttttcaaccctaatgccccactcagaatttcatttaaaaatcattcagctgcattgatagggtataatgatccagtttactaattatacttatattttaaagataaatttgtggcaaaatcatggtagagtatattccaatagtaaaaatttagaggatgtttgtggacatattagagcatatgtaatggtaatattttggagaatgcttgatgaggtagaaagcttagggggcaaaatatagatatgttatattgcagaaaaaaaatgttattcttgaaatttgcattgatgtctggcattgatgctatgtttttttatacaataaaaa

SEQ ID NO: 29901 - DNA, 2282 bp, Cannabis sativa
  modified_base (1693)..(1701): a, c, t, g, unknown or other
ttaaatagaaatttatttctttaaataaaaatatatttccttaaataaaatattcttataataactatatacccaaggtatcctggaacaacaaacactaactaaacttctcgatatcaccaatatcacagctaatatcgttgtgatatttctcaccaccagtcgggttttcatagttatcggacctgaaaatatttttatttcataaaaagcatgtatattacccatgtattttaataaaatattcataattaataaattacgtttatttatttaattacattaaaatctctaattaccacgtaattagattaataagatcataatcttatccattaaactatttataaatccatattttataaaatatgccttaattatttataactaaatttttgagatattacataggtactgctggtatcttttaatatttttcattatttaataggtaagaatataatataatttcatgaggcaaaaattaaaatataagttaaaaatataaattgaaacgtctattgaatattgagaaatattaaggtgtcaagcacaagtgacatacatgtatttgcagtgtaatttattattggactccatacattatgattaaataaataatatgagaaatcactatatacttataaggagctatatgagtatgttattgggcatgttaatgtacctaataaaatattggttgtataggaaatatacttatgatgtgccctcattatttacacatgagaaagaaaatattgttattagatgtggtggtgctttgtgaatggttagtaattatacataggctatttaaaaattttacctccaaactattataattaccaaatcatgcttttaattttttttttgttccttaaaagttcctctcatgctattcacaatattgtaatatagggtcattttggcacaatcgtattacggtgaaaaacagttgtagctgtcttatgagaaaaagtagctacaacaaaactgtagaaaaaaactaagctaaatgtttgataaattataaatttcaaagtacaatgagttattaagattttttatagtgctaatgataatgttataatctagtttattataatcacaagtatataaaacttattttatgtaatattttaattttttttatatatttttaaattattttttcaagtatacatttatatacatttgataaaaataatttatagtatttttatattatattttatctaatgtaaaaaaacatcaaaaactcaagtatataagaaaaactctaagttaatcaagtttattaatattaaaataaaatatataatataaatattattttttaaaaaagatatttaattattatttattttattgtaattaatttattttaaatatttttatttttctaatatataataaataagtaattacagttttagtacaaataaatttattatagtcttttaattaaaataatttttattaaaagttgggctataccaattttagcttttacagtagaacatctatctaagaatacttttgggactaagtaatttatattctaattgagaggttataactaaatcgagttacactaaatttttttcttcataatatcaaaaaatatcaatgtaactgcaatgacattaaacaatccttaatactatattataatagaattatttttgagtannnnnnnnntttatacatgtattataatttagaataaaattactaattctacataaataattttataaaatatatgtatatattttattaatatgtaattattcttatatagatgtatactttgttaatacgggacttaaaaattgtataactaattataatatagaggttattcttatttataataggtccaaattggtacttgaatttttttataacaaattagagttattattgaataaggtattcttaaatagaggttctactgtagttgtaatttttttataaattcttcaaaagaatttattttttaactgcttaccaaatacattttttaatcacagatttttcaaaaagtactttttaactttttcaaaaagtgtgcaaacggactcataacatttttgttaagtttcatctcatgtgactaaccaattgtgaagctcaacaaaaatcatatattttttagcatggtaaataatttgggagaatttttaacaagtaaaaaaattcagttaaaataatttagtggttttaatagctagaaagataaaaatcacaaacaaccaaataaaaatacacatttattg

SEQ ID NO: 29902 - DNA, 3691 bp, Cannabis sativa
tgtaatattttggcatttaacaaatattaaataaattctatatctatatatggtatttctttgtaatttgtgtattttattttgttttccatatgatctgctttaaactctccagctggcattcgtgatgtctaaggaaaatttataggataaattttactttgatagaggattaacaatattgacatatcaagattttatctccataaagaatttcgttatttaatgatttttctaaggaatatatttgatgatttctctttgtttttagacctttggagtttgtttttgagtatcatttatccttatcaatatcacataaacaagcagcaaaaggttgaactcttccactcattaatttcttatatttttagaagagagtgtttcttttgtaaatgatatttgttttgctatttcttggtgagtttgtgtgtctttgtgattacttttgggtgaagtaaattccaaagtgaagaatgtgaagaacaaccttcgagagagggcttatcttaagtcttgcattgtgaggaagcaagcaccactatctccacgagactatttctacaagtcttgcatcaagagaatgcaagcactgctatcaatgggagaagatttctaaaggtccacacggtgaaataaaactttgttattgaatattgaatctgatacacggtgaccttatataggcaagttacaatgactaagctccacacttaacaatctatctaattctacttaagagtataacagaaataactaacttcagtgaaatgagaataatagactaatctaatagcccccctcaatatggagtgtagatatttatcacacccatcttggatacaatgttggagaatagaggttgtagtaagggttgagtgaagatgtcttctaagttctgctatgaagaaacgtgtagaagttggataaatccttgctgaattttctctcgaatgaagtggcagtcgatttccacgtgcttcgtgcattcatgatatacttggttttcattgatgtgtattgcattagtgttatcatggtaaagattggctggtttgctgtgggagacaccaaaatctttgagaagagcaaggagcctggttaaatcagaggtggcattagccatggcgcaatactcagcttcagtagaggaccgagaaactacttgctatttttttcccatgagacaagtgacttgcccagaaaaatgcagtagcttgagattgaacgacgagtatcttgacagctgccctagtctgcatcagcaaagaaagaaacctgacattggcttgagataagttagtttcagcaaaggcattgaggtcggggctacattagatggggaaaaaagaccttggccaaggggttttttgaggtactgtagtattctgtttgtgcctgcatatgtggaactcaaggacatgataagaattggctaaggtgattgacagcgtatgttatatcgagtctagtgatggtgaggtaaatgagtttgccaattagactacgatagacagtgggatcaggcaggagattccctttgtctttattgagtttgaggttgtgttccataggtttggaagtaagttttgcacctatgtaacctttatctttgagcatttataaggtcaaaggcctttgagaaatggaaatgccttattttgttcgaccaatctcaaggtcgaggaagaatcaaagttgtcccaagtccttgagtttaaacttagtgtgtagatttttttttgaaggtggagatagctaactcattgttgctggcacaacaatcatgtgtcatcaatagattaggatggccataaaaatggatgtgtccttatgataaataaggagttatctgacatggattgagtgaagccatcttcaagcaatgttgagctaagttttgcataccattgccttgaagcttgtttgaggttgtatatgcttttatttagcttgcatactgtatttgggggagcaatgtatccagggtgtatcttcatgtatacttcctccaaaagatcccgatgaaggaaggtattatttatgtctaattggtgtgcggtccaattgttgatggcaattaaggcccaaaaaacttttaaagtgttgaattttgcaacatgtgcatatgtttgtgagaaatcaattccttgtttctagttgtatcctttcgccactagacgggctttgatttgatcaacttcaccagcttagttatacatgactttgtatacccatttgtaaccaattactttgtggcctggaggtaacttggttatgatccaagttttgtttttttgtttttttgtaaggcttgtgtttcattttccatggcttggagccagtgtttgaactgtgaagcctcaacatagttttgtggatcaatatgagtgtatgctgcaaggacaacaactctaaattatggatggagcttgatataggacaagaaaggttctacgggatgtgcagtggaggccacatgacatacatagtcttgtaaatggactggtttggtgacttgtcaacctgttttggtggtgtggggtttattgaccagattgggagggggaattgagggtgtcgatgttggatcattcttattggatgttggtattactggtttttgacttgggagaataggttgagacaaacaattatcattttcggatggtaatgttgtggaaagaaaaggaaagatgttttcatggaatatgacatcacaagatatgtatatttgtttggactcaatgtcaaggagtttataggctttcattcctaaggggtaaccaatgaaaatggaggcacaacttcttggagaaaacttatgtcgtttagaatccaaggttgagccataggccaaacatccaaatgatctaaggtgatcataattgggggttttttgtgtaacaatgcaaaggaggtactgtcgttgagtaatgtagaaggggtgcggttgagtaagtatgtggttgttgcaatgagatatggctaataaaccagtgagagattggattgtaaacccaatgatggagccacatttagaatgtgttggtgtttcctttcaaccactgagttttgttggggtctttcaatacaagaatgataatgtatcacacctttggatgcataaaataaagtgagatttaattccttggctttatcagatcgtacagctttaatggattgtgagaattgtgtacatatcatggtgaaaaaatcttgtataactatttgaacttcaaatttcatttttatcttgtaggtccaagtgaaccgagatttatcatcaaaaattattaagaagtatttatagccttctatacttgtgactgtaaagggtccccaaatgtccatgtggattaagtcaaagatgttcattgcaaaattgttattagaaatataagggagtttcttttgttttgctaaatgacatatatgacgatgagtagaattgatagcaattgaagagccaatctttttattaaaaacattggaaatgtacaattgatgggtggccaaggcgatcatgccattgatctacatttgttttatggaaaactaaagtttattaactagtggcagcaataggagtatcctaatgtatgaggtacaacttctcatgtcgtttagctgtcccaatcaccacactctcagaaggatcctgtataacacaagtattggctttaaagaa

SEQ ID NO: 29903 - DNA, 1499 bp, Cannabis sativa
actaccatttcaactagcaattcagcaagaaattggaagcaagttgttagttaggaacaagatatagttcctcacctcctttctttaaattttaagactaagttaggtttcagtgtgtgttttggtaagctcagttctataaggcttttgagttgttataaactattttaaaagtttattttaaggttgttgttggtgtttttgatggctgtagtgaggttgagctgagtttgcatttatgaactcaaatttagctcaacagtagtgattttagttttagagctttgatcatgcgatttttagttgaattatattcattgtgatgttattgggtgttctggaaggtttggtaagatttgagatagaattgagtgagaagaatcgaggtttgtgattttttctaggaaacggttagttgattctgttgaaacggttaaccgtttggtctggcacgaccccaataaatagtgaactgtttggggatcagtggaccaaatgtggtagtttttgggtaactctatttccatgtttttatcaatatttagggtattgatatgctatttatcaatagggaaacttttggtttcaagtttagttccctgaaagtgttttagtaagacacttacctattttatgtaaatgtgacttagggcctttgatcgttcaacaacatattccactcaggttgaccggcacacctgattatgaagtagaggtaagattagtataaaagatgcatatttatacatgtttaatgcatgcactatgaaatataagttggttctaccaacactattacttttagagtactgagtgcatgtgttatagtgacttaaactaaccctatcaacactagtaccttcggggtactgagtgcatgtgatataaaggttagttgaattattagaaaatataaattattcctaccaactttagtacattcaaggtactgagtgtatgtggcatggtatactttcaatggggtacgacctagtgctatcaacactagtacttgtgtgatacttagtgcatgtggtatagaggtcatactattgtcaagaacatttgagactcattaatacgtgtcagacgcatgttggatttatgaataggtgtacggatacctaggatgcaaatcagattatatgttatgttttatgcttttcttattgagtttgtcgactcatggatatactttcatgtgtaggtaaaggccagagctgaactgtaaggtccagggcttcataaagattgtacatatcaagatggttagacttagagagtttggttcttcaggatagcatgggctcaattatattagtcgttgggcgacacttttggttattgtattttggatgtgtttgtaaaatgaaacgggatccagacatctgtaaacttttgtaactttataattagtaaagtttatatttattacaaagtttttgttaatcacctttttaactaaacccctttaattagcaagggttagcacataaatt

SEQ ID NO: 29904 - DNA, 950 bp, Cannabis sativa
aaatcttaaaacttaaaaatataattcttttaggaaaaaaactgtattttatgttattctcccaattttttatcttttttctcttcttctcactttttttcaactaaacaagcatttttttttctctccagttttccttctaagcttttctttccactcccttttatcccctaccaaacatagagtaaaactaaaatagagcagaaggctcctgtaaacctctagttaagcacttagtttggctgaaaaggcttaaacacagccaatgacactcatgatacccattacccaatacaactaaatatatatttaatttatttattgacaagaaaaaaaacttcacttatggaatagaaaatgtcaaaataactatgtcagataataacccctaaaaatagcagataaaaattaggtcttaaaacaaagacaaaacacacaagttggacagagaaaacaaaacaactctagtaagctaactaacgaaacataaactaaggacaaatttattagggatatttaattttttatgctcaagtactgtaaataattaaacagttctccaagtatgaaaaattacaaatttatgctaataattctcttaattcttgaaatacccctctacaattatgttttgaggagagaaacaattaagagaatcattagcctaagtaattgaagaattctttaattatttagaacacttttttactaacgtgtttacttcattttcattgtgtaatgtatttgggttaaggttttacgtgttgaagatttgagaatttttccttcttatactaaatttggaattcaaattgagagagataaattaaataagtatggtcactagaaatgcatacgagtgctctcatcttcattctcgttaaaaattttaattcacattcccacttattttttattggagatgtggcagaaaatctcctaataggaac

SEQ ID NO: 29905 - DNA, 4490 bp, Cannabis sativa
ccttttctctctttggtaatttcagaatctcagagtgcttttcttcaatcacgacttattacggacaatgtcttggttgcttttgagcttctccattcattaaagcatttaaaaaggggtaaagaaggttatgctgccatgaagcttgatatgagtaaagcctttaatagggtggaatggcattttattcagaatattatgactactatgggttttgcttctttaattgtggatctcattcttcgatgcatcagcagcgtcacttactccttttcagccaatggctctactcaaggtcatgttattccaatcagtggtattcgacaaggtgatccgttgtctccctttctctttataatctgtgtagaaggtctttcaagattatttcagggtgaagaaaatggtggcaaccttcaaggtcttcgaatagctcgcgaagctcctatggtatctcatttactttttgtcgatgatagccttgttctttgtagagcaaataaaaggccagcaatggtgatcaagcgttccttggattattactgccgtgcatcaggtcaatgccttaatccagagaagttagtactctccttctcgcctaatacactaccagccatccaatccaactttcaacagattttacaaatggcaatacagccttgtcatgaaagatatttgggtctttcctcctattcgggtagggataagaaggtattatttggtgaaatcaaagacaagttatggaatctcctctcatcttggcaagaaaagttattttcaattggtggcaaggaagtcttactcaaagaggttgagcaagctataccaacttatgccatgagttgtttttcagctttccaaatctcttattaaccaaatagaggttatatgcaacaacttctgggggggatctaactcatcgtcttcaggcattaattgaaaaacttggaaagctctcactcattcgaaagttgaaggagggttgggttctaagagttttgtccatttcgaccaggcccttttgccaaagcaagcatggctaatcttttccaatccaaattcactcatccaccgaatactcaagccaagatacttcaagcattcctctttccttgatgccgatttaggttcatacccttccttaacttggagaggcattgtttggggtaaagaattgctttcaaaaggacttcgatggaaggttggtaatggtgaaaaaaatttttgtgcatctgacccttagctgccaggtattacttcttttcaacctctacaattcacaggtcaagataccacaatgaaagtatgagatctcatcttaaattgtcaacaatgggatcatgacttaattgacagcctgtttcttccttcagatgttgctaagattcaaaggattccattaactttaactaaacatcatgatactttgacatggcatcatgaagctactggtgtttatacagttaaatctggttattcactagcaacaaaacttgaagaacaacaacctacaactagcggaatacaagctcaataatggttgaaaaaattttggggattgaaaattccttcaaaaatttgtatcttcttgtggcgagccattcacgattgccttcctgtagcgaacattcttcacacttggcatatatcagattttggtttatgctctttatgcaatagagcaaatgagacaacattccatgctttattttactgtaagcgtgccaaacgagtgtggcattgttcggactttgaaataaagctgtcatctctcagcacatgaacctgaaggaactatttcttcatatatccactgaatggtcctccttaaaaattgagcagtttgcaacaatcctttggagcatttggactaaaagaaataaagagagacatggtaccaaaccaaaaccacatgatgtctttctatattatgctctctcttttatagaagattaccatgctgccagcaccaacaaacctgctgcttcttctgcaccagcagcagtctctcgggttgttgactggatgaatcctccttcaggccgcctcaaattgaacacatatgcagccatcgacacaatgaatcgaatttcaggtcttggagcagatctaaggaatagttctagacaaattattgctaccatgtccactcctttttgtggatgcttcacaccaggtattacagaagctttagctcttatgcatagtcttcaatggattaaagacttacaactgccagtacactacatcgaaacaaattcgcttatggtggttaaaggtttaaattcgtctaaagagcttgtttctgattttcattgtttgttgaataacatttctcttttagtttccaatttccctgaagcacagatctcacatgttaatagatctgctaataatgctgcgcatttgttggcacaatttactctctcggtggatactaaatgttcatgggtggaggaaatacctcctcctctattacctattgtattttaactcttgtacttttaatataatagcattttcttaaaaaaagaaaatatttcctttttcttagtttctctttttcttaatttcttaatattcaattcttgtatgtgtataaataaaaaatcacccgttgaaataaaacactaaaaaaattgtcatctcttctttattttctttctctaaattataatatattatataataaaaatggtataatagtgtattattagaacaaaacaaacaaagttgtcaaaaaaaaaaaaaacaataaatgctggaaaagctagcatacgaaaagataccctttcatgcaaagcaacgcgtgtaccttataacaagtgtcggtgtgttacgaagtgacctagcacaccgcaactactaccactgcattatcaatttgttttcttgttcgacacatcacaacattagccatggtgttcgatattgtatgtagtattagtttagcatataatacgatggtaaattccaaaaaccattcgctttctttaattattatattaaattaattcattattaatgcacaccgtccactatagttagattctacctatagttttcttctacaagctagagtactacatgtttataagaaaacccaccccaatagctaaacttaatatatagctcattattaacctctagaatactaggacaagatcctaacatatagcggccggtttggttggtttctaacttggatgataattaattgtaaattgtaattaagattaagagagaataatattatgggttcagctactagatcagcttgggttgtggcagcaagtattggagcagtagttgaggcattgaaagaccaattgggagtttgtagatggaactttgttataagatcattccatagccaggcgaagaccaatataagatcattctctcaggccaacaaactctctcctcactcttctcttgctctctcccaattcttaagtactaaatcagatgacactttgaaacagtctgaagattccatgcgaaaagtcatgtacttcaactgttggggctagctacttattaatttctacttaaaaccataattattaaatagtatgttcatgtaaccatgttgagccccaaaagcctcttcttacatgatgttgaattgttgacatatcaatcccatatgtttcttatatgtttatgacgtgtttgcctatataaatataaatatattattttaaaagaaaatataaatatatctttatctatattaaaaaagattatataacagaattttatttagcattctcatgtttttctattctatcaaattttaatagaatacatttttgtttatttgacagaattttcatatagttaactttgaaataaattacttttgatccataacggtaaccttaatatgaattcagctatttagaaacataaattcctttaaacctataacatttttgttgatatgcgattgcgattggagatgactcctacgcgaaaggactatcgtattcttaatcttggatttcgtcaatcttccaattgagattttgtttgttcactggatatttctcaattaatttcagtttttggatggagataccgctctccaatcgattttctttattgattctctttacaccaagagtagtcttgataaggtgatctcttagagtcgagcactttcgagtcatagaaggttaactttggagggatccttagccttgcgtgagttagaaaatttcgggatggaagtttaaaatttaataacttgaatctaattcattatatttcaatattctgcaccgacatatgtaacaacctaatgcatggatgcgtgagctaaaattgtacgaacttgcaatttagaagccaatcttactactacaacaattgttttttgcttcaatttttattaggcatggcaaaaagatccattcattcggatcggatcagtgatccgatccgacagatcattactgatccgaaacattcggatagttattggatct

SEQ ID NO: 29906 - DNA, 2671 bp, Cannabis sativa
aatataatttacttggtcccaaatgtattcttggatagaggttctactgtaatatcataccaatgtagagatagatggtatctgacgatcctaacaagtggtatcggagccagattccaaaactatccatgtgaatgaatcctcggattgccaaataaagaaggtgaagcttgctgttagagtcgtcaaaggttcaaatctaatttgaagggattttgaatctagttggtgaatggattcatctatcttactcaaggggatcattagtgttggaatcgagggatttaggtatttcaagggattttgaatctagctagtgaagggattcatctagcttactcaaggggatcttaaatgttggaattgagggatttaggtttagatctgtaatcttttgaggggaggcaatgttgtcctttgtttgaggggaggactgttgggtgtacaaccaaagtcccacattagctagaaatggaaaggatcttgggtatataaggatggacactatctccattagaataagaccctttgggaatgtgcacaaaaacaaatcagtaagggcttaggcccaaagcagacaatatcataccaatgtggaagatagatgttgtctgactgtccttacaagatcaaaaatttgagtcgtgcatcttcttcgtcttcatcaaaaattgcaaaacaagtgctcttgaggaagaaatagcctaacctaggtgtcaaaacaagggaccagcccccaggttgacacctcgtgctagcccaatgcccaagttgatattttgtcaacctgggattagttctaaggagtttttctaaaaagtcttcctgacatattctatgttttcatcaaagatcaatattcaacttttttttaaggactaaatggaacttccaagtagcctttaaatggacccaacgcctaggttaacatattgtcaacttgggctattttcaaccagttttccaaaaaagtgttctaagcattttttctatcataagaaataatgaagatacaagtaaacttggggagaaaatgaaaattaaaagggcttcaaaattgagcctagcacccaaattgacctactgctgggcccagcgcccaggttgacaatcaacctagtacgctagttttgatcacttaaatttcaattatgctccaagcattctctttgaaatggttaaaaacggggttggaaaacttgtcctcaagtttttgaaccttgaaagtatcaaaacgacattctagaagctttaaaataagcacccaaagcctaggttgacatatggcgtggtgtgctgggttttgattatccgattctaaatctgtcaccactgtttttctagtttttcataataactgagaagcatgaactcaaaagagtcaagttcacaactttatattttcacttttctggcaagtgactttcttagaaattgggagttttgagtctcccatttttgcaaaatagtaacatctccgagaactggtgactagcttcaccaaaacatagaaacatgctaagtgatgtaaaaatatcacttaggcatgaaaaaatacaatctggacgcgttttctcactcacccagcgcccagtttgacatcacatgtcaactttggcactcgatgtcaacctaggtgctgggatatcaacctgggcgctaggcccagaataactttcagtaaaatggtcatatttaatattgatccgattgatgcgattcaacgtgcatttcaaagctattacaatgctctatcaagtcatgtctcacacttaagtcacaattctgaagttatcgactccaaatttcatcccaagggagttacgaatttaagctatagcttacccagagcgagtccctcatatgcaactcaagctccaaaaattgatgactgacctttggagtcaatttaccattagataatcttgtgctatcaaaaatatcctaaatgtacaaaatttttggattattttattgttattttaataagacattcttccctataaaattagagcttctcaagctcatttttcacattcataaaagtacccataaggtgagagcatttgtctctagtttctctctctaaaaattagagctttcacacttagccaattttctggtaattcttgttagaaataaaaactcaaagtagacgtagctctattaccatcgcgacatggggagtgaactactataatttttgtgtgtttttataaattatttacttaaacttattaatcatctcgccaatctagccagctagtattggccacttttcaatgtcaacattttagtgtttcattgagagtcgcaacttgacttcctcaactacagtttgattttttttgcttagagatttattttgaaaagaattcataagttcaagcaagaaatcatccatgaacacgcaaagcaagactaccactcctagtagtcaggctatactactcaacaagtagcaagcactgagattccccataaggaagcgaactatgagtaagcgtccgaaaggacccatacttgggaatgtggatctatgggatctctgtctggtatgcagcggtcacctattagggatgacgtacgagcgagaatctgaaagaactcgaaatcaagatcgcatacctacaggtccaccatatgtacttgatgttggaatttattttac

SEQ ID NO: 29907 - DNA, 3278 bp, Cannabis sativa
cctcaatttttgcgacaaagtcatcactcacgaacttctcttgcaaggccatgaagtcgtgagccttggttgcaagatccatcatgaccttttttcctctatcttgggctactttctaatgcttcttcgataagtcaatcactagagtattaacaacattgctcttcctcttttgtggaggcgtcgcggcaaaaggagtcgcagtaagaaagtcatatctacaaaagtagaaaatttaaacatcaaaaagttgcaaacaaccacagaacattatcaacatatgcaaagatgcatcacctgatacctgtcttggagtttgcttggaaaagacgcttgttaatcttttccttttatttttccaaaggttccttgtaaacttgttctcgctgaagtttggcatcagttggaatcaacttgtgttctcccagtttggcagaggtgcacaagagatgccaatcacgatcctgaactggaagaatactcataacctcaacgatttccacacgatctctagcaaccactgatcgagttggtctacctgcgaatatagataagtgttaacattcatgaaagtaaataataaattgaatcaagtatatagatatgcgacatacgaggtcaacgattgaagtctattctaattcctgacattttgaacgcataaaatcacttcgatttctaatccgccatattagaaacagtcccttctaccccattaacctcataattagcccatttactgaagcactaaaatccattgttgtggccaacattttttatgtcgtaaaaataactaaaatcctcgatagtgggttctcctagcatgtattccacatacatcgcgtaaaactcaaggattatgcgatagctattcaaagtaagctagaacagagagacgtcgtagtgcattaagattgcctttacgaaagggtgaaagggtagagtgacaccacaatgaataatgggaatcaaaaccaccacgttttgggtaggaatgattgcatgattagtgaaaggaaggtgaggatgctgcatcgacacgggcctcgtggtagtagtgtttattaaatttaatcgttcaaatgttgtcagatcagattttttaactcacgagactaagtcttcacaagaaaatggttcatccaagggggcattatctactgagtctgcttcactccccttgccatcatcaccttcaaccccgcgagcaggcaactcaaagtcttaacctatttcctcaacctcagtatctggagtagctcgtggataaataaaactcccctaggaaaatattgttgatttgcttccccgtacctctatggtgactggtggtccttctagctcttgaaccatgtgatctatttcgccagtagatagcgaaccttcttgagctcctatcgcaagaattttgtcctccaatatagatgtaggaatgaagttgtcgcttctttcgaattcattttgtgaaggccctgtcgccagactcgtacctttggttgtctgagaaatcgcttatctaaaagatagaagatctttttcagtgtggtgccagtgaaatttaaaataagaagtgtcatcacccaaataacaaattttaagaagcgtgacaaaactaacatttgagcctcaaaaagtagttgggtgttttctagtatcctaagggtcatgtgactacatgaacattaagtcactagaaaataccttgccactttaaaactcagttagttctaatcacgatttaaatatatatgcatgaaagagagaccgactccaaggaaaaacagagtggttgggtgtttcgcagtgacctaagggttaccaagagaaataagcattaaatctctgtaaaacacctaaccattgccaaatctcggcttgaggacaaatgaacctaaatatgtgaatatgcaagggagttctatcttaaagatgtgaacattcaaagttcataattaaatatgtgagtatctaagttttaggcaataatgttctagaaaaaattcagtactttgccttatttatcctagattttgattctctcaataaaccctattgatttcatgcaatttctatccttaaaaacccaaaaagcatgcaaatattgagagaaataatattacaaaagcaataagaataaaaaactaaccttctgtataagaattatttctcctgaattcaaaaatctctctgaaaaattcttcaaccttcaagaaaatgtcttaaaatggaaattcaaagcttcaaagaatttctaaagtttgaaattctcaaaaatgagagagtgaaaatggaaatgggagggaaacgaaatgaggattattttgtatttgagggggttaaatgctaatactccttattcattgggatatagacacgtggtagaagaatacataaggtcttccaatccaacggtccccaaggagcacgcctacacataccccaaaaggttttgatgacatgaaatcttggaaaaataaaaatagtaattacagccatcttttcgaaatcctcgacaaaacaatctaaggtcaccatcttgtgacaataactcgcatgcctctctttaatagtttccttatatgacatagttgtcaatcacgaaactaggggcatgtcttatagtgcaaaattttcacctagaaattcgagagcagtctcttatagaactcacacgtggatccaatccctgaggaaaggattggttgttaattaatgactcttgaagagttagcctcgcttgatctgaactcgcgagatgctgcgagcttgacaaggtccagtcgcatactatgccttgcatagtcaaagacaagcgagaccgaaaggattttatataagttgcacatatatcaaaatatatatgatgactaagtagtcttctcctacgactaagtaaagatcgcttctttacatatagattggtccgaatgacaaatcgtgtttgacgactcgacatgggctcacatgtcccatgtcgtcaacacgcgagatgtccgtcaatgcaattaaaagtgaacgcagacatcccagcgataggcccattagtcatttagcaaatatagaacacctaaagcgtgtgagcttgtgcgagaatatgaatagaaaacttgcgctcgattagtcgcatacgttgttgtacttaatacaagaatagattaaattgttcttcatttaatcttttatgtttattctgattgaatattatcatttattgtaaaaacgattttaaaacatgatcagtcatgtaaaactaaaagcacacttgctttctatataaa

SEQ ID NO: 29908 - DNA, 1743 bp, Cannabis sativa
tttgaattacattacattatttttgcactattattattattattattattgttgttgttgttgttttaattttaataggtaccaatgagctccttacccaatggatattcccttacctcaaaccgagtattaagtgggacaggagagaggatgagggcataaatggaaaacgaggatgggattgggaggtgcattactcccttattaccactcaatttcatccctaatttcaaggtatgatcaatctatacagataatgtctaaattttgtgttaaatttgattcaaaaaaattagttaatattatatttattctaaattttataattatactctaatatattaaatagtaaaatagactttattttaataaaaatatgacaaaaagtcaacaaaaaacataaatttgtattaaaagtatatataaatcatattaaatatataactgaaaatataaaagtcattaattatattaacgagtgataataaagtaaaataaaaaattatatttattgtggtataaaattttactcatgcttattttgtgttaaatttggtatgtactaaatttaaatcacattatacacaattattggagttcaattttataaatataacctaaaaaatagatatataccacatttgtagtacgttattgaagatgctctaattggtccatctacacaatacaagaatatactccataaaattaatatatctttatatattaaaagtaactatctaatcacaatttttggttgaacattttttttttattcttctctctattaaagttaacgatttaagttatcttaacaaattaagtaaatttattctgtttgaacattaagtattagtacataacaaatcttcgttcttcactttgggaagtaaaatccctaatattctaatagtaattccacgataaactcaactaatttggagcatatcctctcttgtgttacatgtatgtatatttttctaatttatttaatttgacttttctaaaaaaacaaattattgacattattgtggattatattaatttattatatatatcagtgaaaacaataattgtgaatttatcaatatagtgtattatgatgatgattgagtgtatcaatatagtgtgtttgttgagtatatcaatatgaacgatgccttaacattgatacaaattcttgcaatgcatgtctggtattgattttctgttaatttatttttacaattctatatgttattgagatttttagatttaagaatttttgtataatttatttaatttaactaatatgataattattcatgtaccaaatttaatttcataaactttgatacgtactaaattatgtcctaaactttaacacgtacgaaatcgtactacttgaactttcatccacgttagacacctgttattaaaattggacgaaaattcttaaatccgataatctcagtagtttggagaaaattttcaacagtctaaaaaattaaaagaacacaatttaatagatgtcaaaatttaaaagagaaaaattttaataaatattttttaaacccaaaagttgatatattaaactctaaagatttcccataaattttctcatgtattcaacataagacttattagtatttggttttttatttttgtagagggcttggttaacttaattttgttaattagtaatgaatttaatttaatttacccattaataaatacatatatctttctcaaaaaaaaaaaaaa

SEQ ID NO: 29909 - DNA, 1395 bp, Cannabis sativa
  modified_base (872)..(881): a, c, t, g, unknown or other
aatcctccggcaacactcgggtggcgcccgccgatacaacggctaaagcaacaaccagaaacaaaattaccaaaatacccctcggcatttttgtgctacacttcatgacttattggaatgaaagaaggaaagaaagaaaggaataagtgttaataataaaaaatgttagagaatttgaatgaggctgctgttgttgttgtagtttgattgtgtgttgagtgttgtgaataataatttgtgtgtgttatagttatttataggtatattttgatcagtcttttttggactttaagctgctgttgaggctgctacaactgactataatactaatataattaatgtgtacgtgttgaccaagattgtagttgtttaaattgtataacagattgaaatatatatacatacatgtatacataattttgttcctagttttgatttgaatttttcaaactcataagtttcaacacttgtctccttagacacaagcacccaatcaaaacacgacacttggttaaacccatttccaactcaccaaaactattttcagtgttattcttgccatactatgatgccttttgaatttttcagttttcttatttgatttttttttctctccctttgtaaaggtcctcttgataaatttcaaatgtttgaaaatttgttttaatcattttttttctttttcttttttaaagatatatatatatttatacatataactctatcataaccgacattaaaaaaaactctattattttataactaccctcaatttcgattgtttgtgaatttgaatttgaataaaatcataacttctttcatcataatatagttagaataattacataaaacactattttttttaaaaaaannnnnnnnnnttttacgtttaaagattttttttacatttttacaatttttttataaaaaagacatgaatacaacaagaaaactacattaaagtaatagaaaataacatccaaacaacatcaaaataacaacaaaaaataacatacatataataaaaatcaacaataaattaataagagtacaatttaaaaataccatattttttgtaaataaaatcataaaaattataaaatatatttagaattccgtacaatcatatttttataacttttttgttgttgttatctttgtttatttgtgaaatagtcccataattaaatatagaaatggagaaaagttgaagtatttttttattttttttttctaaaattagagttgggaaataaaataatttatttcaaaaactgctttttgatggtgctcccaattttttgactttaggggaggttagactggaacttcagatctctttttgtgaggagatatgtgaaacaattagactatgctcatttcaattaatttcaa

SEQ ID NO: 29910 - DNA, 3127 bp, Cannabis sativa
ttaattccttattttgtgcaatttgataaaaaagggaaactgtgctactcttccaagaacacgttgtctggtcttctggaagtacggtactgaaactgctttcgggtacaggcggtccttggcagaagctctcatgagagagcaatgaagataccttcttagaaggtcttgctggacttgggcttggcccaaattatcttctttgggctcacaggtgggctttggatgctggcttggaattgacgtgtcccatgccagaaacgcggataacagatataatgaaaatcgctttaatcatatgttgatatagttaatggacaagattgcacatgcttacggttatgatgacaaagttacgagctcaataaaattaacacatttatatggatacatatgtgacccggtggaaattttttgagaatttatttatttgaggcacaattgtatatataaatatgtattggatcattatataaataagttaaatttatgtggtctattttagaataaagattatgatttaatgacatgattgtcataattttagtatgtgaatacaataagaacaatttcaaattggatgaggaatcaaagtagaaatagttaataaatatttataactgttttagcagttggtaataaaacatgtaataatctataatttgcagtatcatatatatatatatatatatatatatatatatctttccactcttaaatcccatcatcaagagacgggttccaaacgttttaacttcaaattcagaagattatacaattttaaaattgattttattgactccaatatgcttctaccaatctttaattatttattgtttcattcttttgattttttttgacgtgctattttcctgaattaattaggactaaattcagatacagtatttctacaaaagatgctttcgctgtgatttctctcttgtaatactagtttgatgtgctgtttagcagtgtggttgtagagggcgttgtgcaataaaagttttattcttgagccaaaaaaaagaaagaaagaaagaaagaatatatctctctcatgatttccttccatccctattattgcatatctagatacttaagaaaacaaaaaatctagataggaaaatgaaatctatattttctcactcttacgattcacaatcaatttaagatattgttgcactgcgatctatcttatatattaagaaaaagtttttttttttttttaattatcatgttcaaacataatcaaaacaatccttcattacaaaaaccaagacataatataataaaaaatcacataactaaaccaccacagaaaaccagctataactgagatctcacacctactaagatatagtcaaaagccatgcaaaaccaacgactgaaatgtggcaaacattgaagtgttttcatcgaacacgtttcgattgcttttaattgatccactcaaacttttctctcctttcctttcttccaaacacaaattacccaacaaaagaaaaacatcagtaaagcttcccaaagtaacacaatcatgatcaccggtaaggatttctatttagtattatcagcagtggtacccctttactcagccatgacattagcctacgcctcagtccggtggtggaaaatcttcacaccggaacagtgcgccggcgtaaaccgtttcgtggccataatcgccgtaccctttctcacattcaagctaatgatccacaataacccgtacgaaatgaacttgaagctcatcttagctgacacactccaaaagattgtgatttttgtagttcttgtagcttggaaaacgcttagtaaaaaagggagccttgagtggaccataacactcaactccctttcaactctgcccaacactcttgtcatgggagtccctcttttgaaagcaatgtacggtgatttttcagctagtttaatggttcagatcgtcgttttccaaggaattttatggaacactctgcttttggttatgttcgagtacagagcagctaagattttaataaacgaaaattttccagacacggctggctcaattgcttctttcaaagccgatgcagatgttgtgtcgttagctgatactcaagccgaggctgagattgacacgagtgggaagattcatgtgaaggtgagaagatcatcttcgttgtctacttctgctgctgctaattcgactgtgttgtcgtttaggaaaattcatggaatgggctctgcaaagtcaggggcttcgaattcgaccaatgggcttagtggggttgagatttattcgacgagatcttcttttgataacaatcaaggtgcagactttggtcaggagtttattaaaccgggaagtggtcgaagtgatgcaattcaactacatatgtcagtttggaactcgtccagtgcagcttcgagttacaataatcgatcattctcctctactgatctccatagaaacacacttggtgcttcattggatgatatcactagaaaaggacctccttctttacgtggtaattcttcattttgtttaaacttttgtatttagtacttatgcatgttttcttttggttttatataaaaaattcttaccaataaataataaaaaaaaacaagtttcatataattattttgtttttattaaaaaaaattaactatcatataaatttcaaatgataaacagtttaaattttttaattaaaaataaaaataatatactaatattggctacctaaacactttaccaaatttagctttttttacgatatcaatattacaaaaataatatataattaactataaatttagttaaaatagttagttaatttcgattactgaatattcttattattttattagtaccattagtggtgaaacatgaacacctaaattatttctaaacaatgtggaagattttactaaattattaaaaaataatatgatctttttcttgagtgaaaacttgaagcttccaaacaattgtagtaagttgaatattttgaaactctcctttatataaatatataaataagttatccatagctgatttttttttagagtaaatttagtttgtaatttaaatatttaatgagacttttttaagtaatttatttaggagaattattttata

SEQ ID NO: 29911 - DNA, 1496 bp, Cannabis sativa
aatacaacctccaacacataatatatattaatctcatattaatatataatgacacatttaaataatttaatccatattatattataataaataatataacatctttaaatgtacatggattgcatcaagcttagtcgtttcattttttttttttttgcatcaaaaaggacaatgcatctcttctcatacaattctctccacataaatatatatatttcccatggggatatatctaatgactaaggctcgaaaagatatatagggaaaaaatgtaggaaaaaaaatgaaaaaaaaccttatttggtatgaaaagaaaaattgtatagaaaaacactcaatttaacaaaaattttcatttgaaataacttgaaaaattaattttttttttttccacacttttatttttcctactttttcctttcttcaccgaaattcaacttccaaacatagcctaaatattttgagattaatgctaatgcatgcatctatttccttattttctaatacaatggtgttatctgtcaattcattgatatattctttaccataatcatatgatgggttttcctgggatatatatttatggcaactaattacatagtccatatgtacataataagaatattttcgagtaaaatgttgtcatgtcatctaacaataaagttaggacttcttctcttgaaaagaaaccttaacttgatgttttatttatgcaataaggtggaaaagatttagaaacattgaaatataatgattaaaaatagacgattatgataataataatttttaactaattgcgcttatttaaattagaacctataattgtatgtgatgtttgtgtgtgcacataccattaaaataaagtaataaaaaaaaattaggcatcaagttgttttaataagtaaaacacaaactagctatacattaagctctatgaatcttcaaaaattcattaattagagctgtgaataagaacgattttactttattttttaagtatgcagcttattttgtggaccagattaagaatctaacacacattattaattaacaagtgggccatttcttgagtggaaattctccaaaatctagcaaatctggaggaaaagccatatatatattgatgtcaaattttttggttgtcgaataaggcttgtcggaagttaattaactatatatgctcaattttagttaattaattgttcaactaaaaatgctagacatttttctaaataaaagtatattttaccgtagatttggtataacaatataaatatgatgtaagttttactggttacattaaataagtaactatgatggttatatttatttttaggagttagataattattagatggttgtaaatcatgattaattctgtttcaaaaaaaaatcatgattaatttaaaaatttagtaaaaataattaataaattacacgtaacttgatactaatttaattttatttatttctttaaaataataaaataaaaaagt

SEQ ID NO: 29912 - DNA, 2232 bp, Cannabis sativa
acgtacacttgcgtgtgcaaaattatcgcaacaaaaatagggcttgttaacgaacaaattgaatggtaagttggagttttgtgaagaatgtgcactaggcaaaagttgtagggtaaaattccctactggtatacatgtcaccaaggaaccactcaattatgttcactcaaatctatggggtccttcaaggacacaaactcttgggggtgccaaatacttcatgagtattattgatgatgtatgggttttcatgttgagaaacaagaactaggctttggaaaccttcaacaactggaagaagctcatgaaaaatcaaacaagaaggaaattgaaggtgtaaagaatagacaatgggttagaatactactcaaatgaatttaaagagtattgtgccaacactggaataaaaagacataaatcagtaatcaagacaccccaatagaatggattagctgagataatgaataggaccatccttgcataggttagatgcatgctgaagggtgcaaggttacaaaaacacttttggggtaaagttgtaaaaacaacatgctatttaattaacagatgtccctctgttgcattaaacttcaaaacaccacaagaattttggataggaaccaagccaaactatgatcacctaaaagtatttgggtcccttgcctatgctcacatcagaaaagacaaattagaaccaagggccttgaaatgcatgttccttggttatcctaatggtgtgaaaggtaacaaattgtggtgtttagaagatggttacaagaaatgtattctcagtagggatgtggtattcaaggaggatgaaatggcaatgaaacctattcaaaaccaatcatgagtcaagagggtagcagggtacaagttcaggtggatcctggtggaaccagacaagtaatcgatacacaagaagcacatttgccaaagacgagagagaagatacacatattgaatctgatgatgaaacacatgcctctcaagagaatctaaggaggtatcaacttgctagagatagagaaagaaggcaaacaaaagcaccatacagacttggctatgtagactactctgcatcagattgcacaacctttgcttttgttgttgtagaagaaattgagagtacaaatcccaccagctatacaaaagccattgaaagcaaaacaaggaagaaatggttgatggcagtcaatgaagaaatgggctcattaatcaagaaaaacttggactatggtaaaaagaccataaagaacaaaaagttataggctgtaagttgatatttagagagaaagaaagtgacaatggaactggtcagatcagatacaaaacaaggttggttgttgttagaatattagttgtaaaaattggggtaacttgtatttagtagtttcctatttagtctcctagctttgtatataaatatataatattctatatacaattcgattcaccattctctacatggtatcagagccatacttagaattgtgattcaaaatttgaaatttgaaataggttcataaaaaagaagattagggtttgaatttagggttcttttttaaaaaccctatttggagtgcaattttattctcaccgcccactcaagaaagttgcctagctgtcgatctaccaaaccctaaagtacggtcaccggattcctcgcgcgtagggctcacgcgccacttgaagtttctacgcacaatcccacacgccggcgggtgagacggcatcttcgacggtgttattttaccaattctatactcggttcttctaagcccacttgcatttatctaatgttgtaatttggtattttctgtgtaatctcccgataggcctaatggtaaatagttagagtttatagttatattatgagttaatcaagtaataagtgggattatgatcctactaatctaattcaacataaattttaaatttgctataagtggataaatatgcgtaatttataaattactgagatttatatgacatatgtgaatgtaatatgagttaccggtgtaataaaaatatttacagttttggtgacctcggagactcaatcgggggacaaaaatatcataacatgtttaattgatagatttgacaagaatattatgattgattcgaataatttgaaatggagtaagacgattcgactgtatctaaggagtattgacaaagatgatcacttgactaacaatcctcccaaagaaaaagacgattcaagga

SEQ ID NO: 29913 - DNA, 2177 bp, Cannabis sativa
acaaattgcctcaatttctttgagaaatttctttggtaatagcagaatctgagcccagtatgcatgtatggatatgagcacaacattaatcagagttactctccccatatagaacaagtttcgggtactccacactcttatcctaccaaccattttttctaggataatctgacattcagaaattgatatcttctttgagcagatttgtattccaagatacctaaatggtagtgtacttcttttaaattgtgaggcctcaagaattcttcccacttcatcatttgacatgcttgagcaatatatggcagttttctgttcatttagcagagaatagcttgagtcctctcaacatcgacatgacttaaacaaagtctccatgactaaacaccaagagatcatctgcaaaacagaggtgattcaatttcaaagatgaacatctatcatgaaacttataaccaggccagtcaccaatcttctgaaaaatccgagacaaatattccattcataatacaaagaggagaggagatatgggatctccttgtctcaaacccctctttgcattaaaaaatccacacatagagccatttaataagagtgagaattttggtgtcctgatgcaaatcagtatcagtttaatgaaatgattagaaaaaccaaactccatgagcatttcttcaagaaatccccattccacagtgtcatatgccttccttagatcaatcttgatcatgcaacttggcttgcaatttttcctcccataaagtctcacaagatcttgacaaaccagcacgttatgagcaatatacctcccatgaacaaacctccttgattctcagcaataagatccggcagaaccctccttaacctattgcaaataaccttcgtagcagtcttgtagaggacattgcagcaagattttggtctgaaatccaccacactctttggacaagcaaccttagggatcaatgtaatagttgtagtgttaatttcctttaacatcttcccagttgaaagaaaagataggatagcagctacaaaatctgatctcaccaaagtccaattgtcctgatagaaagcgcttccaaacccatttggtcctggtgctttgatgcctgggatggaaaacaaagcttcttttatctccttctctgtgtattcagccaacagaatagctttgtgtgcctctgtaatccttgggcccaagttcaccactgactttaacacgttccttctattctgcatatgggtacccaataaggttatagtatcccaagaaagctttttgaacgccttctagagaaccatgccaagtcccatgctcatcctctattgagaaaatttggttatggatcctcctagatttcaaagaagcatgaaaataggcagaatattcatctccaaaagtaggccagttgatttttgctttttgagataagaacatagagtaggctttatggacttcagtatacttcttacttgcttcctgttcaatttccatcaaggttgagcactgtggattcttgcttaattcttcttgtgctttaattaaatctgcttttgcaaccatatcagccttgtgaatctcagaaaaaccttctcagttgatccttttcaggaccaactttaatcttttgagtttagtgactattcggtacatgtgcgttccttgaacctcttcattccagcttgtactcatttgtgtatcaaagtttggagccatcttccacatgttataatatatgaacgacttctttcccgaactcctacattgttatatagataccaataaggggctgtgatcgaaagacaattcaggtaaaaaaactgcttcagaatccgagaaggacatacaccactgtgagttaaccatggctctgtcgattttagagaaaatcctatcctctggtttttgtttattattccatgtgaagaaggaacctgaaaacttcaaatcagtcatgtcacatttttccatacactccttaaatctttgagaaggaatgcatttagctttcctacccactctctcatttgcaaacagtatttcattgaaatcccccatcaggatccaagccttatgtattccatctgctagtttctccaaatcatcccatatttcttctctcttcagttcttcattaaaaccatatatgaatgttgcataaaaacaacctttt

SEQ ID NO: 29914 - DNA, 2177 bp, Cannabis sativa
aaatgtttacaattactattcacagcattacacaactaaaacatggtttgaaacatatagtgggtcaatatatcttgtacacaatcacacaacatggaatgtacctcaaattaaacatcaaagatgtcattttctgccaccaaagcaaaaagtgagattcggaagaccaaggaaaagaaagtttataggtgaatgggaaacaaaaatataataggtgtatggtcaaaaaggtcacaaccgaaagacatgccacgaccaagcaattaaatagagaaaggatatttatttgaattctttaaatttctatatgaactcttacatcataaaaatttacttttagtagatttctattaatttctaatactgaaatagtttttttaagattgcagtacagttgctaaatagttgtgtgctaagttaaaaatacattgcaattaacatgttgatttcttaaaagttgaataattttttttaagttgtatgagaaatacaatatatttaaaaaggttcattataagttcaagatagccaaatatccaatggctttatgaaaaaaatatgttcgacttcataccaaggctttgaacaagaaattctcaaagttttgatataataagctattgggtgagcaatatgaatatgagacatcttgctttttaatgactttgccttataaaatttttggtaaagagacttcatagaatcatcaaaaaggcagtatattgtagcaaaatccttagttacagtagaataatacttttctttctttttaagataatacaaaatagtattcatatgctgaaacaacacaaattaaagaaacaaaagaaaaaacagttagaacatgaacacattccaagatcatcaaaacaaatgcaaaattgaaaaataatcaacaaacaactatataaaaaataaaaaaaacgtacaaatagatttaaagaaattaccgagtcatttataaaaaatgtcatagtaagatatatgataaaattaagttttatctttaacatagtccacacccaatctaataccaggatagattttttgggcaccatcgtcatagacattaaagggcctaaaagcaaaaaaaaaaaaaaaaacgaatatgaacaaaacttaatttaaataattaacataaataaattaaaaacaaaagaatgcataaatagaattaacaaaacatcacctaggatatttaaacaatcatttgctaatccattcgtcaaacttcccctcaagcttaagagaaatatgatcagaaaaaaaattatcaatagcataaaggcccttaatatatgtaacaatcttgaaatctcactcatctcctgcagattgagaacctaaagacataaactccaatagaagggtcttcaaatcagacaaactaaaatcaacaaaaggagattttaatgtcagggcatgctttttcttgtcaagaaaaggagtactggaatgtgtgtcatcttcttctttagaaatattgacatctattttctcaacttcctcatcaggaaggaagcgggaacctgaagaaaaggaaagataaaaagttttcaatctaatagttttacaacttgaattaaacatataagcaactatgaaataactactcagtaccacaatctcaaaaattaaaaaattcaatgagaactgtacctttattttttcaacaggctccaaactagccaaaacaacgtgatcatcatcaatctcaagttggcttaaacctttaaaaaatcaccccctataaataaacttgtttgcccttgacattgccaacgtccttagacttgtcaccatcacttgctacaacaccctcacatttttgctcaccaacatccaaaacacagcaccccccttgtcaccaaccacatcaacatcattgttatcatctttactatcaactctactatgcttactgatcctgagaaccatcaccatcagaatcaacatcattcttctccaaatttggacctatattatcttcttcatcatcgtcgaattttgactcttcattatttttaccaaaattaatttgtatgaaaatcatgaaacaactattaacaactaaataacaaaaacaataaatgacatgaaattatcaaaataaaaacaacttaaaatgaaaaaacatacctcaacatgagacttgtcacaaaaataagtaaccattg

SEQ ID NO: 29915 - DNA, 1448 bp, Cannabis sativa
tttgttgatttggattgacaagctagttaaagtggatattttgttggaagataggcagctcattcattgtaaactcaaaatggtgggttacaaggatgagttctatctcactgcggtctatggaagtaattcgttaaacgagaggaaggatcttttgaataaactcactagcattgggcacctgaatgctccttggattattcttgatgacttcaatgctatgtttgcttacaaagatagaagtgtgggcaggaaaattagaggtcttgaaatctaggacagccaaaactggcttgcttggggtcaagttgaagagatgaagacctctagttctttctttacttggtctaatatccacgaggaaggcagtcaagtgtactcgaagttggatagagttttcactaatgaaagttggttagatcatttcccgaatacaaaagctagttttagatggggggctcttttggatcacagttattgtttgattaaacatatcaaggttggtaaccgtggtactaagcctttctgtttttgcaactactggatgttcaaagagggtttcagagagagttttcttactacttggaagaatcaccttgttactgatttgaactcgttacacccgcaactttttagggtcaaacacatcctaaaaagctgctatgttaataagaatgaggatgttgctggattgtacaatgaagcccgagataagtttatagaagcacaagaagcattggccatcaacccgcaatgtccttcagctgctagaactgaaaaggtgaatcatgctaactacctagctgcccgaaaacagtattttagctatttgcaccagaactcgaaagcttgttggttaaagcttggcgatgaaaacacaagttattttcatgctatcatgaaaaagaggagagctgagagcaaagtgtgttcgttcactgttaatggagttgtagttgatgagtacgacaaagtagttgagcattttttaagccacttccgcaatttcatggggagacaaagctcggcgtcaagaagattggaagaggattgcctcgagtttgggaataaacttactatcgaacaacaagtgagtctaattcgtccgtttagtaaaaaggatgtaaaagaagctttattttgcattcattcgtccaaaagtgcggggcctgatggttttggtgcttgttttttcaaagagctatggaacgatattggagatgacttctcttgtgtggtgttggggttttttcaatctggtaagcttcctcaggaagtgaatgaaacatccatatctcttatccccaagattgaaaaccctcaaggagctaacgactacagacccattgcttgttgcaccacaacttacaaatgtatttcgaagatgatatgtaccagactctcgaaagttcttcctgagcttattcatgaaaaccaaggtgcttttg

SEQ ID NO: 29916 - DNA, 1402 bp, Cannabis sativa
gcgcttgccactactgttgtccttacagtcccatttccttttcttatctaaataagaaggagagctagattttgcttcaacaatgttctattcacctttcttagacttattcttgttatggttctcagatatagtcaactgattcaacaattcagtcatgttgaactataaattgtttatcacataattaggtggtgaacactttgaagctaggagatagagactcaaggatgatgcttacttgagtcttctcatcaatgataaccccgtgtgtctttgcctcatgcattatctcaatcatgtgtaagacatgagctcctataaggacactcttcttcatcttactattcatgtagctactagtatcatcatgtctcgtgttatcaaactgttgccaaaatatggtttgtagagaattcgttatttcagatgcattctccatatttcatgcatcttacgcataacgtcatccatactgacaagcataaagcacttggccttgtcattggattaaatccaagcatcatttctgtccccgaatattttttggggcattgacagcgagctctttaggacgctcttcagttagaaaacatttgtggttcttactaaccaacaaaaaatgaagattagatttccattttaagaatttttttaccatttaatttttcaagtgctaaagcagtaaagggatttggcatagtagacatgactaaaataaataaagataacatattaatatacttgactaaataaatatcattttgaatttaatataaacgtgatgcatgagtacatacatttaaaaaatatatatataaaataatatttaagttatttcacgataaaattctttggcaattgattgctgccttagggtcggtcaagtcaatttagttgagcctatgagacgattcttatctttattattataacctaaatatctcatatttccttttcaaaatataaattattgttgtttagtcaatttaacaagtaattgcatggaagcttagttgcacttgtgagtgtgacctataattttagattccatgacttaacttagtaacactgccttaaggtcggtcatactaaaaatatatcacttcctcctatcttaataaagagatcaatcttgaacaattgtatagacaaataccttccttaggggggtaaaaacaaagttgtcgcgaggccaatctatactcctgcagtattggccaataatggagactgtaggttacatggacatgtaattcttctcccactcaatatcttaggcctaatgtgttttatattttaactaggtaacatatccgcgcttcgcgcggttttgtattagagttaatataattttagaccatatatcttgtaaaataaaacataatgatattttgagtct

SEQ ID NO: 29917 - DNA, 1371 bp, Cannabis sativa
ttaaattaatgtaatgtaattttcaatgtatatgaaaatatgaaatatacacattctgaagattctctcttgtgggagttggaatactgtttcataatttattcaatgcattagtgacatgtattttgagtttgtatgattacttagagttattttttagtttttcaaattctgagtcaaacaatacactattgaaatcatgtgtagatattggttttggttgagctctacagttcccacccacaacaaaatggcggcattttcttcactttgttcaatccaagtcaacaagccctctctctcttcttcgttatattctccctccagcaagtctctcctccgatctcccttatcttccaggaagttatccagcatttcattgtcttctccagctcttcgtggaagaataacgtgccaggcctcttctgctaattcatcaccttcatcaactgttaacagaaaagtgacgtcagagttgaaggattttctgcacattgatgattttgataaagacacgatattgaagatgttaaaccgagctgcagaggttaaggcaatgctaaaatcaggggacaggacatttcttccctttaagggaaagacaatggctatgatctttgccaagccctctatgagaacacgtgtttcatttgagactggatttttcttgttgggaggtcatgctatatatctaggacctaatgatattcaaatgggtaagcgggaggaaactcgggacattgcccgtgtcttgtctggctataatgacattataatggcccgtgtctttgctcaccaagacattcttgatctggctaagtatgcaactgtacctgttatcaatggcttgacagactataaccacccatgccaaattatggctgatgttctcactattattgaacacattggtcagctagaaggagctaaggttgtctatgttggagatggaaacaacattgtgcactcctggctgttgatggcagcagttatacctttccactttgtttgtgcttgcccagaaggtttcgaacctgatgcaaaaacagttaagaaggcacagcaggctggtattagcaaaattgagattacaaatgatccaaaagaagcagttataggagctgatgttgtgtactctgacgtatgggccagcatggggcagaaggaagaggctgcacagcggcgcaaagctttccaagggtttcaggtggatgaaaatcttatgaagttggcaggcccgaaagcttatttcatgcattgtttacctgccgaaagaggggttgaagtgacagatggagtgattgaagctccgaattcaattgtcttcccacaagcggagaatcgcatgcatgcacagaatgctataatgct

SEQ ID NO: 29918 - DNA, 3510 bp, Cannabis sativa
taagaatcgttgtaagtaatctttagaggctcgtcttcttgctgtttaatgctgattaaatcgttgggcttaatcggtctgtaccttgatgaagagaattaattatagaattcttctttaagtgtttcccaagaattgatagatccaagagaaagcttaagataccactgttgtgctgtttttggtagcgtggctagaaagattcgacactgagaatcatctcggatgctttgtaggtcagtttgtacttcaaagtcgtgtatgtaggagagagggtctcctttaccaatgtatcagtgccacacttgacttttgaatttggaaaggatctccaaagccttgatttgatctgagagatgtgaacatcggtcatgttctagctcaaactttgttttctttagagctatgatactctttaccaagacggcaagagtatcaaattcagtcttgcaaacatcaagtgtggtgatgtgcatatcaactggacgattcttattggtgtcgcttcgtaggttcttttttcttccgagtcgatcaaagacattgatcgatccgaaccttgtagttgttgcctggtcatgtggccttgctggtaactgtggggatttatcctgcatgaaggtagagtcatctctcgagcgttttctcgtggtactatactgagtacttcctttgaaatagtcttcctcagagtgacatgagtagaggaaattgaaaagattgctcaagttcaaaacgtctccatgcacccatgggaagtatttgtataactgactatcaagacaataggcaaagtacctacaccatgcaccctgttcatcacaaaattatttacgcatgtggagtagtttgctgatcttcaccctctgaatctcatactcttcactttcatggtagagcttctaggtcccactcccaaggttgactacaggcccctttccctttgtagggtcacagggtggcctagagtcattagacctggaagagaatcccatgaaggagattggtttcccgtattgttcaaatttcttctagcagaattacggttggtccaatcagctgcatgtcatggacctgtagatctgcattcttgagtctaagtccttacaaatacttgatcgaagcttctttccctaacaagtgatcgctccacaatagggagagaacccatagatccacatctttgagtctgagtccttttggactcttgctcacagttcgcttccctatagggaatcttagtacctactgctcgctgagtagtggcatgactactaggagtggtagtgttactttgcgtgttcatggatgaatactgcttgcttgaaattacgaattcctttcggaacaaagctcctagaaaaaaaaaaccataatcaagaactcgagttgtggctctcaatgaaagcagtcaagcaccaaaatattgatgctgaaaagtggctaacactagctcgctagattagcgagatgaataatgagtttatgtaaataatttagagggacacacaaagtttatagtagtttactccccatgtcacaatggcaatggagctatgtctactttgagttcttatttctcacgagaattaaaagaaaattgactaagtctgaaagctctaatttatagagagagaaactagagaaagatgctctgaccttattggtacatttctaaatgtgacaaatgagctataggagctctccttttataaggaaagatgtcctattaaaataataataaaatattcaaaaaatgtgaaaaaatacatttaggctatttttgatcgttgatgatgatctaacggtgaaattgactctggaggttagtcgtcaattttttggagcttgaatgtcttttgtgggacccgtttcaagtaagttgtagttagaatttgtaactttcttaaggattgaatttggacttggtctcttccaaattgcaattggagtttgagacatgacttgatagagcattgaaatagattcaaaatgcaagttgaatcgcgtcaaccagattactattgagtgagtgatggccattttactgaaggctgctcttatactaatgcctaggttgacatccatcacccaagttgacatatgatgtcaacttggatgttggttgagtagaaaaacatgctagggatgtatttttggatgcctaagtgatattttaacatcacttagtcaatttctttgttctggggaagtcgttcactatttctcggagatgttgctattttgcagaattggaagactcgaaactacctgatttgtgactaagtcactttgccaaaaaagtgaaaatatttagttgtgaattcagcttgtctaagttcatagctctcatttactatgaaaaactagacaaatgctcaagacagaatgagaatcaaataagcagaacccaacgcaccaggtcatacgccaaccagggcgctaggtgctctttctagagcttctaggatgtcgttttaatacgtctaaggttcttaaaattgaggaagaggtctcttacccaatttttgaccatgtcggagacaatgctcagagcagaatttgtatttgagtgattgaagccagtgtgtcaagttgattgttagcttaggcgttggcccttactgacctccaggttggttagtttctcctctaaaagcacttgtttcctcattttgtatgaagacgaagaaaatgctcgggatagttcttcaatttgatgcttggaaatgtcccaaattgacaatgtgtcaacctgggcactgtgtgcctggggcacttggtgctccgggtgctcaaaaatgaaagttctccgattctaattatgatgcctcaaatatgttcatgacatgtccaattcatgtcctagtacaaagtttgacccattttcactaagacagtcctgaaaactaaaacactagttggaatgtcagcgtcagcactgggtgaaactctagatgctcgggttgacttttggggtgttgtttcatgtattttcagctcccgagccttggacttagattcttcatgtcttcataactcaaagtactaaaatatatggtgacttagaaacaactttgttgaatctaaatacctgttccggagcctcaaagtccacgtaggcacatgcttagtgatcatttcccaagttatctgctatgactcgagtttcttcacttcaagaatatttttcttcttatcatgtattaaatattgatgtacatattatcagagttacctttgatgtaaatagaagtaatattatattttttttttgggtaaagtcttattttatcattaattattattaaagtgtgagacacaatgtatactaattattgtcaatttagaaaggcatcttcttttggattgaattattgttcactttttctattattaatttctttttaataaattaacgatcatcaatagatattattttatattcactacaaaaaatcttatttttagtcacaacaaaacttgtaattaaaagtgaaaaaattgtga

SEQ ID NO: 29919 - DNA, 1469 bp, Cannabis sativa
gtcttctcagatatataaatctcaattacatgcaaattttctactttgtgataaattaaacatgtaaaaggcattaaacaaagaaattctataagttatccaaaccacataggtactctcgtcatatatcgaaatttgttcctatttcactatagcataattgacactcacttttcagatctcgcatcaaaatcataaatatttaattggtgatcaagcaattaaaagtaattaactacgaatgaaataaaatacataagaaattaggaaaaaattaaatcacattaaaaccataaataaatgtcaaacaatatccatcaataccaaaaataaattttttagctactcttgttcatcgtaacaacttcatacatatcaactaagaaagaagaaaatagagaagaagagaatattgaaaattccatcgaaaaagccttgtcagttgtttctgctctctaatttttgtatactcagaatgcttgttgaaaaatatgaaagtcgacctctttttatagccaaaaaaagataaaagatctaaaaaaatgtcagatttcaaaattttaaatggtggacctaggcacaagattcttatgtggtggcccgtgtctgcgaagtagatattcctttgatattttgaagacacgggcctaggcataagatttcagtgcctaggcataacacccctaaatttgggctgtaagcttattgataatgttttggccataaatttctccaaaatttgatcagaacatagtctaatttagacttgaagttttagctttattttcgtgtaaaattttctctattttatagatcatcgttttttgaaatttgaccaatttatacattccaagtgtcaaaacctgaaattacataaaacaagcgtaattttattccaaaaagtgaaaataaagaagaaaattaactctaaaagtgacataaataataggctaaaattagtctaacaaattctcccaaactaaatccttactcgccctcgagtaagactaacaactaaaaacaacacaacctaaatgaaataagccaatcaactgaaatatgagcaattttcaagtaagaaaataacatggttttgtatgaaattttttacctatatatgttaattcaaaatttcagttcaatcacaccattgactcacttcaatcttgcattcagttcattaaaccatagcacttaactaatatttgaaataatttatgcatgccagataccaccttcaatccaataaccaaatatattccataagcttgcaatactcactattctccactaatataaatagatacataattaagaatcaaaatgtctttctagacttgtaaggataggcttaggtacgggtagatggaatggtcatttaggctcgcttataccataagattctccaatcatgtcacctaataattttttcacaaacaatcctgatatttttgggttttatgccctaa

SEQ ID NO: 29920 - DNA, 2044 bp, Cannabis sativa
agaattatctaaaatatgttacaaccaagttataaatctctgaataccttacataaataaattaagtaaaattcttggggttataaatagacgatatacattcgacacacatcaaggcctagaagtacattgggagtgttgtgaataagaataaaagtagatatactaattaaattaaaggaactattgaatatactaattaatttttcaaattgtagacttaatttatttttgtaaccctaaaaagttaaacttttctttaatataatcgattcatcaaggcaagtcttgaaattaagaagcattgaaaaaagtacataaacaagaacaaaacgatgtggtaatttagcaagaaactgagaattagctcaatttctcccttatcacataatgtgctagcaaattcaacaaaagattcaatataagttgagataatgagcaagataaggtacttaatggaggatttaaagaacaattatataaaaatatgcatttttacattgttatcttctcaatgaccgaaccacaatgggaatggctcttcatacaaaaaatgcaattcacaaactcttgtattgatccaaccaagctaccacttttctcatgtttgcatatatttgactcacttttctcaccatattcgaaacataatattttcttcccataaaagaaaaattaacccaatgctaaccattcctcctcttctaagtattagcccttaaaggaacaaaatcatggtttacaattactgaactgactaactccataaggttttcacctgaacacaagccaaggttttaatgccatattgaatcttcatacactacactaattatgtcactggattttctttactccttcctataacttgttgacttgaaactctttaattatttcaataaaaaaaaagtcttcttttttactcttgttatcattggttaccatttgtgttctcaaatcaaattcatttcacacaaacataaaaaactctgaagaagaaaacattgtctcatgactaatcaatagatgaaaacaaacagcatttgtcacctataaataacatggcaataaattaagcaataatggagtatataaaggtacaacaaaagcccagttcagtcgagcatttatgttcaaagagacaaataaataaatgaagttgggttaaaaagaaggaagaaagaagttcaagttttggggtagtactaataggtcctaaataagctagtagaaagctagagattactaaacaaaacatttaatgctctaatctctaaacagatttggaggatcacaaatctcatatttttagccaactctaacctatatgtgtacctggtttgcattcccaactttctatctttctcatctagagaacacaaatatttccattctgtcatcatgtttacggctctgacgtttttctctagtccaatcgaacatggcaaccagcactaccattataaatgtatctgacaactcattttctctatcattgtcaaaaataaaaaaattttaaaaaaatgactttaggttcttgaactttgaaccaacaaacacaacagtggactatgcaggtagccactgttttatagactcttcaatggcttttcaccatggttaaaagaaaaccactttgatggctttatcatcatcatcattaccatcacagaaaaatcaatgtaaaagaactcaaaatggtaaaaccacaattgggattttcttttgatatgaattggtagtaaataggtagttaccaaagagtgcaaagtagattgatttgactataacaatgagctaataataataataataataataacaagcacactccaaaaatatgttaaactgagtatttgtaaacattacaaatataatgtcaattcaacaacacctcctattgacatgcttgacggaccaacggcttcattccctactcagcatatacacctatcggtttacatattccaatggtgcaataacagagggagactcctcatctgtacatggatcactgcactctcttaatctgacaccacagaca

SEQ ID NO: 29921 - DNA, 2420 bp, Cannabis sativa
  modified_base (349)..(365): a, c, t, g, unknown or other
tattagggacaatattcattagtcatccctaaattattgttcttattttttatttcaatttaaaaatttaataggggcaatgtttaatatttttaggggcgacttatcacccataataattggacaatacatatttcatgtaaaataattatataaaaatattttgtgaaaataattgttattaggggtgttttttaaatttttagggacgacttttgtcgctcctaacactacaacaaatgttacctcagtcactcttagaactaataggcccaatcagtacaaaccatttctaagcccagtcattctccaattctcaaaccctaatcacattcctcgattcttttannnnnnnnnnnnnnnnngtacaccttcgacccgtcaccattgaacatctcgaagttcctctctgttgtccttcctttcttcttgttttcgctgaacagaggaaacacgaaaatgtcgattttgtccctctcggcttcattggagtccccttgctcgactgagcttcctcgatcaatctcgtgttgtaaatcttcgcgttctccttcgtcgccgctatatctccggcatctcccttcgacggccaaccacgaaaatgtcgattttctttgctcctaatttgcctaaaataggggcgattttaatacttttaggggcaataaaaaattgcccctaataatcacttttaggggcgatttattttgtcgcctctaaaaaggagcattagggacgaagtattaggagcgatatgttagtggcgacttgtcgtccctaatacattttagggacgattataaaggtttgtaggggcaacttttgtcacccctaatactatcttttcttgtagtgaaaaacaaacatacaataaaaaaaattacatttttcacaatttctcataatattaaatcttatttatttaaaaaaaacaaaattttcatataacttttttttttaagaaaaagaagaagaaagaagaaaaacaataaaatctaattttttgttgggggcagcctcggggtcaaggtgcttggtgaaggcggagacaccgcgatggagggggctgacagagagggagaggagggacgaggtcaaacgaaggaggcgatcagaattttttttttcttgttgaaggctgctgaaaagaaaaatagaaggaagaagagaatgaagctctagggggagccttagggttttaatatgatgaactaaaagtcgcccctaataaatgggctatgtttaatgattttaggggcaacaaatgtcgcccttaatgccattagcgggaaaaatcccacctaaatgaaacgggaaattttcaattttattaggggcgacattgtcacctctatttataaaaacgttgcctctaatatttttaggggcgacaaaattgttcacgaattaaaaaataaataaaatagatttctttaagggcgacacagtgttgtcgcccctaatacccctattattagaggcgactttttgtcgcctctaaattggtcgcccctaaaactttaatttgttgtagtgattaaatatacaaatagtaactttaaaatgtacatacatactctcagaatatatcattaaaccactaattatgtatttatttttttgtttgtctggactcttgaattgggctagattaacgtgatgttagtgctatatcaacaaactgtttaaataaaaggattatttcacaaatatacaaaaacaacaaaaaaaattacaaaaatacgatttcacaaaatttgaaatatttttacgatttttttgattatatttacagaaaatacggtctttttatgctgtactcttgttaatttgttgattttttgttatatgtatgttattttgatgttatttagatgttattttcttgttacttttatgttgttttcttgttgtttctatggaaaaccgtaaaaatgtaaaaagaaattctataaacgtaaaaatgtaacttttttttacaaaaaatggtgccttatgtaattatcccttaaataaataactagaatgcaactggaaggtgacatttgcaaagaaattttaacataacaaaattgaaggaaaaaattcttctagaatcatagtttggaaggacaaataaaacataaatgtcatgcattggggggtggttgggggacaaatatatgatattgatcatgattgggaagtaaaattgctaacatatttacaaaaatctaactaacaaatttatcatacttgcctaatagtcaaagtttaagattgcaactacttttaagatctgttggaatttttattcttatataaaagcttaagggacaaaatatattgctatatgataaaatttgggggacgaaaaatttatttattcatatgtaattatgatttaacactacaaaattttttatttttagtcacaacaa

SEQ ID NO: 29922 - DNA, 5212 bp, Cannabis sativa
tttttcttcacattcactcaatattactctatttcccactcacatgcataaacttccccttaaaatctctccaaacataagatccacttatggtataattagggtcaaagttagataataatgagtttatgttgttttagctcacaatatgtgtagaaacaaagaatcaagtcaaagctcaaaaagggtaaactaggataaagattaaaaggatggcttgaaaggcacaatcgatccaaaaaaaatacataaatcactttccttatcatgcatcatttattattttgcctcaaatagcaagcaaggaagttttagaaatttttcaaacaacgtttcacatttcacatttagcatacataaaccaattcaattgctaaagctttacctattatgattctatgttccttcaatgtacaaacacacttaaaaaattgactcaaaaaacacaaacacacaaacaacacaaaaaaagtaaaatgcacaactaaaaatttttaagttcaccccaaacttaaatgacacattgtccctaatgtcacactaaagaataggaaaaagggaacttacctgatcggcacatcagtatggcagtggtggaggtgatggttggtatgagtaccatggcagtggagctaaaaagtgatccagggcatcggggttcattattcgcgtagaaaaagctaagtttaattcttgaacttgacgacgagaaaattcattttattgctcaagatatgagttttaataattagcttgagctcgattcgaatggattatatattgattttggccgatgatatattccaatcaattataggtaccctctacccttgagtgcaatggcagctggagttgtagtagagttgggatggtttcactaggccccacttcctggtcctcctctccttcatcaccatctccctcaggttgatcattgcctttatgacattttatgactcttttggtggtgtgaaagaaggcagtggaaagacataacaatgcctttgagagatcatcttcatgggtgatttaataatgtctccctccatggcttgaacaccatgccgactatagagggcagtgatcaaggcaccatgagtcatgcccacagtagtacacattcgggagacaaaattgaagttcttatgagttaaccctccaatatcacatgtgtattgggacatgatagcaagcacaaccatgatccggccatagtccaatgtcaaaacatgggatgtaggttatattcttgcattcacaaagtaagcccatgctcgagccaccatattgaattgcgaaaacttttagttggcattgccttcaatgtgaaatcgagtcccctcctggcctagaacccccaccaatgtctcatctttgataatattcttttcttgggccaccaaactttcatctttgtactctcctaaagttgtaaggttgaaaaagttgtttacactatcaatgctaaatggcacccacactcctcgatcatagacctcattgttttaatttttgtgaggataattagcaaaaaatgcatacagtaagctatagtttgcatctcccacaaactaagaagcacaaacccgttgccaattccgtctcacaatttcaccttcaatagctttatatccacggtcctgctcaaatggctcatcttagaattcaaaacctctttctcgtatcactcttcttttctaaattttcttatatctctcagccacatcgttgttgacaaatttttgaggacgttgattctcgtaagggtttggaacacgtaaggacaacgcttgttcattcccttgggctcgggaagtggttctttttggtcttaacaccatactaactcactaatcaacttaaaactagaaaatctttggtaccaatcaataaaaattttggcagcacctcccctataatttatacttccaacaaatactcaattcaatcacacccaatgttactaattcaaattaaccaacaacaacatgaccattaatccaaaaatgacacaaacacccctaatctccttggcttttccacaattaataaaccaataataaaaaacttcaagatacaatgaggagaatcacttacttgtagattgaaaccattaaaaagctttaattcctccacatccaacaagaaattgaaaaaattgaagatcacaatcaattttttgattaggtattttattgaaaattttgggatacttttgaaggatttaggtaatgggtggaagaattgtgtattgggttatgattaagaatgtttattattgtatttgggtgaagaaattttagttttgaggttgagaatggtgtttatgggggattggtggtgatttgggcgtgtagaagaatgaagaagaagaagatcggtgaaattttttgtaaaaattaggttatggctcatatgagccctctctgcccaaaaatacgattcgagggtcgcgacactagggtcctatattgcagcctgtgtcctttaaacccctattatatatattgacaacatcttctggggttgcaacactacattgagtgttgttgcccatgcccttatcgaagttgctcctactctctgccaaaaaaaccattttaatgccccaacactaatgtttagtatcaaggcactctgaaaatttttacttttgactagtttttacgattttcatgggtctttttctttctgaaaaaggcaaattaaaatgtaaaataattataaatgtctcaataaaaaatagaataaaatacaaaacaaaagtaaaacttgggatgcctcctaagagcgttgtccataaagtcatttagccggattcagatttcctcctttaaagtggagccaactggatggtagattttgctttaccatatggactacccaaacatagcttcaaattttgaccattcactttaaaagcccctgacttctaacttgttactttaacaactccatatggataaactttgaccacaataaatggttcagactacctcgactttaacttaccaagaaagagcttcaatctcgagttaaaaagtaaaacttgttgacctggttaaaagtccttccgatctagatttatctcatcccatttcattgttatttccttgtaaatattggcattctcgtaagcctcaatcctgaactcttccaactcaatcaattgcaacaatctcttttcactaagtgtcgctagatccatattcaacgtcttcatggcccaaaattatttatgctctaactccactggaagatggtaggattttccaaataccaacctatatggtgacatgccaataggtgttttaaatgcagtacttcaagcccataaagcatcatctagcttctttacccaatgctttcaggaacgttgcactattttctcctaaatcgactcaatttcttggctggaaatctcaactttttcattactttgggctaatacggtagtgatgtgctatgatggactccacacattgcaagtaatgcctcatattgcttattataaaagtgactcccttcgtcactgatgatggctctaggtgtaccaaattgggtaaaaatgtgcttttgtagaaatgttagaactgttttaccatcattagtgtgttgttgctgcttccacccactttgacatgtagtccacaactaacaagatgtatgatttgctgtaagacggtgcaaaagggcccatcaaatcaataccctacacatcaagcaattatacctccgaaattccagtcaacaacatcttgtttcttggaatattaccagttctctaacaatgatcacatgccctaacaaactcaggaacatctttgaatagagttggcctgaagaaaccactatgtaatacctttgcaggaattcaatttctagtgaaatgacctccacatggttgactatggcaatcggtcaggatagagaacatctcctctccaagcacacatcttctaataatttgattggcatagtacttgtagaggattggttcttcccaataatagtgcttcactttggaaaagaacttctttagttgttgtttactcatgtctagagatgtaatgttggcagccaagaaattcacatagtctgcgaaccatggtattgttgagctaagtgtcaaacaaaagggttgttcatcagaaaaatcttcatttatttgcacctcctctgtgttctagctctcctccaattacagccttcacaaatgattagttactaaattgtctttgcccttcttgtcttttatttcctattcaaattcttgaagaggaagaacccatcgaattagtcttaactttccatctttcttagtcatcaagtacttgattactaaatagtctttataaactatcgccttgttcctaatcaagtaacgccgaaacttatcacatgaaaatacaatggccaacatctccttttctatagtagcataatttaattgggaatcattcaaggttctactagcatagtagatagtacaaaaaatcttgtcaaccctttgtcccaacacagctctgatggcataatcactggcgtcagacataatctaaaatggcaactcccaatttagtgtagtgacaataggtgaagaaagtagtttttccttgagagtttgaaaggcttctaagcattccttcccaaactcaaaaggcactccattagcatgtaagttggacaaagattttaagatcttggagaagtccttgataaaccttcgatagaaagcaacatgacccaggaaagtacaaactcccttgactgacactagaggggataagttgtcaattgtagacaccttagctttatcaacatcaatgcctctttttcagattttatgccgtagtactatctcctctttcaccatgaagtggcacttctcctaatttaacaccatattagattcttcaaatctcatcaacactagttttaagttactcgaacaactatcaaatgaagactcaaacactgagaagtcatccataaaattctctatggaattcttaatcaaagaaaaaaaatagccatcatacacctttagaatgttccaggacattacaaaactcaaatggcattctttgaaaagtaaaagtgccatacggacatgtaaatgccatcttctctaggtcctctggtgcaatagctatttagtgataccttgagtggccataaaggaaatagtaatactcttgacccgccaatc

SEQ ID NO: 29923 - DNA, 2962 bp, Cannabis sativa
tatcgattaacatgtactttcttactcaacgcagatagaccggcttgacctgctctggacccagctcatagagaagtcgctgaaattctcagtagcctccctgtccaagatcgcaactggcgattactgtgcacgaccttaaagttgcgggaacacaaactaattccggagaacgccagccttcatcaagagccagtacacaaggagccatctaagaaacaaaaagagaagataaacaagcgtctttctaaacagacctcccgaccaacatcaggtaacacatcatgcatatatgcgatatatatatgattttattgtttatttttaacttatcttttgttgtcttcgcaaaaatgactttcctgaagcaagctcctgtgctcaattgcaagtcgaaaactggaacagtgacgacttctcctatcgttcctcagaagaggaagagtgatgtcgtcgtgacttttgtcgttgactcgtccaagaagcaggtgaagccttcgcaggacaaggggaagggtcatgattgacccggccgtcaaggcccgcgattttatgactctgtagagcaagtttgtgagcgacgagttcgtgtcgaaggtggaagcgatccctaccgaggaagtgatgtcgatagggttgtagctaaccacgcaattcatgaccttgttttcgagggcattcgtcgcaggttacaaagaagttgatcttctaaagaaacagatcgtccagctttaggaaaagaacaagaagctgaagcaggaagcgaatgccaaggataaagaacttgagaacctctagaagtccaaagagtaggtggaacttgtagcaaaactttctcgatcgaaggtcaaggagttgtctcacgatttggaggctgagaaggagaatcgaaaaaggcagtacgaccaagtagtctccgactatatatacgaccctgtccaagataccaaatttcgacttcgcactccttggagcagaggaggctgagatggcggaagcatttcgtgctatgtcgcctactcagactcaagggtgcggggggaatctttttcctaaggatgcagaggctgcgaatactgaagaggtcgctgatgaggctgctagcaaggtcgcagatgggtccactactccaactactcccaccgctccaaacgcttgacttattattatttctttaacttttaaacttttttagcggtacatgggtactcgcgttttgtacttggacaaattttactttactttcttttgtatttcgaacaacacatatcccttcgaggacacttatttatgctattattatgctttctgcggtacctgggtactcgcgtattctacaatcttaatcatagtttgcttttccaattacagcttggtgtaataatactaaaaaatgctaaggaaaaaaagtttttgaaacgtcgagaaatgaattactcttattataagaaaacgacagtacacagtaggcaaatcaatagtacaaaataggctagataccccttatacttagaacatttatacaaataaattaacgaagtataaatacacggtgagtactattgatttattatgagtactactgataataaaacttcagactttcgccattccaagctcttcggatcgcagtatcatcgacttctgcaagccgataagttgcatggccaattttttttcagcaataaggtatggtccttcccaattgtcaccgaaaactccatgtgttgggttttttgtgcttggcatgaatttttgcagaaccaaatcccctactcgtaaaatttgctcttttatcttagaattaaaatagcgagcagtacgttgctgataggctgcattctttagattggcctgatcgcgtttttcttctaaaagatcaagttggagcaattgcttgttcgcattttgactgatgttgaaaatagctcttcgtagggagcccgctccaacttcgactggtatcatagcttcgcatccatagaaaagcgagaaaggagttttgccagtcatggatcagggggttgtattatacgaccataaaacttgcgaaaggtcttctggacataactccttacgttctttgagttttcccgtaatggtatgcttaattattttattcacaacctctgtttccccattgctctgtggataggcaactactgaaaacacttttttaattcccaattcatcgcacacttggcgcatttccatacaatcgaactgttttccattatccgagataagtttgtaagggatgccatatcggcagatgatggaattatacacaaactctcgtaatttgacagttgtaatagtcgcaagggctttggcctcagcccacttggtgaaataatcgactgtgactacggcgtatttgactccgcccttccctttgggtaactctccaattaagtcgatgcctcaaactacgaagggcgaaggacttgttatggagtttaattgtcacattttttagcaaagtctgaggcgtctactcggagtgtcgaccaataatacccttgccgcattatttttaaggcaagggaattacccccggtgtgattgccgcagattccaccatgcacttcacggagtatgtaatcgcactcggctccataatgcatttgagcaacggttggctgaagcttctgcggtaaagcttgccatcataaatgacataccgagcagctcgataccgcaattttctagcctctatcttatctttgggtaggatttctttttccaaataatccattacgggagttatccgtgtgacttctctggcagtgtttatttccattacttcggttcgacttactgttgggtgagttaacacattgacaggaattatattgagtaattcagcttctcttattgaggccaaacgggccaaagcgtctgcatgagagttatgagcacggggtactcgagaaacaatcactttcttgaatttctgtag

SEQ ID NO: 29924 - DNA, 2870 bp, Cannabis sativa
tttttttttttttttttatttaacttcataaatattaattaattaatataaaatataattatttttttgcttaatttattaaattttttttatttttttaaaaaaataatgttttatttattaactttttttctcatcacttaaccttcggagttaccgtaatgaaagaactttttgcttggttgtctcgctctcttcgccgatctcctaaccctacgaatcaagcatctccgagcatctggtttcaacgagacatcagttagtcgccttctgctcattcttacccctaactattggaccacgttaattaagttggaacaggaatagctattgagctacgatacacgattaacatatttaaaaatctatatctatgtatataatagagagatataagaaatcctactttataaaaaattattttctaattattttattattttttttaaaaaaaaatcttctgccaaactctttaaataaattagataacagttatttatatatatacattaattctaaatcataaatggcatcacttttcctaaaatatatataaaaggatacattcactttttttcactcttattctctcatttggattacaactatatgataatagtattattaatatgaaggtaaagattatctatagatattattatattgttctctttagtatttttttattctttgaaccatacatatatttgtattagattgattttattgatttgaatagacatttttaagactttactagtagattattttctattttctgacttaattattattgattttatattacctttatgaattaagagagacaattttgacctttgtgatatactcatttttatttttatttattgtgatttttaatgagtgtgcattgtgataagagcataagactatagaaggaggctcttgatctaggatcaatgactttagatatgcaagtctttgataaacttttttttaacaactctaataaactatttggataatcacttttatgattttagaaaatttatgcattgttatgatgataaatcactttttgtttttgtatatattcacatatacatgaatttagtttttccacttatgtactttaccattaaacataaataaagaattaacaaattagagatatcatatctttaatgaaataatcacaaatttgaatattcaatttttttaatatttatatttaaatttaaattcaacttaaattattgttattttaaatatataacagataatttgataaagtaaattcatatcataattaaaaaagattaatgtggtgacgtgtttcgaatttctctaaatttattagctttgaatttaaaattatcatatattcttcaaaaatatacaattttctcttttgtttttctttaattcttttgtgtctccttttctttcaaatatatatatatatatatatatatggatttagttaaaatagaactcataaaatatattcattgataaaactcttacttttaacccttagatcttaatccaatgattaacaattgctgactaggcttaatggtgacttgctaacatggacatctatttaagatttattttaaaactaaaaaattaaactaataaagattcatttttaaattctttttcatttatttttcattctttacccattcattctcatttttttttttttttgaacaagaagaggattctttattcaaacagacaagaacaatacaccattcacaagcaaaaacaaggttgttggccgaagccccagccctcaaagccaacttgagattacattaaaaatatagctatcaagtttcccttttcccccaatacaaccgcttaattacctggtttttacacaagatttgatctcttaactcatagttctaggtgtcttacatttcatctcaaagatacaacaatttctattcgcccaaacagtgtataaggtcgccaatacaactgtattgagcactttttcctgcaggctgttggcagaattcgataaccattctctgatgtcggcaggccagtcaaaatggccacaccaacttgttatctcaatgatcactctacgggtgaagtagcagctaacaaacaggtgatggtgagtctccttttccaagcagcagaccagacaaaaatcagatgatatggagatcaatttgttgatattgtctctggttagcagttggttattcacaatttgccaacctatgaacctatgctttggaagaaccattcttatcccaaatgtttctagcatagtcaacagtgtgagcttggatataagagtaataaaacaattttaaattgaatttacctctctttacagcagcaatgattccggattcattaacagttgatcaaagacgaaggatctttttaaaataccagctcgcgtcttgtttgaaatcaactatccaaaagctcaaccctctcaagtaaatcgcatcaatccacctaacccaaagattgtcttgtttgcttgatatagcctaaaaaatatacttcgccataagagctatgttctatttcttcccttctctaaatccaagacctccagagttcttggaaagacaaactttctcccatgaggggatgtgcattttacttctgtttccattggagccccaaaggaagtccctgcaacatttttcaataatcaccgtgattttctgaggaagcacaaacaaactcatccaataattcatgactccaaggagaaccgaatgaatcaattgagccctctcgacaaaagagaggttcctactagcccaggtgtgcaggtgcttatgcattttgtcgatgataataccacagtcagcagctcgccatttggttggtcttagatt

SEQ ID NO: 29925 - DNA, 1511 bp, Cannabis sativa
gagatgccacacaatcaattgaattaaatgatatttgcaagttggtacaaaaattttacccaagagattttacagaatacgacatggtacagctaaagacgcaatttgaacattttgctcatgtacgagaacttcctgattttactgctttgacaactatttctaatgtatgtcattggtttgtaaaaagtactagagaagtagagatttttcaaattgtctataaaatgataactcttattcttacacttccagtttctatagccccacagaacgatttttttcagctatgaatatagtgaaaactacacttcgtaacaagatgatagatgaatttttaagtgattgtttgctcgtgtatatattgaaaaaaattgtcaattataactagttttatttttgtttatatttgagacattaattggtaacttcgtttagtaattttttcaagcgacaataattttcgtgatatgtaaaaaagacgatctgtattttaattttaattatgaatttaataaaacattgaaatttttgacacttaaatttagtttgccctctaactaaaactatttttttttttttttatactggtgatatttcccaagttaagcgaattcgtaagtttaactcatttttatatttatgtacaaaaaacatatctaattaacaacaaatttccgttccactagtgaagacccaagaaaccctttgtgttacttatttaattttaatactttatcttgtttatgaattatgatgataaatttaatgcatttactataagacagtaagaattaattgcatatataaacagcttaaataagcaaaataggtatcgaagagccgctcattaagttgattttttaaaacgtagccatatatggaagacaacaacaaactaaaataagcaaaatagaacaaaaatcagaaattgtgaaaaactgttcatattcaattgttggactaaccacaaaagtaaatttcaaccttcatcgctttagtgacacttcatggccattatatatagtttggaaaataatacggggcagcgctgccaagcaccaaaacatcttatgaatataaggacgatttcaatatcagatactcttatagtaaccatatatacatacttacctatctatattaaatgagttttgaagcacgaagcaccaaaaccctaattctagttttatcaattttataaaaagaatagtacaatttcatagcaacattgatctgttatatatacacacatttatatatatgtattattacacacacacatttatatacatgtacatataacacaaaatgataataaagcaaaaggtacgtaccaaataaagaacagtagaactgccagcaaaaacatgtcagagagatcgatttgcacattaagaatataaatattatagcctactgtcgagacgagaagatgaacaccaagttacacactatttgatatgtgatatacaagttataaatgggttcatgacagaaatatgcttgac

SEQ ID NO: 29926 - DNA, 3340 bp, Cannabis sativa
  modified_base (879)..(881): a, c, t, g, unknown or other
  modified_base (1096)..(1106): a, c, t, g, unknown or other
tttgatgagaatgtagtataccatactctgtttttctttatgaaatatataaaatcggtaaaagaaggtgattagacaaaatgttcttggtattgacagaaaagtgaacaaaggttttcctcttaacttcgttagatgatgtgtcaaattaaatgatatgtcagtacttaattggttgggacaggcttgggacagagaaaatgggacagcagatttttgttcgcatttaagggcggtttggtatgcaggtttattttatgagaatacgtttaacattgcttgaagagtgatgaagggaatgataaacttaggaaaacaacattaccctatttggagagttttaattcttttttacaataataataataataataattttttttttttataaaatactaataatttaatattttttttaaaataatttttatttattatttttcatataattttataaaaaaaaaattaacaataataaataattataaaaagtaaatttatatacaaatggataatatatttatttataaaatatatatacaaaaaataaggtaaatacttcacatattattttttaatttagggaatactttatattttaaatatttttatatacattagtattcatatataaaataattttaaaatgtaaaagtttgtttcaaactgccagtagcattggaaaaatcaattgtaagttaagtgaaaaccacatttttattgggttttccttgcgccaaactaaagcccactactttcagttagccaacattaaaatattaaaaacctaaccaaatacagtaaactttcagattgtcattcccacttcttccaataccgcataccaaagagtcccttaggtggcatttggttggaggnnntgaaatagaatggaatggaaatgaaacaattttcattccatccctttatttagttgtattttaaagtattggaatgacattctaatcgaatgctcttttcaccattttggtggaatgactattccgttttaaaaaggaaggaaagatcattccaatataacaaaagaaaaaatttaataattttttatcaataatttttatgtattttaaatttnnnnnnnnnnnattcctattcctattcctattcatattcccattctcattcctattcctatatttttattcctattcctattcccattctcattcctattcctattctaattctcattcctattagttagatgtaatggaatggaaagaaaacatgaattactaaaattagttggcgattagtgcatactatttatatcgcacatcaccataccatattttattgtggagttttgaagtttatgcggtgtgagtgcagtttgaaaaattgctcaaactacatatgtggtgcgcttaaaattggtgaaaaaccgctttactcgcactccatataccccaaatttaattatgagagcaaagattatttataaactaaatgccttgcctctctaagatacaaaactaacgggtttaactaactctctaactgctaaaacacgaaaaataactgtcctagcaaacataattagtaggcaaacaaatttgacataatactttgcatcttttgatttgaataactaacctcgcttttttgtcttcttttttctccatatgataagcgaaataaaaatgattgacaaaacaattacgcttgtaactgtaagagaaacaatcagatataacgattttcttctcgtaggcttcacaattgatgaatttgaagtttcaccatctggaaaaaggagacaaaaagcacacacacacaatctctaatttattgtcgacctgtaaaaaaaaaaactaaaaattaaaagagagacttatacgtacttaaatcggataaggcaactcgcacaaagaaggtgtgaacgccatccctagtaatattttcctcttgaagatcgtttagattttcagaccatgtccaacaactcaaattagttggtgttgaatccctctgttccaactattctgatgagtctcaagtgaataagcctggcatttgcaatcatcacggcaagtcttctcacattcagttacattgttaacgtgtatgcttgttgttgagtctcgtcttcccactttcatcatcgtcaacttcaagaatgtgtcatttttgcagagttttgttcctctgctacagacatctgagtaatatcccgaataccactcctccaccagactcgacttaaatcccggcaagcatctgcacgacctcatctgctcattactgttacagatcccgaaatcgccacaaatgtttagctcatcgcacctatcacttggtacagaccatgccactgcccaattttgatcatcccaagtcacgtactcaaattttccagtagagtagatcactaaccttgagtaactataatttgagacttcttgccctgttttgtaagtagtatttttttgttttggctcactattattttctaaaaggtttgttatcatagtcggcatctgatttgggcttaagaacataccgatttcaacacttttccagagagtactcgtttttttacggatcatgaacgagttagttccctcacccttagtaaacgatatgtcaccaatgtcagggtcaaactcgtgtttccatgaagtcaacgttaagctctcattctcatccatcttcataccgcgaagaaatgtatcagttgggtttttaaagctctcccacagccttataccgttagactcagttagcaccagatttccattatccgaaagggttaatgtcctgtttgaagatgaggaagattcaagtttcgatgaccaaaatgaccttcctgtaccagcagagtaatcaaacacttgaagattaccatcttctgcaataccaaaggttcctcctctagttcttgaagtggtgactagtggattttctcggttggcgacccaaacaaccgtccttggactgaccttgtagtaccatatcccaacatatcgttcttcactaggacttccctccggagtgaagaatccgagctcaaaaatttctttggcggaaacaagcttaattgtcttctctctactattgactttgtctctgatccaatcaccataattcatggtatctctagcagagcaaaaaagactggaatagcaccacaagaaagttaatacatatttgtggttgtgaacaaggactgggtgtttgttcttcttatccatttaattctttttttgatggcatttaactagaaacttttcttgaaaactctgtacagacgaacatatctcccatgtcccatctttgcgatttttggtttcacgtttgttaaaactcaagtgcccag

SEQ ID NO: 29927 - DNA, 5286 bp, Cannabis sativa
gcttcatatccatatgtcatggcaaatggagtctgtccagttgctgttttctcagttgtgcgatatgaccatagaaatttaggaagttcctccgaccaatttcctttagtatcttcaagtttcttctttagggtgtccttcaatgtcttgttgactgcttcaacttgaccattcgcttggggatgcgccaccgcggagaaattttttatgaatccatggttcgcacagaaatcagtgaaggattgactgtcaaattgtttgccattgtccaatactatcttgtatggtaatctgaaccgacaaattatgtttttcacaatgaagtcctgcacttttttggacgtgatggttgacaatggctcggcctccgtccacttggtaaagtaatcaactgcaaccactgtgtactgcactccgcctttgtctttgggcaactgtctgatcaggtcgattccccaaatggcaaaaggccacgaactttgcatgcgagtcagttagttgggcggtgcccgaggtatcttttaaaatctctggcatttattacatttcttaacgtaggccttggagtcttccatatttcggtcagatataatcttgccttagaattttcttggataaactctacccggctgtgtggttgccacaaaatccgtcatatacttctgacaaaagttgtgcagcttcttcttgtgtgacacatctaagtaatggcatggaaaatcctcttctatacataactccctctaccacgatgtaccgtgcaacctttctcctcattttctaagcttcgtttctgggagttatctattgttgaggtaggcctctattggcatcatccagtttggggatgtatcaataatttcaacctcttctttgctggtgatactgggttttttgagaaactggataggaatcagatttgctttatcatttacattgttgctcgcaagtcgagctaatgcatcaaaagtcgtgttctcttcccttggaatttgcttgagagcatagcttttgaactatgcaagcagatcgtgtattttgctcacataggctatcgtcttttcccctcaagcctcgtactctccggatacatgatttaccaccagctgtgaatcactgcagatctcaatgtgttcagccttcatctctcaggctagttttaggccagtgatcagagcttcatattcaacttcattattggatcccttgaatccaaattggactgcagcgtgcaggtgttgcccccaggcgagataagggcgattcctgcaccggatagttgatctgtagctgacccatccacatgtagcttccaagccggcttgtcttcactattactcggttgaagtatttgtactagttctcggttgttttctaaaatgctctcttctttactcgtacattcaactacaacatatgccaaggcttgacccttaatcgctgttcggggttgaaagataatctcatactggcccaactccactgcccatttgaccaactgtccagaggcgtccgatttttgcaatatttggcgtaatggttggtcagtgtattcccaaacaggatgagcctgaaagtagggccttagctttttcgttgcaaggattaggcaataagtgagcttttctatcaatggataccggccttaagcctcaatgactattttactgatgtaatagaccgagtgttggaaattgttttcttctctgatcaatacggcacttacagcatgttccatgacagccaggtatattcctaattcttctccgttcagaggttttgagagcacaagaggttttgcgatttgtgtttttagctcctgaaaagctttttcgcattcctccgtccattcaaattgcttacttcctcacagaaagttgaagaatgggacacacttgtctgttgactttgaaacaaatctgctgagtgcaacaatccgaccagtcaaactttcaacttccttagttttattggtgattatatatctaggagggcttgaatcttctctgaattggcctcaattcctcgggcattgattataaagcctagaaacttacctgagctgactccaaaggagcactttaggggattgagtttcatgttgtctttcctgaggaccttgaagcatttgtccaagtcatctatatgcccccccagccttcctggatttgacgagcatgtcatccacgtatacttccatctttcgtccgatctagtctttgaacatcttgtttaccaatctttggtatatacatccggcgtttttgagaccaaatggcatgaccttatagcagtgcagacccatatctgctcggaaacttgtatgttcttggtctggtggatgcttcttgatttgattgtaccccgaataggcatccacgaagcttaatatttcgtgccctgctgttgtgtccacaagttgatcttttcctggaagtggaaaaacagtcttttgggcacgccttattgaggtccgtgaaatcaatacatacttgccatttcttgttaggcttggggtaccagaacgagattagcaacccaggccgggtagaaagcttcgattatgaaattattgttgcacagcttttgtacctcttcttttagtgctagggctcgctcgttgtccaacaatcttcttttttgttgaacaacacggaaattaggatcaatatttaagacgtttgaaaatatagaaggatcgattccgaccatatcctcttgtgacaatgcaaaaatatccaggtttgctctcagaattttaatcaatgttgattttacttcgagcaacataccttttcctattttgagtttcctggtcggaacatttgggtcgattctgatttcttctaattcttccaccagaccaacattggtatttggttccccaagtcggggatccacatcttcatccccgccttgggcggttccctatttggcaatgttttttcccttatttgaactctagctagaggatacttcctttttagccttggttagggcaaggttgtaactttcccgggcaacctgttgatttcctctcaggcaccccactccattatgtgttggaaacttaaggcatgaatgtaatatcgacgtaacaacctttaggtcatataaagctgatcggcctaacatgacattaaaggttgatggaacatccaatatcaagaattttgccattacagttatgctctttggagcttgcccaacagtgaggggtaggcgaatttgccctagaagtgcaacactctggctggagaaaccatacacgggctgaagatatggggttaagtatttgagttggagccccatcttttcatatggtgtcttgaacaagatatttgcagaggcttcattatctatcatagttcgagccaccattttggtggctctctagacttccacgaccaatgagtcgttgtgtgggaaattaatcttgagggcatcttcatcattaaatgttatggtgggttcccctgcccgtggtatttttggcttcctttcttcaacaaccagaacaacttcttcttgctcgtgctgtaatgttcgggcatacctttcccaggctttgcctgaataatctccagctatgtgcggtcctccaataatgacttgtaaatgctcgtccaccggtggtggcagtaaatcttgattattatctgtctaggcagccctctgattttgatcggtcttagcatatttttgcacgtgtcggttattctttcttataaaaaattcaatttcctgcttcagattgttgcattcgttggtgtcatggccataatctgcatgaaaacgacaaaacttggtcatgtctctcttacttacgtcctttttcatgggagcgggtttcttgtacggagctaatgactgagtagccatgtagatagtctctaaatcttctatgaggacagagaaagcagtaaacttagtaggattttccctagggacctgttcaattttgtcagcaaattttccctttttcccattatcttgtctattgttgttgttggaccgcttactgtttgagcttgaattgctcaggtacaaagggagctggatggatgttccggtaaagggagcttttggttggccaggtttaaattcgacttatgctcgctgaatggcctcttccagcttgatgaagccatctgcacgatcaaggaagtcactcatagaatcgactagttcgtttcttttgacatccttccaaagttctccgaagacttcaatgccccccagttaggggtgagcaacggtcggtttggttggttttttacacaaaaaaaatccgaaatttggttttcgattttcatggttataatccgaaaactgaccgaccattatacaaatgtaaaaaaatcgaccgttttaatccacagtttcgtcgatttaaaccgaccaaaccaaacatcatttttttttaaaaaaaaaataagtttttaaattttttataattatttgaaaactaaaaaaataagagtattgtatcaaatatcatataatttaagaatataactttcttagttaaataaataatgtaaaataaactttttttaaatttgttcaaattatttgtcctactaatttggtaatgagttatattaaaaaacttgtattattttatgaatgtgtatatatattatgtaaatgcatcaagctataataaaataaagcaatgaataattgagactttaaataaaaaagatataagtaaaactagtttaataaaattttatattaaatatgtacaaaaataatatatgtttggtcagttctcggtttaattggtctattttccattgacactaaaaccgaccatgttaaggcagtttaagccgaaggcggttttttcggttttcaatttttttggtgtcggtttttttcatgttcggacagtcggtgtatccggtttggtcagttttttggattttttactcacccatacccccagtatcgcggtcaacttcccttctttagtcaactgcgcaaccttcactgcctccgtcatgaatctgcttatgtaagctcggagaggctctcctggcctttgcttcacttcgaccaggtcttctaaatgcaacatgagttggtgagaagaagagaattgttcatggaattccgagggaaaagccttccaagagttgaacctttcgagtgtttacttgaaataccactgttgggaggcttctgtgagggtggcaggaaaaacactacaacatacatctcctcgtactccatgtaggtccatttgcatttcaaaatacttaagatgtgataagggat

SEQ ID NO: 29928 - DNA, 2931 bp, Cannabis sativa
  modified_base (27)..(44): a, c, t, g, unknown or other
agagagagaaggagagagagagagagnnnnnnnnnnnnnnnnnnagagagagagagagagagaagaacgattggtttagtcaatggaagctagtggtagctgtcgggcagaggtgagtgagggaggcgaaattggagggtggatggggtcataaggattaagctgtagggttaatgaaaatacagtgttttaatttctaatttctaatttgttttagtttttattttcttttgtttatttttttgtatattattattgttgttttttatttatttggtaaaaaagaaaaaatattattgttgttttttattgttatgttattattgatgtttttttttttgtataattttgtatatttagagggttaaatacaaataaaatattaattgagaggatttagccgccaaaaactcaaaaatttatagttgttcaacaccaaaattaataacataaattaaaataagcaggctctctaatctcttttgataattttatatgtaaaaatataaacaagctacattgttattctaaaaaacacaatctctataagaattgttgcaagatacatacacgaggtcaccaccgccagataggctaattttaggtgcattatataaagtgttttagatgtgtatttcaattaattatattttttttgtgtagaattacacttgttttctcttacacaggctgatgcagaagctagcccctcaattgttgcaggttagctctcagtcaataactcttactattatgttttgttaaattatggggccactcaatcttatgtggcagccagaataattggtaaattggataagccatgtgataaatatgataaagggtttagaaccctactgcttggtggagaattagttatctccaaaaggtaagttagctctatgccgattagaattgaaggtaaggagtacgtgctgatttagtagaattgggtttagcaaattttgacattatacttgggatggatttcttgtccaagtatgctactagtattgactgtaagtggaagatggtgatttttcaacatgagggagaggaaccatttgtgtttataggattagttcagagatcccgaactctagtgatctcagtattgaaagccaaatattttttacaagataggtttctagggtttttagcagtggtgctggataccactcggcctaaatttgttaggcttgaagatattaaagtggttcaagagtttctagatgtgtttcccaatgaacttttgggcttaccaccgcagcaggagatagactttgtaattgatttggctcttggagcagagccaatttctaaggcaccatatagaatggatcctacagaacttaaagaattgaaaattcaacttcaggggatgcttgatttagggttttctaaacccagtgtgtcaccctaaggagttcatgtgttgtttgttaaaaagaaagacggattgctttgcatgtgtattgactaccaagaattaaataaattgactattaagaataagtactatcctttacccaggttcaatgatttgttcgatcaacttcaggggaagatagttttttctaagattgatctctgattgggctatcatcagttgagaatctgagaggaggacattccaaagactaccttttggttatgtcttttggactaaccaatgctctggtagctttcatgaatttgatgaatagggtattcaatgatttccttgatatatgtgttatagtgtttatcaatgatatccttgtgtactctcagttagaaatggagcatgagcagcacctacgaatggttttacaacaattacgagaacataagctcaatgctaagttcaagaaatagtcatagaaattagaagttttttaggtttggctggttattattgccggtttgttgaggggttttctaagatttcaacgcccttaccggagttaactaagaagaatcaacaatttttagggacagacaagtgtgaagcaagttttcaagagttaaaaaagcatttgattacaaccccagtgctagcactaccgtcagatcaagaaaagtttgtggtctactctgatgcatccagacaaggtctaggatgtgttctgatacaagctaatagggttattccttatgtctcttgtcaattgaggaagtatgaacaaaaatacccaactcatgactaagagattattgtaatggtttttgccttggggattcggtgacactatctctacggagaaaagtgtgagatttacaccgatcataagagccttaaatatttattttctcagaaagatttgaatatgagacagaggtggtggttggagctggttaaggattatgattgtgtaatcttttatcatccccggaaggccaatgtagtggcagatgccctaagtaggaagggtcccgagcaagtatctaccatagttataattttaccccagctagcagatgacatggtcagataaggtattgaatttattgtgggaaaacttaataatttgatgctacaatcagatttgttagacagaattagagctgcccagctagctgattcagagttagtaaagatctgagaagaagttttagttgaagctaaagacacagtgtcaggtaatgggatgctgtgatacaaaactagagtttgcgttctgaacagtatggaactaagaaatgagattctcgaagaagctcataccactccctattctctgcatcctggcactaccaaaatgtatcaggacttaaaatccttttattggtggtacgggatgaagaaggatgttgtagaatgcgtatctcggtgcttgacttgtaagctgattaaggctaaacaccaaaaacctgcagggttgttgcagcctttgactcttcctgagtggaaataggagaatgtcaccatggatttcgtggttgggttac

SEQ ID NO: 29929 - DNA, 1478 bp, Cannabis sativa
  modified_base (692)..(698): a, c, t, g, unknown or other
  modified_base (1249)..(1255): a, c, t, g, unknown or other
aatccatttaagctctcttcaactgtgcagtcccatacctacacagtctcagaatcatccatctggaccttcccgaggcaatgagggattgcacaacttagccgatatttttccttacggatctcgagactactgactgtcacacaaagcatattattataaagctccatttttttaagagagattgtggagaaaggaactaacaataatgctaagattgatactgaagataagccctcagacatattaaccaaagttgatttcaagcaaaatgtctgagtactgcttggaattgatcaatattggggttagctaagccctcaaggcttgattgatcaatgtttggctcatcttaacttgaaccaaggtggacatttgtgaggaatggttataagttacaatttttagttagctaagttagttatttactaacttggatagagtttgttagctagaagttaacttgagcagggatagttatttctgttagagtgtaacgtcctcgcttcaagcctctattgggtacaccccggctcttatacacgagtacatcactctggctgctccataaaatgacgactgaccctacagaccaacacgagtatttctagcatgctttgtcctcactcgcatgcctcctcggaaaacttcccaggaggttacccatcctgaaattaccccaggtcaagcannnnnnnccgtggagttctttcgtgatgggataccgaaaaataagctgcaccttgttgattagatattaccaatcaatccatttaagcatttttcaaatgtgtagtcctgtacctacacagtctcagaatcatcacacttgaccttccccacacacttgaccttccccaggtgatattgaccttccccaggtgatatgggattccccaggtgatatgggattgccaaccttatccggtatttacccttacggatcatgggactaataactatcacaatcaccccttacagggtctgatgtcctcgtcgatcacacttctggctgggtcaaggctctgataccatttgtaatgtctcggattcaagcctccattgggctcttacacccacagaatgatggctcttctacacaagtacattactctggctgcttcatagaatgacgactgaccatacagaccaatacgagtgtttccagcatgctttgtcctcactcgcatacatcctaagaaaacttcccaggaggtcacccatcctaaaattaccccaggtcaagcannnnnnnccgtggagttctttcgtgatgggctaccaaaaaacaagatgcatcttgttgatataggtagaaccaatcaatccatttaagccctcttcaattgtgtagtcccatacctacacagtctcggaattaatcatttgtgatagtcagtagtcccgtgatctgtaaggggaaataccaggtaagctgtgcaatcccacatcgcttgggaaaggtcaagtgggatgat

SEQ ID NO: 29930 - DNA, 2064 bp, Cannabis sativa
aaaattgtaagaacaaaaagttgattatttgattttatcaatcgaaactacgtacgaagaatattgttctatattattttacttttagctaatcacgtacgttacgtaacatatattacgaaaagtcatgttattaattgtcaaagataaacttaaattgtgttgaaaaattaatcttcaaaaaaggactatatatattaattaactttacataaatattgtaaagaataattattaaaagaatattagtttgccaaagttatattttatggtgtttattggaaatttttaaattaatatctttgttgagttatagcattttaattaaaatataattagtatggtcctaataatattcttacatagatttttttattgtatataaaagaaatataattactcattcttaacattgtgctcatagctagatatacatatactaacgtactttccttgcaaaggagatgatgctgctctagctagctaattatcttccaattactaaaatcaaatttggttatggtttgacatagtaatagaatataataaataaatagtcttataaaaactaaataaatgacaaatatatattttttttaaattatgatcgagttttctcctttgagttacaatactatacacatttcttttaaataatttgctaaatgtgacactaatataccacaatttaatagtccatactaaaaataaatgtttaaatgacagactaattaataacaaatatatatgtatttacatttttaaagttaatgtttgtatgtttagtgtttataaaattagatttcgactaacacaaagtagttaaaatagacatgggtaatgcaactaaaaaaactagcaaagtgtaaccgaaagaaaatattttgcaataatttttatagtttgaggataattttttataacaaacaaaaaaaaaaacaaaaaattgatagtgacaaaactttgtaagagtaagttatagatttatatttgaggcctcgggtgaatcttgtttgttctttagggtaagaataaaggtcctacgtagcctatagtttcagatctaatcttataaaaaagaggttccaaattctaagttagccatatccattgtatacgaaaaagaaaataacaacaataagggttgggacattaatttgttttaatcatattgattagcttagttggcacacgtaacgtaagcattgaagagacttacaaagataattaaacattgcaaattggcaataaaacttcatgaaaaatattgattaatcgtatttccacgcgcaaaattaaagttttaatatttattgtactcattatacttgtttcattgcggttgttgggtattgacaaaaagttctaatacaatattattacacttaataaaagaaggaataatgttttggcttggcaccctattttcctcgtatttatatataacaataatgtactctaaaattgtccaaactctagattttatatgtctactactactactactatatatatataatgtataggctttcctaaaattagttcaaagtcatcattttgtgttgcttggaatttattgaacaaaaatgcacaaaatccattgctgtataacaatatatatttatatatgtataatgttggcttctccaaaattgtataaaagtttttgtttatcatccatgtcttttgggaatttcttgtctattgtcattttctttagcttgatcttttctcttcattgagtttgatgttttgtacgttttgattatttgggctgctaattttgtgatagtttgccaacttactataatgttatatcaaagaaaggtggctcatcatttattgtctctatttttttggggattagatcaaatttatatccatctacattttgtgtctatgatttgtttcatcaatgtatttggctacactttgttgggtcattctttattgtacgattaactttaacgaatgctaaaacagttggtatcaatcattcaacatgatcgaaattgagtcttttttagtttaattttggttatgcattcaaggggttgttcaaaa

SEQ ID NO: 29931 - DNA, 1920 bp, Cannabis sativa
gtcctgagattcaagaatactacgtcaaatgaaacttagattggaaccaatctgggttgataaaaaaagtaccatttggatagtatcttgctttgaagagttttgacattaaggaatctggctttgttaagagtctccatccttgtttccccaaaactttgtcattagcttctcaatatctctacttatctccaaaggaagaagaaatgcactcattgcatagctaagcaacgcttagatcacagatttcaccagaatctcccttccagcacgcgaaagaaacttacttttacaactttgaaggtgcttgcaaactttagtcttgaggtaacccaacaccggtattttattacaattcatagtgctaggcaaccccaagtaaaaactatcctcagacgcgacattcatccttaggagggaacaaagatgactgcgaactagttactctatattggtactgaaaaagatcgaggacttagtaaagtttacttgttgccccgaagccatctcaaattttcgaagaacctcttgaattctaacttcctcttcaattgtggccttacagtagagataattgtcgtccgcaaagagcatataagaaacatgaggtgccccgttgggccgttggccactttgcaaccatgaattcaaccattattttcatacttacgaagaatttctaaaaggctttctgcacacaagatgaatagataagacaaaaggggatcacgctctctaatacctcgagttggagtaataggcccgaaacatgactaccatggacaatcatatatctagctgaggaaacacaactcatgataaggttaatccatctttccatgaatcccaactgtcgaagaagagcttctaagaaagaccaattaataagatcaaacgctttgctcatgtctaactttaacggcataaatctagctttgccaagccttttccgtttcaaatagtggagaacttcgaaggagaccaacacgtagtctgaaatcaacctactcggaatgaaaacactttgagattcaacaacaatagcatccataaacggctccatcaggttggccataaccttagtgatcaccttataaagcacattacaaagcgcgatcagcctcaaatcctttattgagtcagggctcttcatttttgggattgaaacgacgttggcagcaccacaactatatcaaaaaagcgctaaaccatagaaataacatcattcttcacaatgggccaacacttttgaaagaatgcaggtgtcataccatccggacgcgggcttttgtctggatgcatttggaagatcgccttacgcacttcttcctctgaaactggcttagcaagctcaaaattcatcaactctgggacagattgatctacacaatccacaacttcatggcaagatgcaatcgacgaagaaaataaattagagaaataatcaaccattacctctgctaggccatgatcccagtccacccaaacacccttggagctattcagcttagtgatgttattgtttctctttcgagatcttgtagccttgtgaaaatacttactattttggtccccttccttgagccacaactgtttcgccctttgcttccagaatatctcacgttggtccaaaatctcaaacaattttttcttcacatcgctgtaaagctgaactaaaattgcatctctcttattcttcaactgttttagctccgttttacaatgcttgatacgctttcgaaaattacctataatttctttaccccattgagatagattagtagcacacaaactaattttctcagctactgccatagacgagtctaaaaaccaacaatcttccacgattttaaaacacaaaggttcttttaaccacgtgttttcaaagcaaaaacaattagtcggagcaaaagaaacagc

SEQ ID NO: 29932 - DNA, 2353 bp, Cannabis sativa
tttaattccatatttctagtggagtaatcatggaattaataaacaaagattattagattgatgagactataaataaatctaatttattgaaacttagaattataagtccatagtcacgggatctcgccacagtaaaacactattaaggggtaggataaatgttgtatatggaagttcaaaaaaaattattttgaattagcaaaatagtaattatttatttttataataaataattttttaaattaattaaatagggaaaaaagttatttagacaaaaattgtcaagacaaaattaaaagttgtctagacaaaagacatcatccttgtcttaattaagacaaggtaggcgcctactctattgtagggtgcccctattagttttgtattttgtggtaaattaattaattgattaattcaattagataaatatttaaatttgaaaagtggttaaagatatttcaagttggttgagatattctctcaaagtagttgagatattctctcaagtggttgagagattccctcatctgatttattggtaacctaattcggttatagatatttatttaaatatttaaatatgatttaattaattaaaaattaactactataaatataagcccgatttgagaaatcaatgcttctagattatagaattcgaaagtaattgggattaaagaaaaattatttttctctatcaaactattcttgctcatgagttgagaattcaacaagattctaatgtatactttatcctaatagcccacactattccttgtgtgtggttgattgatcttgaagactacggtctgagtttttaatcaacctgaaaggatacaacttacgaaaagaatcaagaataacctaataggcttcaagaggtatttatttctttgatgcaatttatgttttgatttaataattatacatctggagattcttaggactatggtacgatgataatcagatatacaattcttctattgtgtacctaatttagtaccataaaactaaaagtatattatatagctatgtagctgacatataagaaataacggtattggtgtacatagagttgcaccgagatactgacaaatatatgtaagataatattggaaagtataaattaatgctaacaacactagtacgactagagtactgagtgcaatttagtattatgattaattaaactacaattatgaacgtttgagacttagacatacacattagatgtgggtagtgaaattatggtaattgggtgtatacgtggtcaattacaagtcagattaatattattgtgtatgttatgtttttttactgagtctgtcgactcatatatatattttcatgtgtaggcaaaggcgaagcgaaagctaaagctaaacaacaatgagtggtgagcttggtaaagtttgtacatatccagacatatagacttaaaggattgcgatcttcgggacaccgttgttagtatttttggttatgccgttagactacaacttttgattattgtatttattatgcttgttttataaatagattttgggatcctagattataaatattttgtaaaagtttttaaagtttattaaatttttatatgttacaaaaattttgttaaacacacttttatgttaaaatcctttgattagcaagagttagtacagtaattaagaaaataatgtaacgtgtatagggtattatagcactactcgcccatacttgtttttcaacaccttgggcaatgttttgactagtttttttttttaatgttgattcatatgttcttatttttagggctcaaaaacttgtggaaccctaatatggaaacaatgccatctttttagccaaaaacatgacaccgctcgcccaaagcactccaccaccatttggtggctttgtttcacgagttttattgttagataaatacatttgaccaattactccttctctttctctttataggagtagtgctatctttttgaccaaaaaaataacactgctagcgtagcatgctattccacctttgagtggctcttttcatttattttatactctttgatattggaaaaacacacttggtcaattttccttttgtcatttttcttaggggagcagtgctatttttttggtgaaaaagatggcagtgctccccttgcacctttgagggtgtgtttttgtacaatccggactcactgtttaggtcttggtctccttgtatctcaatgagtcaatttcttgttaaatttctcatcagattagggttttggagcaaaaaccctacttcagattcatgaaaccttaggtttggaaccctagggtgtgagcatggtagtgcttgcatgaccttctt

SEQ ID NO: 29933 - DNA, 2180 bp, Cannabis sativa
tcttataataaaaaattcttataacatattatatatttttgaagttaaatgatatatatttcttttaataatcaatgaccacgatttttatttcaattcactccaactatatatactgataatatctatataattaatttaccaaaagaaaatatatatataattaagaaggttgaggagagaaaactgtaaacataaacgaatgaaaagaattctctgtattgattatgagaagctagaacaaatgatttatatacaagagaagagaaagcagaggaaaagaaaacagaaccacacaactaacagaaagttgttacagtgaatttgaatacagagaaaataacagaaagttagttgagaggattaactaactcttctactcttaacagcccccctcaaatgaagtgtcctctgggcaagagacactgaatttgcttctcaatacttgaaaccgattacttgagatgggctttgtgaggcagtctgcaatctggtgctcagtaggaacatgctgcacttgaatttccttgttaagcaccttatcacggacaaaatatagattgatttcaatatgtttagttcgagcatgcagaataggatttgcagcaagcataaccgaactaatgttatcacaccatatcatgggaggaggagcagctggaatatgaagttcagtgagtaaggatttgagccaagagatttcagacactactgctgctaggcttcgaaattcagcctctgtggaagatcgagaaattgttggttgtttcttggactgccaagatatcaaattgccaccaaaaaagacacaaaacccagttgtggaccttctatcatcagggtcagctgcccaatcagcatcgcagtatgcttcaagatgaaaattagggactttatgcaagtgaagtccataatcaagggtaccagccaaatatctcagaatcctcttcacagccacccaatgagattgaagaggattatgcatgaattgacaaactttattgacactaaaggcaatatcaggtctagtgatagtagcatattggagagcaccaacaatagatctatatgaagtaggatcaaggacaggatcactaccatatgtagataacttgagtccactgttcataggagaactatgagttttagcaccttgcatctcagccttgcaaagtaaatcctgtatacttcttttgagaaagaagaagaccggttgctgttggaagtgcctttatgccaagaaagtaattcaaagtacctagatctttaagagcaaaagacttgtgtaacctggttatcaaggcagagactaaagcatcattagaaccggttatcaaaatatcatccacatagattaaaacatacaaacaacagtaggaatctatcttaacaaaaagagagtgatctgattttgctgaagtgaagccgagagtgagtaagacagatgataatttgtcaaaccaagctcttggggcctgcttgagaccatagatagccttttgaagtttgcacactttgtgaggagccgtgggatctacaaagccaggtggctgaaccatatatatttcctcttgcaaatcaccatttaaaaaggcattgttgacatctagttgcctaactggtcaacctttggtgagagcaattgttagcacaattctaatagttacaggcttgataactggactaaaggtttcattaaaatcatacccttcttgttgatgataaccttttagccactagtcttgctttgtatagaataacattgccttcttcatcttcttttattctgtagacccacttacaacctataggttctctgccttcaggaagatgaacaaggatccaggttttgttcttttgtaaagcaagcctttcattatccatggctttaagccatttttcattttgcatagctgctcaaacagtttttggataaagagaggccattaataccttgggtttccttataccagattttgatctagtacacataggatgcttatttgctactgttggtatactgctggaactcgatgcaacagtagcatcatgggttgtatgagttgttgttgtaggtacagtagcagtaggtggacagtggacagtagtagcaggtggtccaacggttatatttgattgttgaattggtgcaacatggtcaggaggcaatgttgatgatg

SEQ ID NO: 29934 - DNA, 1364 bp, Cannabis sativa
  modified_base (449)..(450): a, c, t, g, unknown or other
cttcaccatatggggtaagtacatttttagatgaaaatattttgtgagagaaaaactattaagtatgtttaaatcgaatatattttgtatgagaatgattagcaatttttataaaaaataataattataatattaaaatatagagaaactgatatttaattataataatagtgaaataataatttgtatcaatgtattttcctacttataagaggcaacattagaactatcttatatggaatattattattttcaattaaaatattgagattcgatactaaattatactaatagtgacatctcattagtgttttgagctccgaaaaaattacatgaagaaaaaaaaaatagctagaaaccaggtcgggccctgatcatagacggactaagcttgtgcctaggacccacttagcccatgagccccattttttttttaaaattacacattnntttactgattttgaaaaatatcatatctttttttttaaaaaataaaagtctaaatatgtatattttttcatggctcacaatattggttgtaatggtaatgttttatatgttatgttctctcatgatgttataaatttatttatattatcaaaggtgttggatcctcatccttcattagtggcttcaaagcttttggaaaggaagaaatttaaagataatggaaaacaattcaacatgatagcttgttcttggatacaatttatgattcatgattgggttgatcatttggaagatactaaccaggtaattaagataaattaattaacattattttatttaattttgtatattgacctatttaatcaattaattaaattaaaatttacaagagatttttgaaaaacagatggaaataattggagttggtgaagaagaaaatattgctagtaatggatgtcctctaaagtcatttaagttctttaagaccaaaaaagttcccacattcacacctcaaataaattttggatgcttgaacacaagaactccttggtggtaagtaattaacttataattaataatgagattactctttcattagtttattaatattcactaaaatattgcatataataatataattaatagttcatattactcaaatttgttgttgttgttgatattgcttacttcatacaatattcctcttaccattttgaagattggttgggtttttgattttaattttatcttcttaagaagttttttttttttttcgagaaagttattaaaattaacttctattaaaagtgatttttagtgctgaaagctaaaatttattaattatccaaacaacaatagcagtgctttcaagcttaaaaacagcttttaaaagcacaaccaaccaagatcattac

SEQ ID NO: 29935 - DNA, 3784 bp, Cannabis sativa
  modified_base (1389)..(1419): a, c, t, g, unknown or other
tatatgtatatgtcctaatataatgatgtgagtgtaataaaattaaaaaacacagccagatataatggctcccgaaatggcaattttagctgctgctatgaacacatcaaagtatgtattcatgtctggaacctctatggcttgtccacatgtatctggggctgctactttcatcaagtctgttcaccctacatggactacttctatgatcaaatcagcacttataacaaccggtatataaatatatatatgcccctctctctctctcaatatatatagcttttaatactgggtcggcaaactttaaattgagtaggcttttttatattatttattaaattaaatcggtaagagccatgagtagtgtagtgtgtgcaataccacgaaaaatgttactatagtttggttatatgtataatttaatatattgcgtctcacatattttcttttaatactgcaatgcataaaacctataaatttacactagctatgacctgaatttttgtttctcatttgggcacaaccaacagcaagtgcatatgacaacacaggcaaaccaataagaaatgaactaaacctagtggcaagcccacacgaggctggatctggagaattaaaccatatgaaagctctagacccagggctagtcttcgatacaaccacacaagactatttcaatttcctctgttactacggttataaagaggcaaaaataaaatccgtacttaagggagcaaatttattccaatgccctaaaaactcaaagccagaactgatcacagacattaattacccatccatctctattggcaatcttaaacgacagcaatcaagtcctacagtcgtcaaaaggactgtgaccaatgtaggagcctccacctcaacatacactgttcgagtcaattctcccaaaggcttagttgtaaaggttaatcctgataggattgtgttcagcaacagcttgaacaagacttcctttgaggtgtcgtttgatggcaaaggggctgttagtgggtataattttggagatattacttggtctgatggtcttgatcattctgtgcgtgttgtgtatgttgtcaaagtagtataattttactttgccaattatatataatatagtaatatatcttaatcttatgtagtgataattaatgtaaacagtaaatgcatgccatgattcatgcatgcagatatgtttttactttataatttggcaaaggaattgcttgacaggcaaagtggccatggaatagttctatttaaattttgtagatcactattgtctacaacttttgaatttattatcaaaagttataacaatatattattgaataaataaaaagttgttttttttcttacttctccaccttattattattattattnnnnnnnnnnnnnnnnnnnnnnnnnnnnnnnttattattattattattatatttagaattaattatcttccttaacacacccacccactagggtctctgtgtttaaaaaaccataaccatcacattcctttccattctagtagggccgacactgagagtaggtgagttaagcgtgtgctttgggcccccgaacactcaggatcctgaaattatgaaaaaaataatattaatatatagataaaatattaaataagaagaaaacataacaaacattatttggtgtagtgttaaagggaattactttaagtcaagaggtcaagggttgaatttccaacctagacttttctattctttttttaaatatttaatgtgtagttatgaaggattgaaccttggagctattaagagtttttaaaagatttaccattacactaaagcactagaactatcattttgataatgattaaactatatataggggtcccaaaattttattttgtcttaggccccatatatcttaggactggccctgcatgatttgaatgtagcaatactttaaggctataagtagttttgtgttatagctagtctcattataaactttagttgtttttggtattcttagttgttgtttgtctctgtctagtgttgtttgtgttgttccttttcttagtgtcgtataagcttttattagtttagcggcaggtcatttacttgtgcacaaacggtacagtttaggtattacatatatatatagaataattagtatttttgtcaatgaactttccgattctaccttaaaatatacggttggttaaaatttctcctgaaatataatagatatataattatgccccttatactaggttctgtttcttttaccgttaaaaattagcatttttaccttctgaccaatataaaattttgcattcttttattaaaaaaaaaaacaactttaaaaattataatgttttattaattctgaaataaaaaatataaattattaaaaaacctgataaaagtatttaattaattataaaaatattaagtttacttaaaaaactttgaggggtacgatttgatagttgtcaaagtttaaaaggaaaaattgctaatttacaaaaatacgtcagtatttaaacaaaatgatgagacacaacctaatagaatgactaaatttctataaatgtaaaagttcagggggaatttttaacaagtcgtatattctaggggacataatcgtttttgtcgaaagttcagagggaaaaattgctaattattcttatatatataattgttatccatgtttctagatggagaacacgtgtaatttcgagatggttttagctcagtttcttcaggcccaatcgtaggcccaaccaagataatggattgacaccactacaaaattagcctttagaggcggttattttagctgagtaatataaaaagggtagccaaagaattttgttctcatgaaaaagcctatggagtcggtttttatgaaaaaaccgactccatagaggacaagtgtaattttgaagggcctacggagtcagttattatgtaataactgactccataggggacacgtgtatgtgtacccctatggagtcggttattacataataacccactctatagggccttaaaatcccttcaaccaaccctaatgaatcacttcgtctcctccaacatcaatctcctgcccaaatacccaatcgaaaccctcaccaaccatcgccgattcagccctaaattcccatttctccaccatttttttttcttcatttttttccaaaatttatcattttcaacacccaaaaagatattactggtattagaataacaatatttagtcttataagtgcaaagtgagtgtgttggtgcggttgtgttggttgtagctccgacgaccgaatttgacataaaaatattgaatcttaacgtttattaaggtaaaattttgatctttaataattttattgaggtacaatgcattatttttggtttagtaaattttattagggtttttcttgttaagcttgtgagttctttgggggttgcggtggtggccgaattttttattggtgttggtggcagatttcggtaataaggtaaaaatttaatctttgatagttttattataaatttttttggattggaatgatttttgtattagtgattgtgtttgtgttatactaatagttttgttacaaatttattattttcctttgatattaatatgttaaatattgtgattgaaagatgaaaagtgaaattgagaatgagataggagagtattaaaataaattttagaaattaggttttaaaaaatatgttagtgagatataatctattataaatgcccaggtaatttagtttttttttttttt

SEQ ID NO: 29936 - DNA, 2008 bp, Cannabis sativa
aaaaaccaactttccataagataattgcttctcttacaagaagttttcatacaagaaaatttcagctgtaaaaatgcatctttcctaacatagaaaagagtaattgacaccgaataaacaaggtaagaaaatcgggtatgaatgcaaatcgatcttaccatcaaagaaaaatattttgtcatctaacttgccaaaaaaaaactttatagttgtgtctatactcaaagtgtatttattttgggtcgtctaatctccgacaatataatggtctattttgaagtcatgcactacttgaaaagaaaaaggagaggttaggaaaatagtatgtctcttaagttggatatgggtaaggcatatgatagggtggaatggggttatctttgtgcgatttttcttcaaatgggattcacagagagatgggttgatttgattcttacttaagtcacttcagtgtcttatactattgtgtacagtggtagagagatggggcctatctttccaactcgtggcattcaacaaggagatcaattgtctccatattaatttataatgtgtgtcgagggtctttcctcatagattcgagtatatgaatctcaaaagtggattaaaggaattaaagtttgcaggcaagctcctgttatctctcatatgttttttgttgaacaaaaggcaatcactaacttattttgatgataaataaatattaattattatttattactaatcatttatttatcattttgcaagaaaattcacaaagtatcaatatttgctcgataaagtcaaacataatcaaggaagtaggttcatcaagtatatcaattacttcatacttcataagtactaaagtttcatgaatagatcaagaatttaagaccctatccaaaagaggacttcaaaagctcaaagtcaaaagtcaactcttagaaagagtcaacttggatcaaaacatgaaaatcaagttaggaagctcatctacatcaagactacacacaatcaaatggtataagtttaatttagtcttgttaaagtgatttgcatagtacactagggtttataagtttaaaagtttggctcattaacttgtgctacaagttatttcacaaaaatgatatctaaattttattaaattaatttttaagattacatatcatttaactaagagaatgcaactggaatttttaaaattggataaatgagtaaacaattatgcacattttagtttaaaaaaatgaaccttttaccccaattagccatcgagaatttatgttcccatccggaattctagttcctaaaatgaattctgattgtaaccaatctagaattctggatcacgacaaaattggcctcaaaaaatgtgttaatggctataaacggctagttttcattcctacactacataaacacattttcactcaaaaattaaggttagttgagcttctatttatcatatagcatcattctaagtgttctaaactaaagaattatcatcttttcaaatacaccaaccacacacacttgaggcaaacttgttcttatcttctctagtgtgcttgtaattctctctaggattccacattgtatttcatcttattaaagagagtttgctttgtattttacaatcaaatatccattgtattgagaggtgagattggcactgataaaaaagaactcggttgtaggtgaggttgacactaattttgtaaacaatttaagagtgagattttcactacaataatccgagagtgagattggcacttcaacaattcgaagaggttgatagtcctttaaaaaactattggttgaggtgaagttggcaccagtggaaaaacaactcggttgttgagattggcacttcaacaattaggtgaggttgatagtccttggaagaaagctattgtgagaggtttggaaaataatttggtgaaaaattccacagttgtaagggttagtcaagctcattaacttggctccatagttgaactcaaagctaggtccatagctttga

SEQ ID NO: 29937 - DNA, 3606 bp, Cannabis sativa
aaaaatatatattaacatgcaatgcatatatattattattgtacgtacctttagttttatcacaatcacatgggatgtatttttccttattaatattttcctctttcaaagccaaaattttctgacaatttttatttttggaacatgtacgtacgcatgtaataaaactatataataattaatttgctaatatagcttttgtctttataccacatcaaaaataataatattaatattttttacactatatatgaattattattccaagttttaatcattcagcataaaaaagaaagaataattgtaattttaattttaacaacatttcacatctcagtagggacaaatattattaataagaattatatatgtgaacatgttcatgacagtaatcttctgctgctatatatatatatatatatatataaccgcgtgaataaagaaaaagaaaccaattcccaccattatatagaatctataattttttttatacaaataaattaataataaacactaaaagtaacactataataatacaaattaaattacaaaagaaaaaccctaattcaaccttaattaataattacaataaaatcaagcacatatatgatgatcccctaataataaaaaaaaaagattacatgaaaaagcatagctaattcaaatcaacaaataattaattatatatataaatgtgactacacttactataatttaattggtatattatataaataataacaataataataataatcaaatccaataatatatttatatatatatgagcttagaggaaaaccatgctattttccaaatcgaattctctgatttgatcgtcgtcgttgaaattattattgattccccaaatgaaggcataatcgtcgtttgttgttgagctaatttcagttgttgttgttgcagcgttaacatttgtaatacttgttccgataatattattatttattattgaaaaatcatgatgattaatattgttaatcatgatttgatcatgatcatcatcataattattattaccaaggtttcttaattgttgatgatgatcactaattattgttggaggagaagatgatattgaagataagtgattgaattgttgggaattatttattccttgattaatattattattcatattctctgatgatgattccttacttttgtggaatactctacacaaaacccagtcctcctgttcatcatttaaaaataaaaattaattaaatataatatgtaaattaaacatatataatatgtatttatactatcatctctacaaaataaaataaaaataaaaattataattaaagaatttttattggtttgaaataaatttatttttgtggggggtttgtttttgatattttggagaataattatcaattatttaaaataaatattatatataggaattttaatgggtgtattaatcctatgtgttattattactcaaaaatctggctaacaatattatcagaaaaatttatataatttgttttaactaaatatatatgttttaaattttatcactataaataataaattatgactactaaagtgtattataatgactccttaaaatatatataattataaactaaatatatgactttttggtcacaaaccaaaagtgattaaaagtgacatttttagttattattactacaaaaagtagtaaataaataacattttttggttataatgtatattaattaggcgcatgcatgtatataatatatatatacattcatatttatatatatattatgagtataagctaataataacaagattcatcacgtcatgagtgatccacaataggaaattgatatagcaagagtatatttatatgattatagtgactgtatgatgccaacaacacgtacacatgcacatatatattatatacatacatatatatatagatattatatatatactctcttcaaatatataagatatgtcataagtcttaatatatgtagtattaactaataacaataattaaggctacatataaaatacggttatgtacatgcatgtacagtcattactcgatcgtaattaatatacatactaggaatatatatgtatctatatataatcatatataattatatatatatatgcatatatgatattaataatgtgtgcaaatgtggatgtaaaataagtacaagatgtgttatgagtaaccaaaagtagtacgatgatagaaacaaatctaatattttctctgtaattattcatacaaatatatatatacatatttatactccatttaattaaatgatgataaattattttaacaaactataacattatttcatataatgaaactagagatgacaactaataaaaagaatctaaaaattataatctgtttctagaccgaaatttagtataatattttatttattatactaaagatcggtctagaaactaaaaatgatataagaagatatatatataataaaatatttacgacgattataataagaaaaaaaaaactaaccttaggaggcatgtgaggggtttcaagacgaaactcatgcatgatccaaccagttttgacaccattaggagctcggtttcgataaaagaccaaagtctttctcatccctacaatatccttagtgagaggatccacaacggtacgatcttttccagtggctttccagtatccacatgttgttgccctattcgttcgatatcctgtcgcgtacttacggtcccgaaaactaaagaagtaccactcactcgcgttcagcttagccacatctattaacataacatacacaaattattattattattattattattattattaaacatacataacataatttcaaattaattatattacaaattaattcatcaacacaatatatatataaaggtaattataatattcatgaattgagtcatgcactaggcatatggtcaaaagttaaagtgacattttgctatgcatgtaataattttgcttttattctaatcttattagtttctcttttattacacacacatatatttatattaaaaaagagatttaattctcttaatttttttgcttaataagttcctgttatgtatcacgagattattaaaaagttggccagtctagttcaccaccttaaatatatatacatatatatatttatataaaggcacacattacacatttaagctgtatctatatctatatttatatattaaaatattataaagtgaactataaaaagtagtgttgtctaaggcaagtgaaagcaaattattaagagcatggttttcttgctataaatcttaaggaatccatatcttgatttttcttttcttttggaaagtgatgaataaatatatatatatatgtatacgtgtgtatgtatatcacaaacaagatttagggttagattttttatatctgtctgaaaatgagacttttttttttattcttcgattggacattttttgttgaaaaaaaaaattctcgtttcctatgggaaaggaaaagtaattataataaactcgtttcgatctcttttatatatttttggttatttatttatatatatacatgta

SEQ ID NO: 29938 - DNA, 4993 bp, Cannabis sativa
  modified_base (4881)..(4907): a, c, t, g, unknown or other
  modified_base (4956)..(4967): a, c, t, g, unknown or other
aatcggtctataatctttgagagttgtggcatgagattttttagggatgaggactgtgagggtgtcattgataggtgagagcgcagtattaccattgaggatgtcaagaatggcaagtgaaagatcatggccaatgacatgccaattcttttggtaaaaagaggggttaagaccatctaaaccaggggctttgtcccccgaaagctgaaataaggcttgatgaacttcattctcagtaaaggggctattaaggaaactgatttgatcaggagccaaaggagtgttaatggcagaaagaatggtagagatggcggcttgattagaagattgggatgtaaaaagagtagaaaaataggtaaggatttcctgagaaatttcagaaaatgtagagactttctggccattttcacattttagactgcgaatgaaattccctcttttacgaatggaagctgttttatgaaaatattttgtatttctgtcaccagcttgaagccaatggaccttggatctttgcttccagaagacttcttgttttaagagaaggctatccaactgggattgaagagagtggacatgattgagctggtcctgggacagagggagattcgaagtaagggtgttaatggacttctcaagagtattaattcgtttggatagactcatagaagaggaattccaattttggatagctcggatacaagaaccttgcttcaaaagaaaatgatcaagtctgttattgtaagaagtgaggttagaggtagtccaagccaatttaacagtatcaaaaaaagagttgtccataagccagtggttttcaaacataaaggttttaacaatcgaaccctgcatactctcatcttgaagaacaaccttaagcactctatgatcagacccataaaacccaagatggtgaagggttgctctagggaaaagggaatgccaattattgttagctatacaccaatccaaccgctcaagcaaagagccatgcttccaagtatacacattcccaaccgggtgcaagggagagaaggaaaacttttggataaaattttgaaagtgtgtcatagcagatggggggggaggggaacaactcgagcgatcattaagagaaagatagtcattaaaatcaccaaaaacaaaccagggtaaagaaggagcattgtcatacaatctattgagtaaggtccaagaatgtattttttcaacagaataaggagagccataaaaacaagaaagatgcatagttatattatcctggaagtttatagtacagtcaatatggttagaggagtaattcaaaatatttacatcaaattcagagttccaaaataacaaaagaccacctcttaaaccatttctagggacttcaaaaacagaatcaaaagaaagccttaatctaaaacgttccccacagccagcagcaagcttggactccataacaaagagaagattgggcctatttttcctgatacacaggaagagatttcggaatgcacgaggactccccaatcctcgagcattccagcacatcagactcatttttctgggcggggttgctcagcaacacccgcctgttcaaaagtggagttgatagcagatgaaacttcagcaatggtaggaccagctctggcacgcttcaggatatttcgaagggaatcaccaacaacaacagtctgtggagtgaaagcagcccttttagcaccagcaaccgcttttccttgagctttctcagacagccgagagacatgatccacataaggagcagcatgcagggcctcttcatgggcagtgatagctacagaggacatagtggggtttggcatatcacagaaagcacgagaaggagcttcactcccagtaacagaggtattaagaactgaatgggaaggaggctgtccttcaaatggagtgggaggatgagaaccagggccaacagaacccccttcaagggtacaactgaaaggagtagaaacagaggatccagctccaacatcttcagttgacaggaactgattgacggcagcagcaagggtttggtcaacattatagtgaggaaggttaagctcatcataaggaatagagttggtcaggtcaaacgggtttcttttgaaattggttttggctggagctttaagaggaattttgtaaggcaaaggaggggggtaagcatggttatcacatttttgaagataggtcatgcatttagtcaaagtgtgatcaaacatgccacagtggaagcaaatattgggaagattttcatatttaaagttaagccatttttcacgatgtatattcttaaagtcaatcataatacccctggtaatcggcttagagacatctatcagaacacggacacgaaggaaaaagcctgagacctgaagaatagtggacttgtcaacctccagaaagtcaccaacttcatcaccaatcattttggcaagcttgagagatttcataccaaaaggtatggagtgtacttggatccagaaaggggaataacgaagttgattgggcaacagagtgtcaagtccctgggggttggcacaggtgacaagactatgatcgaaatgccatggttggccctcaagcaccctacgcatgtcaccttcacaagcaaactccaccatgaacatcccagacccatagtcagagaaagtcaggggtgcacgagtgatccatgcatttttcatggcatcctcgaaccagtcaggtttaatggaacgggaggtaaggactctaaagacaagacaaaaggatttcctgggctggttatcccctccatcatcatcagtaagatcatggaccacagcttctttctcagtaagattaagaatttgggacatattgagagcaagggaatccataaaatatagtgcagacaaagagggagtatggaaagggactaaacaaacagagtcaaggaaaagaagtaacgaccttctaagaatccaaatccttaaatagctaaaaatagatatatacctggagacgaaaagcttgttggagaagtcaacatgaagatgctgtatccctccctgcaacaaatctctgcatatcccataggctataggaataatcatcgcccccttcctagaggaacccaaaacgacggcagccataaatgaaggaatagtaaaatcagagaaaatagccaaagaaaatgaagtaagacactcaagacaaaatcaaaatgctctgcaaaatcttaagtcattaataacagatagatatagtgcagaaacattaaatgcaagatcaggggaaaacgacaaagagaaaacgaaacaactaccaacgacagggaaagatccctcaaggacagaaaacgacttaaaaaacctgaagaaaagctaaaagattaacaatagatgagaaaacaggattgaatcccgatcgaaaaacaggatggaaaccagacgcacagggaaggtcccgctagagagttccagaagcttccgatggttttgatgggatcttgtcaaaaggaagtttataacaataaaacgcaccttaccgaaaaaagaaaggaaaaaggagtataaaacgctgcttgtcgtattatttgtcttttattaaaattaaagtattatgtttgaccttgtagttactgcacaaaaatatttattagaatgggagatacatataagcaaccataattaaatacgcaacttgccattatgaataacaaaatttacaagttctatctctactagaaaataaacaaactacaaaataaaaataaggagatatcttttacaaaagaaagagtaattctacactcggttggttttggcccccaacgtaattgccgtagagcctttgtgtacttctgtcaatagctatttagcttttttcttagtaacgctccttagagatggtgttgggatactatttttgtgtgttatgctgtacaggattggacaccctacagccatcccctaatccctgctttctggcaaggtttttatttggaggtatgcagctgtaagtgtttccatgttgattgtccagcaagtctatttcttttgaaatagggaggcttaattctttgaagaactgaccagctactaagttttccttggttgtcaaggcgcatgtggctaatcgagtgagtgcgtctgctgttgtgtcatctttaggggttagtatagcctttgagcggtcttaacaactcaggtaggccatcatcttcttgtattgagttgtatattcacctaggacataacctacgactagttgagagtcgtggtgtatgtctaggtggtcagcttgcgcttcgtgtgctagtctgaggccaacatttgaagcttcatgttcagcctcattgttagaagctttgaaactaaccttgttgcctcgtgcctcagttgcccccaggtgctcttagggccatccttgcatcgggcaggtggtcaatgcatctcttgggttcttactctcgcttcttctctggttcctgtttttctcccaaactttgagagatttagggagacatgcttttatgattagccatgaagctggtgagagattggcctttgttggccatgcttggttgacaggtgaccttatattggcagagtctcagtagttcacttaagtggtcggcctgatgcttcaggttttcgtggaacctgtctcaacggttgattcgtgtacacctttattaggtgtctctggaagtatgaccttagttttttggaagccaagagcaagttgtgggttagcttctccatgagtgggtaccgactttcagcatcgattagtctcttgctgatgtagtacacagggtgttatactttgccttcttctcttgtgaggatagcactcacagcatgtatagtgactgctaggtacatgttgggttttgtgccctannnnnnnnnnnnnnnnnnnnnnnnnnntttactaattaataaagattagaactcattttatgttgcatggttcacnnnnnnnnnnnnatgattatatttaatgtataaattct

SEQ ID NO: 29939 - DNA, 2168 bp, Cannabis sativa
tttgtaccagtccctttttgcgtattatggtctttcaaagcaaaatagcgtccaagcccgaaggcgtcagtggccttgtacgcctgactaggtctattaactcaatttttattttttgaaagaagtacgggagctgtcaggttttgagggtcacctacttttgcctttcccttgtcaaaggagcagagattccaacatcatcaagatttttcctattgtttccattaacacattccacttaagggtcatcattataatctccttcttccagatctgcaaatttatctcggaggtgagtcatcattctctgagaaaatttctcctgatgggctagcttctttttagtctctagcaactctttggatactcaaatcacttaggggtcctactcatagagatagccatctttgtaatacccatctttaacgtattctcctcattgtcttcctcctcatttcttagcatctcggtcttcatcgatgtgattgtcctggttgttcaggccagcttttcggttgtcagagttggatgcatttcctccactcgcatcactcagttgagcgtgctttagcaagagagggtttacatcctctattacagcatcgaggttgccttaaagagtctttttggtaactatttttgggtaaacaccatggctacactagcactataggtttaggtctttcttcagctctcaattaaagcaccaaaatgtttgccaaagtttttggaaactaaatatttgagatcttaagaaataataaaatgcaataataaatgagatggagatttttatgtagttcagatgttaattaaccttagtccacgagtcagtctattagcctcaaagggcgtatttaatgtttttatagtgtatatgcaagaaaccctatctctatactctgtgtttatcttgaataagagaaaatcttggagtaatattagcagggctttggttacctaggttgtgatcccccatcatatggaatagaagggtatttataggataaaggatgggtatggacatgctcatgacccgcctaggatatcgggaaagagcccaggtaaagtacatgcaaagagagatgattgtggggccccttggaaggatttgtgctcatacattgcagcagctggacaataggagaccactgtacgtactggacgcatgtcaccaaatagtttaaccttgaaaagtaaatcactagaataaccatctggcaaacaggtgtatgaggtgcacgcactaccatgtcctggcataagagacaagatctaatcctatgccaaaaaaaatcataaccatcgctgggcgatcctggtttatatccaaggtagaaatccgtgttccttttggacggtcaacatctgtagtagcccttcgagtacctgtccaagtatcacttggacagactttgagcttgggccactcctggtcccaaagtggtaataaatcttccatgtcaaggaagctaaaataaggcaaggtggatctccacatacctcttggtcttgacttattcctgaatctatgaagcttcttcgtgactaggttttactgaggggatttcattagcagagtcttgagattgtatttccctttttatgccacgtgtcattcgtttagaaacacagataacaatagggaaaatgtgttccccttatggtgtattgatgtctctattcctagccaatcaattgcattagttctgtgtgttgatttacgagttaactgatgccaaagaccctttgtagtactgttattttaaaatctccctataaatataatttaggggtgttcatcaaaccacctacattgcacaaactgcccgcaccacaccacaccgcacaaaaaatacagtttaaaattttttgcagtgcagttacggtttacatttttaccaaactgtgtgatgcaatgccgattgcgattttgaattcaataaagcggttaaaatcgcgctgcattatatattataaaaaattgcaatttttacactataatttctctttttttatttatgaacaactcatatatttacaaagcacaagccatacaattaaatttaaagaacatctatatattattttcattattttttttgttaacttcttattgttaacatattattattgatatatacatataatatgtaatatatatgtat

SEQ ID NO: 29940 - DNA, 1424 bp, Cannabis sativa
taatgacaattactttttgaatatcagtaaaaaatgatctttttaagtaatctaagaattatataaattattttaaggtttaaaataaaggcttaaagtctttttgaaaaaaactacaagcttcttccaaaaacaatttttaaaataataataaaaaactttaatttttttatctaaacacatttagaagaatattttaattctaaaaggtaaaaacaaacatataaaattaagccacaccagggcatatatagttttaaaaactttctaaggtggatggtgcaatctataaatatatatatacacaagacgggatttatttatttattttcataaatgtaaattctttcgaatatattattacttaacggtcttatattttttttttaaaaaaaaaatataacttgttttttatttctaagatactttttttttattattttgaaaaaatctagttattttttctttctgaatgtacattttactgtgaaattgatgtatagaacaaagaatggttgatgttcaacttttaaaagttggtatgcataattattattattagttatatatgtatatatttagaaaaagtaacttaaagtaataaaaatttgcctgaattcacacattatatatttcaggcaaaacaaaacagaaagaaaaatgcaaagacaagcgttaaaataaaatgctttccaaacaaacgagcatattaatttgaatacgtgtcacataactggtacacatacgcaagctggatatattggaatatattttgttattaaaagtaaagatatttttaatgaataaattgttcatatataaaaatatcatttgttaattttttttattaattgctcataagatagtatacgacatgtttactaagttaataattaacaattacaatatatattttttcattaagatcatcatgatgccacttatatatacttgtgtgtgatcacaaataaatacttaaatatgaacaatattgctgacacaatctctttgaatattttcgttatgaatattaaatcactctgaatattttcgttattaaattatatataatataatataatatctgaaacaccgaacgcataatttactgaacagaacagaaaaaaatgagagaatacacagagggactttgggctaaattcaaagaaactgtttggcagccaattacaaaatatacaactaaaacctctgctcttttcatttctatgttcacccttttcattggggccattctctccatgcacttcttcaacaccaatgtaagtttttacatatataaaaatatgtacacatcattttattaatttatactgcactaattttattgtcgtgtgaggttaataattttttgaagtcatttgtgtatgttgaaaataaataaagaaagaaagaaatgtacaaat

SEQ ID NO: 29941 - DNA, 1739 bp, Cannabis sativa
  modified_base (450)..(452): a, c, t, g, unknown or other
gttgttccctttcttaaaattagagttctcattgatgttactcgagctcttcatcgtggtatgcaagtgttttttcaggaacattgctaggactaaatagattggttttcagtgtgagggtcttcaaaagtattgctactattgtggtaggctcgaccatactttcaacaaatgtgttagactcttgtagagatgaattggattatccttttgttttaggttacaaagatattcttagggctcatcctaaaattaaaatccaagaggttcaggcccttagaactggaacctcaaggaactagaagtaggcaaattttttttaaaataaaattgttgaaattccaaggccctagccattggaaccatgccatgacatgaagccattcgggttcgggttcgagtttggttccaggtctataggatctgagtatgtgagcaaaaatgtaaaannnaatatgttagacaaaaaaaaattgttattgaaaattaaaaacaacattttgatatttttttgttttctagttttttaaaactcaatttttaaaaaactgttttcaaaaaatgttaccaaacaatccctattaatttttaaaagttgtttttagtttcaaaacacaaaaaacagtttttaagttataaagtcaaacaacttccaagtttctctaatgggggaagatgagaatagagttgttcttgtttcttggagaccactaccaatatataactttatagacatgttattaattttaagtatttctaatttagtccctcaataaattagaaatattacttaaggtatctacacatttagtccatgatactttaatacctaatgatccacaataaaattttcaatacgtgttcatatatatttaatgtattgcttatatgaagtttgatccaaataaattaatcatattaattaatcatttatatgataattattgttataatgatttttattttaaattcaaataaaactaagcaaagattcacatttatactacttatgattgtagaaattgatggataaacttgatcaatatgtatagaccacgtgattttaaatataaatggatgaagacaactttttttcatgagagtttaagtgtggctcaagaaatataacacattaatatgaattaataaagttatttgtgaattcctttaacgtaccaccaccattctatacctacctaattaataaatatatgcattaataacacacatatatactataaaaataaaagttatcatgaacattatagtcatggttgagcagagagttcgattaagctacgccagagaacactaaagcaaaccaaataaaattgtcttaaaaaagaaaactagtgttaatcataaatctcaacaacaatttccatgaccaacaaaatttttaataaattaattatataattagccacattgtttagttatgaaacaacaaattatttgactaccctcttattcattattattatattatataatatgtagatagaacactcgattggtctctgataataatcaatttatataataaatgtgtgtgtataatatatgtatgtatgaataagaataatcctcaattttctttaaacaaataatcctcaaattgagctttgttgaattagttaaaattgttgagaatattattgtgtcaactcatataaatatatataactttaattcgatctaacacacctggtgtcaaacgagaattaagcaaactatat

SEQ ID NO: 29942 - DNA, 1890 bp, Cannabis sativa
gcttcctcctcgagcgtcttcttgatatcgagtttgtcactgggaacaaatttgcgtacaggagcctggaaaagttgggcgggatcgcaggaatgccattttcgaaagcggtcttcgaattcgagctccataaggtggccggtgacagaggtgacgagcatatttgtggattggccattgatggtgtaagggaactcgaatatcctattgtatcgagaacggccgtccctcactcgaagcccttggttcccagacagaatggtcgctaccgacttcgcaacggatggcttttcggccacgttgagaactctgatgctgctacgcccgccggacatggcggatttttggggttacagacaccgggcaggactgtgttaagtgacaatgcctgatgagtttcccgcctgatgatgcttgggctatttacataaaatattcctaattaagattttggctaattaggaaatgttaaaaatatctcatgaactattaaagattattggaatgaaaaacttttatctaatttcattcaattttactatttcaattattatttatgcactaaatcatactctccagactttgatatctactaaattccctcaaattttactaaatcatgcttcctgaattttcatccatgttaaacttttttattaaaattggacaaaatttatcaaatccaacaatctcaatattttagagatatttttaacaaccttaaaaattcaaagaagataatttattatatgtcaaaattcatagggcaaaaattctagttagcctaagatttttagcccccacactttttcatgtattaaattatgactgattttttaaaagtttaagggtcattatttgttatatattaaaattggtgtaataataatttggtaaacatttgtagaatatgatttagtacataaataattattaaattagtaaatttaaataaaattatatagaagtatttaaatttaaccatctcaataatttttaacaatttttaatagtaaaaaaattaggcgacatgatatttatttattttttttttaaaaggaagacaatatgatttagtacagataaaagttcaggaaacaaaaatactaattaactaaatataaaatctaaacggtaatttatgcttttttccaactaattctaatactattctctacaaaactcaacccagaaatacgattcatcaaaatccaactactcgttctcatcgttcaaaccaagctcaattccaatatcacaattaaaccaaaaccaccaaccccactgataattgaaaaacgaaaccagaaaagcattatcttcttccataaaatctataaaaagaccttcataattatgtttcaaatctgtcaaagatcttacagttttaaaaacacattttacatatttgtataagatctcattgttattttatccttaaactagttttacataagagaaaagtttccaacacaattacagaaatactcgatacaagcaactacatgttaagataagattagatatgacttagttattttccgttatttttctgtttctacagttggctttatctcttgtatatataagactcttcattgtaccatgcatttaattccaatgaataagaaattctttttctctctatgagtttctaatatggtatcagtagaaatgcactaaagctctaagaaatcaaattgcagtttcaagatttacttctcttcttcccacaaacatggtgcgaacacgagccattaattcagctactaccactgatgaaaattcttccatggttgatgctcccatggctcctccaccatcaaaaactttcgttgaaattcctccaagagtaggtgcactcatggctttgttggaaatattttacca

SEQ ID NO: 29943 - DNA, 7356 bp, Cannabis sativa
gacgaccatgtcacacccataagggaccctcatcatcagtagctccttcaaatgttcaaatcccacgaaaggctcaaaaacagttgtcaacccacaaaaatagcagattattatcataaaaatcacacttcaactacctctgaaaatcaaggagatggttgaaatagttccgcgttggtcgcgtctcctaaagcgagaagtaccgaccccttcctctatataaggggtcacccataacctgggagggggatccgcaatctgaaacacttagtaaaataaacacttctcattctttgcagtcaagagcatgttcttgacttttgcaactcagatcaataaaactcaaggggagtaggctattaccgacatctggggccgaacctctttaaatttcggtgtcttttatttacatttattgcaaattccggtgttattaactgcatttattactgtgagtttggtttaaatctcatttattacgactccacgtcggttggctaaaaatttagtcaacactaatatatttatgcttatgtgtcgtgctttcgtgcttatcatgtcgtgtcatgcttaagtctatatttttcgtatcatgtcgtgcctaagcacaattttttcataccgagtggtactcatgccgatttctactcgtgtcaaaaggtttcgatctatttttacagcactttaatatgatgttcaagaaaaaaccttaattttaatatgataattttctccatagatgggaatatcattgttgagatatgctaattttgttaaaggcttagttaaatgcggtccaaattcagatatattcaaaacgatttaattctatattaattgcggaagattgaaaacaaactaaattaatttctcaaacgatagtgtaatatttgattaggaaaatatatattttataggaaaaatctgtagtttaaagataaaaaggaagaaaatcttcttatgaagctgacaactaatttacatttgggcccatttaaaataatttttattttatcttgacaaaaaaaactaaaattttgtttaaaattaccaaattatgttatttcatttgacttttttttttaaggcatagcttaaagtgtctgaaaacatctcctaagaataggaaacgtaacgaagaaaactaaaaaaaaaaaagaaaaaggtttttttttttttttttttggagaaaacaaaaattaatagaatgaatgaatgagcgaaaaaagtcaacaaaaaaggcgaaaaggacaaatcggtcatttcataacattacccgggaaatgacgtaagcacaagcccggtgacgggcgaggtctactacgtaacattttaaatgtcataaaagcgaaattggtggttgcacactgctggatggctctaccattttccactctaatttctttctacaaaatatagtgagagaaaaacacaaaagaaaataactttaagagagagaacccctcgaattgggtgaatcccaatttaattcttaacttctctctcactaaaagctttaaaacccatcatcagttacaacttacaataattacacagacagcaaatacatatacaaaataaaaataccatttttttttattaaaaaaaattggagaaaaagaaaaatattgttgagtcatataataaaatatatatatagtacactgatcatgtacatatataaacagtgaaagtttgcaactttgtatactatatagtcttctattccaccagtacacacagtctaatcctctgctctagttggggtaggggaagagattatagattatagaacctggctaaatttttctttcccttcttaacctctctagctctctcttacaatatatatattgatataaatatataggctattttttaattttttattttatttgggttccaagatttcttcttttgtgccttaactctttctatccaaaatcattgacggtatctttgattttcagccgtttctgatacaaatgagataaaaaaggagcaaaatctattgaaataaaaaaaaaataataaaaagtgttgctagtgagaatactattagtcagcgataaagaaagaagaaaaaagaaaaaatagtatcccacgttttcttcttcataaaccccggaaacccacaatctaatattaagatataatttttttttttttatttcctcacacacatatatatatgtatgtagcatattttatgtataaaacatctccctttccccttccaaaaacccaaaagtgcaatcttgtctcttgtttgtttgtttattgtcgtggtcttccgtttctgtgtgtaatggttttgggtgtaaatgaaagaagttgatttatcgtcatcgtcatcgtcatcgtcgtcggtaataacagtagtagtattatcattcgtattagtcctggtgtttgtttactgagaaaaaacaaaaaaggggtcgcgagaaaatggaatacgcgagtggaggcggcggcggttctggcggaggagacaacgatgcttccaacgctcaaaggaggaaaaagcgataccatcgtcacactgctcaccagattcaaaagcttgaatcgtaaccatccttttcattttattatctcggtctaaattttcactatattatttaaaaaataatggttttttagccttagtatttttttttttaattgctttatttctttttattttttcgtttgggaatgaagaatgttcaaggagtgcccccacccagatgaaaagcaaaggctacagttgagcagagaattgggtttggctccaagacagatcaaattttggtttcaaaacaggagaacccagatgaaggtaaaataataatactaataataaaaaagaaatccactgttgttctctcgtcgtttttcgtatattattatattatgttatggtctaaaaaacataaaaaactctaaaacgacacttcaggctcaacatgagagagctgacaactgtgctctccgagcagagaatgacaagatccgatgtgagaacattgccatcagagaagcacttaagaatgttatctgcccatcttgtgggggtccacccccaattgaggatccatattttgatgatcaaaaacttcgaatggaaaatgcccaattgaaagaagaggttcatttccattcaatattatctcttttatttgttttttttttcagtcattaagtttaacaacacttggtattttcataattttcatctctccagcttgacagagtttctagcattgctgctaagtacataggaagaccaatatctcaacttccaccagttcagccaattcacatctcttctttggatttatccatggcgagttttcctcaagggatggggattggacttggttgtggtggtggtggtggtggtggttgcacttctctcgaccttgatcttctccccggaagctcttccaccatgcccactatgccttatcaaccacctggaatttcagacatggacaagtctctcatgtctgacattgcaacaaacgctatggaagagcttctcaggcttctccagccaaacgagcctttttggatgaggccatcctcaggagatggcagagacgtccttaatctcgataactacgacagaaatttccccagagccaatactcacatgaagaatcctaatctaagaattgaagcctcaaaagatactggcgttgtgattatgaatggtttggcattagttgacatgttcatggacccggtatataataatcatttcttccaattttctctcataatattaattatcttaaaaacagtttcctatctttctttctttctttattaacttgtttgaggttgctgcagaacaaatgggctgagctatttccaaatattgtttcaatggcgagaacacttgaagtcatatcatctggcgggttaggaagccatagtagcacattgcagctggtaattgagtttaaactttttcaataatgcttcaccatttttaaagctttctttcttttaagtttggtatgaaaattctaaatcttgcactgcagatgtatgcagagttgcaggttctctccccattggttcccacaagagaattttacttccttcgttactgtcaccaaattgagcaaggactttgggcagtcgtcgatgtttcgtacgattttcctcgagacaaccagtttgttaatcaatgtcgttgtcatcgtcttccttctggatgcttaatacaagacatgcccaatggatattcaaaggtaataataataagtttcttcaaaattcacttcatcatcatcatcatacaagatataagactaaattttaagataactttatttttcgtttttgtgtcaggttacttgggttgaacatattgaaatagaagacaaagtaccaactcacaggctgtatagagacctagttcacagtggcatggcttttggagctgaaaggtggctaacaactcttcaaagaatgtgtgaaagatatgcttgtttaatggtatcaggcacttccactcgtgaacttggtggaggtaattaaaaagagctcaaaattcgaatattattcaaactaaaacgatattcgtttctttgtcgtttaattattaaccttttttgttttttgttttttttttttttttaaataattgatattcagtgattccttctcctgatggcaaaagaagtctgatgaaattagctcaaaggatggtgaaccatttctgtgcgagcgttagtagtagtacctccaatggccaacggtggacgacactttccggtaccggtattaacgaagtcggagtccgagtcaccgtccataagagcaccgatcccggtcaacccaatggggttgttctcagtgcagctaccaccatttggcttccggtttctcctcaagatgttttcaattttttcaaggacgaaagaactcgcgctcaggtattcttacattggtttttacttttgtttatttttaattaattaatacatagcaaaaacaataaactcatgccactgttacattaattattattattattttattacgcagtgggatgttctctcaaatggcaacgcagttcaagaagtagctcacattgcaaatggatcccaccatggaaactgtatttctgttcttcgagtaagttaactaacaacaacatgtatgaagattgtattttggctatttatataataaaataataataataataataatttattaagtaatataaaaatctgttttgggttcatgatcataggctttcaacaccagccagaacaatatgctgatactccaagagagctgcgtagactcatcagggtcaatggtggtgtactgcccagttgatcttccggcaatcaacattgccatgagcggcgaggacccgtcctacattcccctccttccctcgggcttcactatctcacctgacggaagggcgagtcaaggaggaggaggaggaggaggaggaggggacggtgcatcgaccagcgcgggggcgggttctagccaatcaggtgggtcgctcataacagtggcgttccagatacttgtgagcagcttgccttctgcaaagctgaatatggaatcggtgaatactgttaataaccttattggcaatactgtccagcaaatcaagactgccttgaactgtcctacttcctaaaattataaaccaaaaaagaaaaagaaaaaagatcattcataattaatcctttctctctctctttctttgtcactcagtactgagctacaccaactgttttttttattatcatccttaaatttttgtgttcagaaaaacaccctctttattctcattcattttctttttctctatggtgttgcttttgcttggtgggtattgaatgaggggagaaaatatgaagttagttgggttctttgaatgcactctcatcaagagctcaagctgtttatttactactgttgctgccgctggctactactgctcctgctgctgttgctgttttttgctgcgaagtttacaccaactacaaacattttctttttatatttttatttttgatggtcttaaaatttattttggaatttggatttttttacattgggaaaaatagtctttgaaaaaagagggggagtcaagaacgcaccatattcttgtaatgtttgttatggggttttgtttgtttggttttgattggttcaattttccatttagaagtagaaaaagacttgtcgagaaggacttcagacacagcaaaagaacattgtatgtatggttcgggcattgacttcctgtttaatggacttaaattccaaagtctttatttctctatattatttattaagttgtaaaaaataaatgggtgcaccctttccgtttcacccaaatttaagtatagggtttttgttttttgtgtgtgaacttttaaacaagtaggtcagaacttgaagttaaaagactctgagtttgtgtgtgtgtgtaggcccaagaaaaattgacagttgggatgattatttgtttaattttgacataaaagtagcaatgaaaattgtggccattacttcttattcgctcttttttaagtatcttatatagtacatgttcaaaactcatcaaacattaaattgatctgcatatttgcttgacacctttcggaggcaaattaaaagctttgccttttctttctttcaaatctgattagactgaaaatggtatttagatgatttagttcgattaagttaggcttttcttggtaaaggttgatgctctacctaccatctgttcatttttcttaatgaatggttttctgagtttatctcttgccatatctgactagtttattgatttaacttatgtgctctactaccaacttttagcaagtgtactaatgatattttctttttgtttgtttcgtttaaatatatgcatggtttatttttatagttgttggcccctatatgatgcacaaagagtttaaatttatagctaaattaggctcaattacaagttcaatgtaataacttttttttagaaacattcaaaaccctagtggctagtgtgatgaaacaaagatttaatttagaaattaaattaaattaaaggatacaaaaggtcacttatgtactgcatattgatcaaattttaatagtggaaaaaaaaaaaaacaaaaaataaaaaaaaaaaattgtgatttgattctctctctctctctgctagggtttctcccttaaccttaactctagtcgccaccttatctgagtttttcggccaggcctaagatcaatatcggtcccatccaatgtatactccatacatccgatactagtaaactttgccaatgccctagaaatgacataacacttatccaagct

SEQ ID NO: 29944 - DNA, 2741 bp, Cannabis sativa
acgggccccagatttttgagagcaaattgctgatgaagctgatgtatgagatgatgaatgaaatctgaatcttcacctgttaataaaatgtcatcgacatagattaacagaagggtgagtttacctccttttttgatgaaaaataaggatgtatctgccttggaattactgaatccccactgaagtaaagcatgtttgagtttatcaaaccaggcacgaggggcctgttttaagccataaatggctttgtttaacttgcacacatgatggggctgagtggcactaacaaagcccgctggttgagccatgtaaacacattcttgaagatcaccatttaggaatgcgttattaatatcaatctgttgaatgggccagttgtgagtgacagcaagagagaaaatgatgcgtatagtacaaggctttacaaccggactaaaagtttcaaagtagtctatgccaggtgtttgttgaaagcccttggcaacaagcctggacttaaatctatcaaccgagccatcaaacttatacttaatgcgatgaacccatcgattatctataacagtcataccaggttgatagggaaccatagtccaagttttatttcttataagagcctgtagttcactctgcattgcattgagccataagggatcttgaagtgcagctttgagggactttggttcaatgcttatgttggaggatacagtgagagccttcggtttgtgtatcccagctttacttcgagtgatcatactgtgtgtatttagagtttgtgtagttgaactagaggcagtgaagtgaggatggtgaatatcacttggaatgggactcggctctggctcatgatcgagaatgggaattgcagcagcaacaacaggtgtgggtaaaatatctggtatgagagatgtgtcagatggtaggattgggttctgtattggcagtggtgactgagattgagcagtatgtggttgatcttggggtaggtttggttcagtggtgatatggattgatgtaggaggttgtggtataggaaaggcatctgtagtaactggtgaggtggatatgtttggggaaatagtttttggaaatagtgtgtcatatgggaagcttgcttcattgaatttgacagaccgtgctatgtaaattctccctgagggatgcaaacatttgtatcctttgtggctggggctatagccaagaaataagcagtgggctgttctaaaggcaagtttatgggtttggtatggtcggagcaatgggtaacaagaacaaccaaatgtctttaaaaaagtataatcaggtttttgatgaaacaaaacctcaaatggatttctaagttgaagtacaggtgtggggagacggttaatagtgtatgctgcagtggtaaaagcatcccaccagtgggttaatggcatgtttgcctgagcaagaaatgacagccccatatcgacgacatgtcgatgttttcgctcagcccttccctgctgctgatgtgtgtgcgggcaaggatgtctgaagttaattcccaagggtgtaaggatggattgaaggggcctgtattcaccaccccagtcggattgaatggccttgattttagtattaaactgtaactcaacataagctttaaactgtctaaaaataccagcaacttcagatttagctgtcataggatacaaccatgtaaatttggaaaaatcatcaatgaaactaacatagtatctgaatccttctattgaactgtaaaaagagggtccccatacatcagtgtgcactaattgaaaacaagcagtagtcttaggtgttgagctactgaaatgtatgctatgaagtttgccatactgacatgcctgacagaaaggtaaagagttacatcttgttttcaattttagtgtggagagaacagcttgtaatattcgtggggaagcatgcccaagtcgatgatgccatgtttgggcgtcagagaaggaagcagattgatgatgcttgacacaattgaaagcagcaggggtggagagaccattgaactgagaggtagtgcgtttggctttggagagatccaagtgatatagcccttgtttaagatggccctgaagaagagcttgccccgtattcttgtccttgattacacatgtatcagaatcaaaaagaaggattatattgttatctgtagtaatctttgatatactcaatagattctttgtaatctttggagcaagtaaaacatcatttagtaataattgtttatttggattagtagtattaaaactagaatggcctatatgagagattgagagtttagagccattacccactgtgatcttggctttgcctttgtaatcagtggtggtggtgagattttgagagtctggggtcatgtgatgtgtggcaccactgtccacataccacccattgtcctccataggagtgttggaatcaaaaataagagcctgtggattatggccagagttgttagatgtagaggaggaggcctgattatcagtgtcatatcgatgataacacttataggcaagatgcccaatcttgccacaaatctgacaaacaggtctagagcctcgtccacggccattagagggtccacgacctccattttgagaaccacggccttgattattgccacggccagatgattgacccctacaagtattgtgacgatttgaaacagatgaatttctgttgaattgtgcataatttgcctaaacagaatccaagattggaggtgt

SEQ ID NO: 29945 - DNA, 1834 bp, Cannabis sativa
agatggatatacatagagttataacaggtagtccttggacttttgatcgtaaacatttaattcttgaacggctgaaggaaggtgataatccaagggctatgaaactggacaagatggagatgtgtgttcaaattcatgatttacaaccagggtgcatgacggaggcggtagtgcgtgctgcgggtgtctatcttggaggctttgtggaaactgatccaaataatttcattggtgtctggaaggattatctccgtgtgagagcaactctatctctgggagttccgttaaaacgacgtatgaagattcagaaaaaggatagtactgagattttctgggctacattcaaatatgaaaaagttccaacgttctgttttctgtgtggaatcatgggccattctgaacgtttttgtgaaaaagctttggacattcctattgattctatcattaaaccatatggtaagtggatgatagcctcttctcggcgtgcaaatcagctggtgggatcacggtggctttggtcaaggagggcggaggagatgatggattctggtgtgtttaatgttggaccagtaaatggtgggattgacccacaggacacggcaatcaacaaaaatattgggccgaattctcagggatctttgcatgagaatttgattctaaatgtggaaaccacaaatcactctagtcaagggtcaaaaggaagatatggtacaactggtacattaaatatcacatctccaatcactctggagaatgatacgttgacaattagtgacttgaagaggagaagaattgtgttgggcttggatgatgggccaaggggggatgattcaatgattaatatggactctgaaaatgtagatgaaagtaatgagtctattgtgctgatggaccaggattcaaatgggccaaaaaatggattgaaggtgggctatgctttgcagacccaccaagcattatgagtaccataagttagaattgccgtgggcttgggaacccacgggcctaacaattccttgaagaccttgtgcttcaaaataaacccaagtttgtttttgtttgtgagaccatttgtaaaaaagatgttattgagagattgaagtttcggttgggctttgaggcttgttttagtgtggatccagtgggtagaaaaggaggtttggctttcttttagaaagttaaggaagaagcttgtttgttgggttattcgaataaccacattgatgtggaaatttctttggaaggaacgactaactggcggctaactgggttgtatggggaacccaatcgtgcctttcgtcatcaaacatggactttggtttgaacccttcgtagaaattcccacctcccttagtgtgtcattggggatatcaataatattggtagtgttaatgaacaaaaaggtggaagaccctatccaaattctttgattaatgggttccaggagatgttgagtgagtgcggcttggtggatatggaactgactggttatccgtatacatgggaaagaagccgaggtactagtcgctgggtggagagtcgactggataaagctttagtgtcttctcaatggatggatatttttaatgatgctacccttactaatttggagttctcctcatcagaccacacccctatctttttagagcctactatttttaaacatagtagtagccgtattcaatttcggtttgagaactcttggaaccatgaacccatgtgctatgagattgtgcaagattgctggtgtaacaatcctttgctgtcgattcaggagaaaataagggcttgtgcttccaaacttgctagttgggggaaggagtacacgggtggt

SEQ ID NO: 29946 - DNA, 1537 bp, Cannabis sativa
atttaattaaattcattaaaatagaaataattaagtacctaaaataaaatcaacttaattattgattctaatttagaattgagattagaccggattagtttagaattttaagttgtcggtttggcggattagttagaattatcgaattaccttaagttttatacaacttgaatttgtaggtgagggtagaatagtaatttcttaggtgtgtttttcttctttttgttttgtattgctttaattaatttaagccttaggttaatagtatatacatatgctgaaaatgaagttgtttaatggataattaagagaaaataatgcctaagtgaccctctcttcttcttctttttgaataacctggaaaccaaccaaggttgaagatttcttcagcaaaatccatccaattctaggtgatattactccttaaggcaacctagaagcatttgaggtgagttctttgctatgtggattgagaattttaaagttttaagttagttttagattagggttttgtgatttcgtggttgtagtattaaatggaattgaggttgtgtttttaggcctgttttagggtaggtttgagcctaggataaatggttttaatggctggtatgtgtgaaattagaaaagtttggttttagtattcaatttaggttcaaacttagtaatttagaataattaatgaattgttgtaaattgatgggttgaatacttttttatgattaatatattgtactggagctgttgggcaggtttggagggagtttagttcgagtttggagaagaaaacctaagaattttttgtatgtcagaaccagtcgaccggttgccctgtaggaaaaatttctgagttttcttcaggttcagttttggctcgggatggtacctagtatctgatttaggttatttatatgttgtatggcctattttagagctattggaggttaggttttgtccagttacggggattagggtttgttcccaaaattttagtttaaggcatttattgaattttgttgtcgtgacataggactgggatcgtccagctctatttccactcaggtcggcccgcacgcctaatttctggactgcggtaagaaaagtgttatgcactggttatggttaaacgattatgattgttatagtctcaaatgtgatcgagatctcgatatgtgtttgttgtgcctcgattatgattgagggttggaaacggtcattaccgttatgagtaattactcttaaaacttccttcggtaggtttcttacttatcgttcgctatatcgggcaacgatagtgacatacatagctcgtggataacgagtggtaagtgtgctttatgaagcactgagtttgtatgattataattatgtgaaattgtataggcatattaatatgtgatgtgttatgattgcgtacatcttgttatggtatgattacttggattttatattgcttttgtatttagtcacttttcttgttgagtctctgtgactcacgggtgcttaatggtgcaggtaaagggaagggcaaagttga

SEQ ID NO: 29947 - DNA, 1816 bp, Cannabis sativa
tgacacatactaaatatgtgcaatctgctacatcgaatgcatctagtgcatctgtggtgtctgttgctgcatctgtggcatctattgcatggatggttgttgttgcatctgtatatgtggtgtctgctacatctatctctggtgcattgaaggttgttgctgcatctgcaatgattgttattgcatctgttgagtctgttgcatttgcgatgtttgttgcatataatttacttgcagatgcaatatcgacgaagacaaccaaggaaaaggggacattagttgaggtgatgacaaaggatgcataaatagaataggactttgttgcgcttggtgatattgggaagtcctgggctgtgaagatgaagcagacccacctccatacatttgaagttggaatgtctatgttgacggtatattggcattctgaacaactcctctttaataggtagacgaacatcaggtcccaacctttgagacatccacaacatggttcttgtcaatttttcaagttgacactcaactttgggatccataggcatatcttaagtgggagtagattgtgtgcgctgggacaaagattgtccctttaattttctccctactcgtcggttatgaccacgcctttcaccaagtacttcactgagtacactcatttcaatctcctcaacaggttcaatgtcaggagtactggctcattttttataagttaaaatgagctcactctattttaagaatataagttagaaagcattataaatatacataagagtgttttatttagaacatatgaataattacttacatatttttgtgcagtcaatggactaacatatgtaactgctacattatcacatggcaatcatgagactttaatccaacattatttgtctcattttcgtttaccttcttcttaaggttagaacaaaatccatcttgcaattgtgggaatatgttaggaattgaccctgaacatcagaacctgtttcatcaaaactagatgctcctggaagattgataaaataaacaattgaactagggaagttcttatgagattaaagattgtaaatcacattgttaatgtaatattgtgaacttcagttgtgaataaaataatcatttttttcaacaagtaattgtaaagcataaaccctttaaaattatttgaggggcatatatgtatgattaaccaaaatcaatatggaaatacatagtacaatgcaaacccaacacttcaaaaataaaaatttttttgaaaacttttttgtttttaaaaaaaaaggtcctcgaccaaacctttttgacgaaataggagtgaactgtttgatatttttttcagtagttaaattatgtttatataggttgatttgagaaggttttggtaggtagtttgttgattgagcaagctttgagttttagaactcaagctttgctctttaatggtgtttttcaattctgagcatgggtagttgttctatcacttggaaaattttattgggatataatatgcaagtctggaaagtttggttgagtttggaaatgatttggttagggtttgaagttgtttggtttttctgagtaaaacctgctaactggttttacagtgcttgtaaaactagttacctggattttgcaacagggaatcccaaaaattcagcttgtcgtttcgcgccagtttcaggtttctagttggttggttctttgctagtttaggttattactatgttaagttgcagtagatagggttttggtttcaaacctaagtcttggttgggatttagcgagtcacttatttgtgctgttattgatgtgatttagg

SEQ ID NO: 29948 - DNA, 1294 bp, Cannabis sativa
catactttcccaaatcatgggctactgtgttaatatcgcgaccaatataggaaaaatttgcttctaaaaatttagacaataaaattataagggaaatgctaattacaacctcttagtcaacctccacatccgaaatcacatgccgaaatattttttttcaattttttttcataaccgtattcgttatagttacagtatcacccttgtaaaattttgaaaaattccgaatagtttatagtaccgaaaacagagttcttggtattccagtttaccacgcgcgttcaaaaatgtcaaacgtattttcggcactgtaaactattctaaatttttcaaaaatttacagggatgatattgtaagcataacgaacacccccgtgaaaaaatatttgaaaaaaaatattccgacatgtatttttgggcatggaggttgactaagaggttgtaacaggaggttcacgatatgactcctcaaattataataaaaggaaataacctactcactaaactcattaatatatgcagtccataaacacccatatacataaaaaaaaattaataaatagattagcacactaaataataaataatgatagtaatagatttaataaaaaatagcgtaaattagtttttatattaaagttttagtatgagtagtaaattatctttttttttatatatatattattatgtttataatgaaaggtcacatgaacaaatgaataaaaaaaattagataatatatagaatgaaagaaagtcagaaaaacacttcacatcctctacgaaattggatggttaggaaaatttggtagactaaaatattaaaaaaatatgaactataaaataacaaatgaataacaaaaatgtaatgaatgtatattaataataatgtggaaaacaatcttccctcccctatatatataaggttaatttcagtacactaaaatatttaaataacattatgttattattagttaattttatgcaaatcattattttgtaagaattctaattttttttttaattgctaaagagatttgaatggctttggtgttctcatcttcataaaatatgaatgcaatgtacgcaaaaaccatactaatacttatttaagaaagtatatatatatattaacataaaaaatcataataatgtcttacaaaattgaggttgcaacaaatatgatcagtactaaaacttttataaatatcatatcacaaccacaactcacttgctatcctcttctaaagtaagaacaaaacaaccacacattataactctctctctctctctct

SEQ ID NO: 29949 - DNA, 1616 bp, Cannabis sativa
aatagtaatcgtgtagattaaggttacaagaggtgtcttggtgtttttaagctcaaaagtaccctagggaatgtctactaatcttaaacacttgtcatgagtactgacactaacataatatcaatactcaccaatgttagagagtgtcagtactcgcttatggtgcttctctccaaatatggagcctcacaagcatgctacatgagtactgacagcttcttgatgccaatactcgcccaaataaacccttacacgagtgctaatattatcggtgtgccagtactcgcctacaataagtattctccaagggagaagccccttcaacacattctcaacttgcctctcaaagataaagtttttagaagactttcaaagcgtatatatctctaagaataaaatagattttaatttttatgcaattgttcattattattaaatgctaaagtgcaagataaatgtaatatttccctaatttgtgggggattgaatagcaaaccctaaacttatataagcataatgtttacatagggaagggattcgatccacgatgacttcactatctcataaagacctggcagctctctctatgatcgctctctcactcatacacatttccaaaaacattcagccctagctcactcaaaaagaatacaggttggtcacttattcttctaaactcagtcacatagagacactaaacgagatcttactattgatattgctctttgtaatccactcaaacacactcatgagaatataactctagtgtgtttgagtcttgatttataaaacaaccaagtggactacctcgttaccaccaatcaaagggggcgaaacattataaaattgatttcttatttcttacagtttatttctaacaaccaatggtctcagtctagtcctctttctttttatgacctcctaaggttatattgacgaaaaattgctttaacaagtaattctcatcaatttatttaagcatttatcaactgtgtagtctcatacttacacagtctcagaatcataacacatcactttccccaggcgatatgggattgcacaggtcccggccgtctttcctcttcagatcatggggctgactgtcacagttcgagcctagggtcccatcttatgagcccccaaaaattttaaaaaaatatattaaaatataataaatatatttttaccttactatatattacagaaactaaaccctagtatgatgaattttctttgtaaacttagatttatgtgtgtgctcacttgggttcgaattccaaataaattttttattggaaaaaaattaatacgggattagaaattagacccatgactttatataaaatgtaataaattcgtttaaacttatttatatgattaaaattgaatataaatgtaaaaatttgagtgttttatttaaagattccttcattttcaaaagaaaaattagagattctgtaagaagatgacttattaattaataattaataaagggcttaaagttgaaaaattcataaaatccatcacataatttcaactcttttatccctttatatatatataaagatgtatatacatttggtgtaacattaattaacaatatactatattctcca

SEQ ID NO: 29950 - DNA, 4433 bp, Cannabis sativa
aaaaaaaaaaaaaaattatgtgaaccacaattaagtaacacgacaatcacaatgaattatcataggatagtgtggtactaagttaaaagtttcgaaacactgctttatactgtggcaagcagtcaatgaacatttctttactcaagatcttcttgctagatttttttattgtagagtctctcttatattactaatagaaatgtcacttttgttagcacagttattttataaattgtactggcaaaaaagttaaagttttactagcgcacatttgtagtaattaaaatctaacttttaccagtgcatttacacgcggagaaaagtcatttttactagcacttttcattttgtgctgtcaaaagttctaataccaacgttaatttgccaatctcttttgccaacacatcaaaagtaaattttattttaccagagcaatactaaacttttgccaacacaaaaatatgttggcaaaagtaatattttttgtatatgtgtggtatgtggtttatatcctgaatctcacattcacctcttctttgcttgctcattttttaggagcaatttgattttttatgtttacatgtgcttaaaatttttctcctaaactcataataactaatatttgtaggatatgacaatttttatgatattcctaaaataccccccatttacatcacccccaattacacaatcggacctccctctcgaaccccacatcagacacaatcggaccctcccatcggacccccccattggacctacgtctcctacctcgcaaacttgtaaattcattacccctatcggacctcgaaggacctacattagacatgcatcgaaccaggcaaaaatcacaaatttccctccaaaatacagatctgagcctaaaaacctcaaaaattatatattctccactaaaaatacagacctaaccctaaatctaattgttttaatactaaatcatgaaaaattaggaattagctttgacgaacacattgtcggtgttgggtggtggttgcggtggtccggtcgcggtgattcgtgggtggtgtggtcgcgaagttaaggtgggtcgtgtgagtggtctgattgtgtgctccttcgtggatgtgtttagagagagagagagagagagagagagagctttttaaatgggaggggtagaatgagattttaaatttttttaacatattctaccaatattgaataacttaggtttagaaatataattttgaccaatacattcataattaatcaaatttccctctagattggtgatcaatgagattacttcttgatttggtttgatagattggctgatttatttaaaacatatatctaattagtgaagatcaatatttcattaagacactgtttacaaaaatgaacaaaatagaaataaaagaacaaaattgtcattatttctataattcgtgggaactgtttgaaaaaaaaaaaaaattgagagcaaaactttactagaatcataattgggagatgaaaatcctatttcttaaaaataatttagtgttataaatttgtatttagataaaatacattttaaacatctgcatagtattatacattttggagagtcacaccgagttggctctgttttagcccgagtcaactcaaaaacctctccaccttatcttcaaacaaaaacaaagacaaaatccttaaaccctgcaaagccttcttctcaaactcaacactcacaatctccatacgtacatatagtacaagtgttaatgattcagttaactaccattgccattgttcttcttctccccaaaaagtttgagtcttgaattgatcaatggcttctctttcattcactcctaaactttctctctatccaaaaatcactcctttcatctttccatgctcaaatggaggacccagtagaatcgttttccccaaaaaaatgaagcttgtgtgttgttcaacctcagagcaacaagaagagagaccacaacaacgtacaacgaggaagaagaagaagaaaactgattctgatgctgataaaggaattgacccagttgggtttctcactaaacacagtatttcccataaacagttttctcaattccttcgagaaaggttggtgctttacttactgggttggtttttgtttttgtctttcaagtgtttgattatatgtcttacttgttgttttctttttatgcagacataaagctttgaaagatcttaaagatgaaatcttgaaacgtcatgttaatttcagagatatgttttctgggttagtagtacttacttagaaatgctaattcttgtaaatgcaattcagttggtattagttcatggtgttgaatagtttctgagattttatagttagagatgtttgctgtagtttatcctcttctttaaatgaatttttctgagttcttatcttcttcaggtttgaaatattgggtattcatcgccacccggagcgtcgagttgattatatggattgggctccaggtttgacattactccttgttttactcttttgctggtaaaatatgattttgagataattgaccttgttggagtacaatgtaagtcagttgggaacttgaattttcacacttttaataatatgagatcggttgagaaaactgaggaacagaagtttgaatagagaatagagtaataaggttactttgtatagaatcataaactcaaacttaattggcaatgagttgagtaaccatgatcttataagtatgttagtatcctcacatcgagttgttctgtgaagtttcttacttcttcattttcagtctgttctacagttcgaaatttcttgaaattgtggtattctcacaataagtatcaacaactttctggaccattataaggatttgttcagagatggttatttttttttcttaatgcttctttgaaaacaactatcatatcagcatatcttacttcttcatacactagatcacataggtaaatagagcatgtttcatatggtcacttgtttttttattttcttgctttcgtagaatacacattcgtatgtgaaatgcctacccaacagatcacatgtgtaaatagggcatgtttaacgcaggagctcgttactgtgcgctgattggtgacttcaatggttggtcaccaacagaaaattgtgcaagagagggtcatctcgggcatgatgactatggatactggttcattgttgtggatgacaaattaagagatggagaaaaaccagatgaattgtatttccagatgtataactatgtagatgactatgataaaggtgatagtggtgttacaatagaagaactctttaagaaagcaaatgatgagtattgggagcctggtgaggatcggtttgtaaaaaaccgttttgaagtaccagcaaagttatatgagcaaattttcggtcctaatggacctcaaaccttagaagaattaggagaaatacccgatgcagaaacaagatataaagcatggaaagaagagcataaggatgatccaccaagtaacttaccttcatatgatgtaattgataaagggaaggaatatgatatttttaatgtcattggtgatcctgaatcgtacgagagatttaaagcaaaggagcctcctctggcgtactggtttgagacgcgtaaaggaaggaaagcttggatgaaaaagtatgctcctagtattcctcatggaagcaaatacagggtctatttcaacactcctaatggaccactggaaagagttcctgcttgggccacttatgttcaaccaggtaagcttactttcatgtttcctggaaatcattttctcatccaccattacaatttattcggggttaatttttctgtaatctctcggcataatctgcagttatattcgttgtgttttacattacaactatggcatgttgcactaacattttctccatatgaatgcaattaattacattttagaggcggaaggaaaacaagcttatgcaatacactgggaaccgccgccagaagatgtatacaagtggagaaacacaagaccaaaaaaaccgaaatcattgcgtatatatgaatgtcatgttggaataagtggatcagagccaaaaatatcttctttcagtgattttatagagaaggtaactttttaattgttgttctaatgttttaggttcactattgtgacatggttattaactttaaattttgtgtttcaattttggttcaggtccttcctcatgtgaaggaagctggctacaacactatcaagttgattggagttattgagcacaaagattatttcagtgtgggctatagagtgagtcaattgttcttttcatcgtctatattttgtctaaaattactcagctgcatatatttcttaggccattaagttttggagatgaatgtgcatttatcaatggctgttttttcgaaatgcaggtcactaatttg

SEQ ID NO: 29951 - DNA, 2271 bp, Cannabis sativa
tttcttttacttagcgatattccaaaatctttttatttatgatgtctctgtctgggtttcgtctgatgttttttcttttaaagtaaaaaaataaatataaaaccacgtcattttcttctcaagtcgtttagcgttgggtagcgtgccttctcctaatctcaatcttatttttcttctcttatcaatatcctgtctttctccccatttattttcccccgaaacaaaccttaacacattcagatttgatcgcattccttactcgaaccacaccttattaatcctcgaatctaccttccatggattcgatggcgcctcagcgacgtgcaaaagcaattaccgatcatttaattccttccggagagtcttcctccattctccagcttaacgctacctccggcgagtttgtttccggtacgtttatgtttgtatgtataggttcaattttttttgatcgcatatgttttcggctgataaaggagtagctgtgttactgttcatatggtacttcgtttagaacctattcaaagcaataccgtattcctattttgcttcttctattggctgtggccttttcttttcatcaattacgatcgtttacggcttcgattatgcttcttgacatgatttagtaaaagttgcttgtaatttgtcattttcgattgttcagatgtcgaaagataaagatatataattttacttttctaatggaataaaaaagtaaattaattaaataaattacgatgttgttaatttgaccagtgtgcaagtgaactttttttttttccttcctattatcactatttgtgatgtgatcatgtgaagaaatggtagagctgcattcccgcattcctttttcatattctggaacgtggggagcagggtgggcaacatccaattcaaacccaatccaatctaattacaaaaaaaattaaatgtataattagatattaaaagttggattctaattagattagattagataagttattagatgttatttttaaaatacaattaaaaattaatctatttcagttacatttatatatattaaaaaatatttatatttatttatgtataataaaaataagtattttaattatatttttagtggatttttttttgtattgaatttgtaatatttgtttttgtgatgttttctcctattttattacttgctaaatgtgttgttttatttattttaaatttttaattatatttttttatggggtatcaaatttaaataaagggagatatttagtttttacttatttttcttcacatttttaagttaatattaaaaattaagtgtgtaatttgatatttaattaaaaaacagatccaatttaattagtttttggattggataggatttttaggtctaattggatctaagtgtatgatgatttttcaaattcaattactagttggattagacctaatgaggagaaaaaagttggattggattggatgtccaaccttacctttgatgtttaaggcaccatttatcaaaactcttggcatagatatttatttgaataggataagtccttagattttgttttgtttgtttttatgtcacaacgcagacccccagttataatgtaattatgttaaacaagttttttcctcacaatctcccttattggggattcatctaatttcaaagctgtattttgtctgggacttgattgagttaagacaaaaaaaaaatgtttcttggacattggtgtttgtctaaagttactgaaacttgttgcttgagattattattattaatatttgggcaaaatgtttatagctgaattttgattttgaggttggagaagtcaacttgctttattgtactgcaattgtttaagttatttgctactttaatgcattgtctaggaatatattcagattgattttcagtttctttgatctgatatgcgtgatagggtgagaggtaatcagtttgttatgtaattttaatcatagtaattatcggtgctggttttcgtttttcacagaacaaggctacagtgttgttcttccagaaaaattgcaaacaggaaagtggaatgtgtacaggttggcctatcccgctgttgctccctttgctataattaaaaagctccatggccgtattggaaacttctctttttttttttttgccaattttattttcttgatgtagatcggctcgttcacctttgaagcttgtcagtagatttcacgatcatcctgaaattggtacactacatgacaattttgtgtgagcatcctcaattt

SEQ ID NO: 29952 - DNA, 2381 bp, Cannabis sativa
ttaataaacggttccttcaagtaaatacacataggtgaagattatttcttttaccgaccatgtattacaatactaaagtaggttagataaaagtctgaggtgttaggctgagatagtacagaaaaaaaatttcttgaactaatcttaatttggcacaataataacaccacaaacgagtgagtttcttctacttctaatctttacgagacataattaagagaaccaagaaaagtaagaaaataagagatggaaaatttaaacaaaagcttatatcgagatggtgttgtgttgggtatggcttccttgtttgtgatatctgccattgttgtatcaaagggatcttacaaaaacatggcatggtctaacatccacacggccactactccattgccacagacgactcatatcacaactcctacttacatggtactctacttattattcaggtttgatattcatttatttattacttgattatttatattgtatgcatcttgtatatatcttttaaatgtaggatctgaataattttgtatatttgtattgtgaagaaacaaagaaaggttaagggatcacaaaatttggaaataaataacagaacaaaaagagacagagatgaaaagttggagatggttgaaggtgatcttactacagccagagcgttaataagggaagcgatttctaagaaatttgttaaccaaactaattatcctcttcaagattcagattatgttcctgtaggagaaatttacaggaatccttatgccttccaatggtactgaatcttttcatgttatatgtataaatgtgtttggttatattttaataatttatgtataaagaaaaatagtaaaaatagtcctattatagaatgcaaatttatggagagtcctaggagaaaaccaatgtttcattagtcacttgttctgaataatagcaagattgaataatcatcgtcaataagaaaaatatgtatttcaatttcgaggaaagaaaatttgatttagtacattgaatatttgatttgaatatatgtcaggagttaccttctgatggagaaactgtttaaaatatttgtgtatgaagaaggagagcccccaatatttcacaatgggccttgcaagaacatatactccactgaaggagttttccttagtttgatggagagggagactcatttcagaacttgggatgctgataaagcccacgtgtatttcctacccttcagcgtggccatgattgtggaatacctatttgatcccattatacgtgacaaagctgtccttgaacgcactgttgctgattatgttcacatcatttctcacaagtaccctttttggaatagaagccttggagctgaccatttcatactttcatgccatgattgggtgattgcctttctttcttgcttactatattgtagttggctgggcattaaaaacattttgtgggattcttgtgaagttgcaagagtactttgacgactggttggattatcaatcagttttagcttttatttctaaaaaattcttttaacaaagtaaactttagtagctttcacttgttacatttgtgttacattaattttagtgtaatatggctttcattacagggtccaagagcaacttggtatgtgcacgagctatattacaatgcaatcagagtactttgcaatgcaaatatctccgagcatttcaaccccaaaaaagatgcatcattcccagaaatcaacctcaaatcaggagaaatcagaggcctcacgggaggcctcccactctccgagcgtaaactccttggattcttcgcaggtgggtgccatggccgaataagaccggcgttgctgcaacattggaaagacaaagacgaagaattgcaagtgtacgagtctctgcctgaaggaatttcttacgaggagaagttgaagaagagcaggtactgcatatgccccagcggccacgaggtggccagtccaagaatagtggaggcaatctatgccgagtgcgtccctgtgctgatctctcagcgctacgtgttgcctttcagtgatgttttggattgggagacgttctctgttcaagtttctgtgagtgaaataccagagctgaagaacatcttgttgggaatatcagagggaagatatttgagactgctagagggagtgaagatggtacaaaagcattttgtggtcaatgatcctccaaagagatatgatatgtttcatatgattcttcattctatttggcttaggagattgaatgttaagataaataatactatagttaatgattgatcacaattatagtacaattttttagaactttttgttattaaaacttaacagatataagcattaattcacttcaataatcaaacaacaatca

SEQ ID NO: 29953 - DNA, 2052 bp, Cannabis sativa
gctctatttctttttctttattttttgaaaaggatagctctatttataagatattatgtattatctttgactagtttctcgagtgaactgggtatgtgctaatggcctaaacatatgacgacttttcatacaaaattgacttgtatctatgctcaataatttatcatttaattagtactacttgaattgcattgtaccctctaaaatttaattcggatagaagaaaaggaagatttttttttttatgaaaaaaaaaaacaaaacttaaaattgcatattgaaacaagactaaaatattacaacaaagaacaaactagaatgggttggaaatcgacgggcgcccacacattacagtcaaacactagaagcctagttcttttgtttttaaacaaacactacagtctacaagcctagctggaccatctatattctagtaaaataaatatcactatcacactactaaggttttgtaaacacaaaaacggcgcaaaggaaagctttgctttattatgaaaataatattgacattcagcccaaaacgaaaacttgtttaaaaagattttaataaagaaatctaagatataaattaaggcctaaatttgaagtggttccactattactctctctaataatataataaataaaagaaaactatgatgggataaggtgtttacttgtcgtaacactctgtctcttgtttgagagtttgaaaattcatcatgctcacccaatcttcctcaatctcatcccaaaactcagtgtcgttttcccaactggaagtactctgctgaaccaccacacttgactctgaatttgattctgtgttcatgcactttcttttttcttcttcttcatttttatattcgtattcagacattgggaaattgagctttgcctttgaccctctgaattcaatcgctgctctatcgtaagccttcgccgccagctccgccgtctcaaacgtacccagccacacacgcgccgccctcctcggatctctaatctcagccgcccatttcccccacggcctctgcctcactcctctgtaattcttcttcttcttcctctccaccaccgcactcttgttattcttgtcgtttgaagcttttgtcctcgcaaacgacaacgacatcgacgacgacgaagacgacattgtttttgttgtcgttttgcttaaggggaagtagttacagcctaagcagccgttaatcttgcacacgcgacacgcgtcgttatctggaagcgacatgaatagagtactcccgttcgtaccgttaattgctgatgtggcaatttggagtgatttaagtggctgtgggcccacttttgtgggcccaggatcggttccaccacatatgacgtgtttcaatgcagagaccatgatagagtgctcctcgtcgacggtcacattacgcggaaacgtagggaaggacatttttgcaaataccgtattttgtttgaggggcttctgtggaattatgggatttgaaaaaaccttcttagcaaatatctcaaacatgaaagatcttaaataaaaaaaaaaatcctcagaacgacagtttatttgggaatttttttttttctttccaaaaatggaattgaggaactgttgaagttggttatgagatatatatagtagtagtagcaggagagagaaaatagaatgccacgtgtcaaaattctaatatggatgagttttgtaatcacatgttcttttcgtttgttgacacgtggagacatctcaggggttgtggtaaatgccacagcatataaatatagtttgtgttgtcaattgccacgtgaggaacttcttttgtcgcttgggtgggcaagtgacacgtggcttctaagattttgtgaggtacacactgtaatttcttatgtgtatattttttcttatgctgtcgtggcaactcctagctttgcacaattttttctgattggtggattacttaatatcataagtattaataataaatataaatattaaatttaggataccattgtttaagattttttcttatgcatgtagaatgtttttttttttttttt

SEQ ID NO: 29954 - DNA, 3296 bp, Cannabis sativa
tgaattttttctccttcatctctacacaatctatcaaatttagaagtactaagatctgcggatgaaaaataaaaaaatagttaaacttactccacagatgttacagatgcttacttgatagtagaagaaatagaaactgcggagtcaaagcgaatggaatccaagggtccaacttttgctttctctacatgtgccccttcactactgagatcaattcttagagtacctttatggcctaatattccaactgcctgtaccatgattcaaaacattaatgtacatcacaaggaaaaaagagagtacagaagtatgagaaaagcatgtcttactcaatgcaatataaacaataaccaaatgtaatctggaaaaagtaatcatttggttgggatttgggttgagagtgcgatgtgtctggaatagggggtggaaaaaatatatatttattttcacttttccttctttagggaaattgtgtagtaaaataaaaaagggtgaaaccttttaaaattttatgagaaattgaaaataaatgaggagagaaaaaagatgggtgcaaatagaatccactcaatttaaatcaattgtacttattgcatgacaagtaatacctcaaagtaaattgctttatcggtcagagtaagcttccccggccacgccatatggttatcccactttagaataggctgctcctggttggaaccaatgcacaagactttctcctcagaaaggtgggaatattcttcaatttggtatgattttcgcttttcatgaaccctgcacataatataaaatacaacaatatgagcttcttaaagcatggaagcaaaagatccaacagattgaaagcatagacatgcaaattatggtgatttatggtaaatggcaataacggggtgtacagatttctattcatagaatataagacaaaccacagggcacagttgctgaatgcttccatgtatttcttagttttattacatggaataccataagtataactttacccaagtttcatctttctccttcttatctctccactaaccagcccttgcttacctctcttaacctgtactgtacatctaatcacctctcctgtatcatcattcctgtctctgacctttgctgatgtatatactcgatatatagtaacttgcatttgatcaacaagatgaaataatataattaactttctcatgttgaactggtatcatcatcaaattcatgtcactctgtacaaaccaggtaagccccatttttctctgctggttttccaggtccagcatcattgaggcttcttcatcacttgcaggagacatgaaattaaaaaatatataggtatggagctcaatacatttaccatcttccttcaaaccctaaacaattaaagtattatacagcaatttatactttgttatttgttaataatcttccatggcttctaccccatgaagacgataaatatcacaggtaccacaacatcttgcagaagtaatcagagattagagtctagagcaaagtgtttatttttaattacaaacaagaaaattattaaaaataacaagaacggaagtgaaaaaactcccttgaaaaagaaaaatggagctcacttgatcagttcccggacataagtaagccacaagcccaaagaaatgcccttttcatcaccagcaagagccttatatagactatgcgctgttgaccgatctgccaccccagaaatagcagaagcaatacgaacaaaggctttctctctaacaagcatcccctataatagcaaggacaaaacaatatttgagaccaaatactttaatggttacatcatcatttgttataaaagaaaatcctaagttttcggtagcatatttatgtgaagatcataactataaacaaaaatggtctcccaagattgacactgagccaacttatcctactttccatagataactcaccaccaaaaaattcttccgctgtatagacttgagaaattcatgactcgggcctccctacttttttttttaattattattattttatattggaacaaagatacccatgaggattttcttctttctttttctgtcattggaattttttttccatgaaattccattctccttttatatttataatgtattgttttcaccttgtcaagcatggtagtaataatctagcaagtttttatcattattattattattatttttgcgtgaggggccaaactagttgagaggcgatgaatcatcacttgtacaagctggtaaatcgttcatgtctactatggatgaccctaagttcatttgaggtcacaaaactctgagaacaatattaaagcctgaaatatattgagcattgcgaattacctgaagtgaaactttttctgaagtgttggcaggctctttacagtaaggattttcccatgccagcattgttatgaatacaagtctctgaaatgcaggttcctgtagagataccaatggtatcaaatcaacaacagcaacaacaacaacaacaaaaacaataataacaaatgcaggcagaagtctcaaaccatacagatgtctaagtaggatattaagtacccaaagggagtacttgttccaaaatacacatccttagctcattttagttttcaacatcatatcaactatttaccaatgcagggttgcaagtgatactcatatgacgtctagtgaaacatcaaacataatgaaaagaagaaagaaaaaaagaaattcttccgttaccagtaaccacagaccttaagggaaggatgaaaagctgaaccgtcccttgataagaatctaaagcagcagtattcgaccaaattacgagcatcactgtatacagatttaggaacaagtgccttaaatattttctgcattttttgtgcagtcaatccgttcagcctgcaggtcttaatttcagctagtcagatgacaattacaatattaggttagtaggcttaacagtctgtagaagttcttgacaagagcaatagtttagatgaaagcattcaacaagtttcacaagagaacaaatcatcactaaggtgataataatataaaacataaataaattaagcaagtaactgccacatgttttcacctgctaaattgctcaatagatacaatagcagctaaagaaagaaccccttgtggcattctgctgttaatcgtctgttctgccacgaatatgtcctccatggtagaatcatctaaagaattttcaggaacaggctttctactctggctagtggttagtggagatgccacttcgttgagaaacttttgggtctt

SEQ ID NO: 29955 - DNA, 1714 bp, Cannabis sativa
ttcagactgatctactaatgatcatcattgtgatatgaataactctttcatggtaaatgacacgttaataaaagatatttattacacatcagttcagttatgcataattgaattatacgcagcacatttactacatttctatccacttatgtgatttgaatcaaaaattacacactagaagtatagtgtatagtaaaccgtacttaatagttccatattaaagattctcattactttaatacactgctgactttttttctatatcatataatcttaattctcttgtacatccttacaagattatacattctccatatgaataagaaaattttagatatttaataattatactcttataattaatatatcatttatcttataattgtattgcatatattctctaatatattatctattaattacttactttaaatttagcgcataaatcccaatatattgttcctctaattatattttctttagctctaatagtaaataattaactttctgaaaatttcgctaaatattttggtgcttttattaagagctaaagaaaacagtgataccatttaagattacattcagtaattatagtacttacctgaattaagtctggtcttcacttcaatggccctaaaaaggttaatgttgatcccaatgctaagacaggacacgaagaggatccaattgaggcgagcagtcgccataagaaggatcaaactgacaaggagcatatccctaaagatcatataaatgaagacaatgaatctgaggggactgactctgttgatcctgaggaaaatcctcaagacatgcctgttgatgatgatgccaaaaaggaaggctatcccgatgagtcagaccctatggtcaccatggtcggaaagctaaaaaatagttgaggacaaattatagttgcaagagcaattctctttattgatgcatgaaaatatggcgagaatggaggaagtaattgcgacactgacaagtgcaaacagaagcaatcatattacctcaaaagataacactgctgggaaatttgatctcaaaaattctagaacctatgatcctcataaggacaaagggaacgaaaaggtgggcgagacttcaaataaagctgcccatactgaacaacaaaagaaatctaaatctttcagccaacttcaaaagaaaaaaaaaggaatccatgcctcaaggtaaggtgaccagactaattctagaggcagagctgtgctgaaagacaaatcttatgttacagccaaggagcttgttacctgaaaggacacaaatcactgtgatgattaagttagtcgacgtgacgatgtcaaagatatgtatccactatcagatgacaaaagtggaagtctttccacgaatgatcttcaggcaaagttgaacaccaaaagagaaaatgccagaactgagaaagccaaaccttgcagagataatttaaaaaaccatatcaacgattgctttcatgaaagagaatcaccagatgctacgactcaacatttggaacataaaattgagcagttaacaaagctcacagaaaaatctcccaaaagcaaaatagaaccatttctaacttggaggaggaggatacagaaccgtgtgggaaaagaattatagatgcatagttgtcaaaacacttcaaaatgcctcagatggaacataaaattgaacagttaacaaagctcacaaaaaagatctccca

SEQ ID NO: 29956 - DNA, 2090 bp, Cannabis sativa
  modified_base (1160)..(1174): a, c, t, g, unknown or other
  modified_base (1877)..(1879): a, c, t, g, unknown or other
ttactaatccacattactagagcggtcattacactattagtataataccattctcttttgctttaggctgtcaatttgtgtatttagaagaaaaatagatggtagaaattcataaagtgtaaatgggatacctatttgcgccaattcaagtatggaagtcgttctctttcttaaacataattagaaaaggtataatataatgaatatatatgtagatttccttcttaaaggtacaaagaaaaataaattggagaaaagaataacattttaaggataacaattctccactattgctactaattacacaaacaaacagaccacacctgatacatatctaaagccccccactattgctagtaaagtgatacaatgataatttgattggaaatgagagatatgtgatccttaactactctgattgcaaattcatttactttaggttttcactttatattaatataaattgatatttagatttaatttgatgaaattatatatttcataacggggcaggtagaatcatgttggctggccaacaaccaagtctatttcaaagtcaaacttattcaaatattaatgcattgcatcaaatttttagaacaaaaataaaattagttctacacataaaaaaaaaaaaaaaaatcatcaaagtaaaataaaattagttttacacataaaataaaaaatttaattaaagaaaaaaaaaaagaatttactgaaaagtattgccacttaccattatgctaatctcctattgttgaagcctaaagcaaggtattcactaataaccagtaaactaaagccatatgacagatcataatgccaaaggtaagagtgtggctctccaaatgctttgtttatcaactgacaataaaaattaacacaagataatgcttaaaatcaacatgagaaaggagtagaaaaactaacatgcaatctattttgattgaatatagcttctcaaacactgctatttcttttttgataagaaaacaaatacatgattcataattatcaaaacttgaggacccaaattcagtttcgtcagaagtcaaaaagttcatgaatatacatatgtcacccatagatatgaaatatttctcaatggagatccaatagtttggtggttactaaacaatttaactataaatattaatttnnnnnnnnnnnnnnnattaaattttgatccaatgacgaataataaaagaaaaattgaatttctatacttaatttagctacttaattaaaaaaaatatcaaaaaaatattactttttacactatatcaaaaacatatttatatacaaaatacttaagtcaaactcaactttttttgccgaaaaactttttctcttattttttttagccgaaagaacaactccaactcatataatacaaaaatgagagatttttaaataagatagaaaaactaagcataaaaacttaaatgtttataatattactcatgaataggtaatactcattaaaagtgcacccatatagatatataagatgatctgtataactcattcaaagattaaagaataagaacttacaagctatttgtaaagcaaggacgactatgtccttataaccaggaaattgccttcttcccttagaatgaaaactagggttgtacaaaaaaaattgtaaaccgcttaaactgaataattcgctcaaaccaaatcgaaaaaactgataaaaattacaaaccgaaataactcgaaaaaattaaaaaccgcttaatctgttaattgggcgggttgaaaataggtccaacccgcccaattaaaccaaatgatccgaccaatccaactttggattttaattttttttttttactttttagtttttttatatataacataaatgattaaannnataataatataaagttatatacttaattgttaatttcaaagttatatatattgtgttgtgctttggtggaatatgatatttttaatttatctttttaatttttattgattttgactttgaaaaaaaaattggcccctaaatcgttgatcgatttacagattttttttttttttaaattgggcaggttgcacttaaattttagcaacccgaa

SEQ ID NO: 29957 - DNA, 1719 bp, Cannabis sativa
agatttggttggcggtgttcggattttggtacttctcaagatgtttcttcttcactcactttgttctccatatcataatgcccggattgaacccttttgcattgtttcattttatagcaacaaaatggtcattttaccttttcttgggtatggcatgaaataatatgagatatctgattcattgtgttaaattgttctatgaaacaactcaatagaaaccagtaacaaagtttatacatgttcacaacacaacaaagaaaccagtaacaaaactgcatacattgctttattaattcaaaccagtaacaaaattacatatcatcatttcaactatatatccaacaaaaactgttaacaaaactactaagacgtctaattgatcacttatgaaaagaatataaaagcactgcttactagtctaatgacaatatcaaaattccattcactttgtaaaaagttccaacaaattagaatatgtttgatgttgaattaccagtaataacattttctttgccccatattgattctataatttgcaatggtaaaattcttagtatatgcaatgtactgtatgtcttaaagatactagtctatgtgtttgatattactatcatctggtggtaattgttgtggaccttgtggtggtctttgatgttggtgtaattgttgttgtacaatttggtcttgttgatgccggagttggagttgttgttgtacttgttgtagtatctgttcaggactttgataatgagattggtggtgttgaggtagtaccgcgaatcctggtggttctggtctttgatgcctgtaattgaatggtagttgatgacattggtgttgttgaagtaagtgttctggtatttgatgatattggtgttgttgaagtaagtcttctggtagttgatgatattggtgctgttcaagtagtgcttggctttgaggatattggtgttgttgaagtaagtgttctggtagttgatgatactggtgttgctgaagtaagtgttctggtagttgacgatattggtgttgttgaagtaagtgttctggtatttgaggatattggtgttgttgaagtaagtgttctggtatttgatgatattggtgctgttcaagtagtgcttggctttgatgatattggtgttgttgaagctctagtactctttgatgaaggtttccatttagaagctggtttggcacttgtactactactcctaattcgtgttctcgtgcagctgctggtgctagtgctaattcaggtgcgtgtactaatacaggtgcgggtgctggtgctggtgctgcacgggcttgtgcttgtgccacttcaggtgcttggtttggtgctagtactaattcgggtgctcgtgctggtactggtaccatttcaggtacttgtactaatgcaggtgcttggtttggaaatagtactggtgccaattcaggtgcttgtactaatgcaggtgctggtgctagtgcttgtgctgattcgggtgcttgcactggtgctcttgctggtggacgtgcacgtctgcgtgtggttgtaggtgctggtgcttgtattggtggacgtctgcgtctgcgtctgcgtctgcgtctggttgtaggtgctggtgcttgcactggtgcttgtattggtggacgtctgggtctgagtctgagtgtggttgtaggtgctggttcagcttccaattcaggtgcttggtttggtggtgttgctga

SEQ ID NO: 29958 - DNA, 1043 bp, Cannabis sativa
ttaagagttcccacttgaattttggggcttataagttgcactaaaaagtacaaactttcaattttgtagtttctttataattgattctcacacacatcacatatcaatttagtcatattatatgtcctaagtctcttgtctgaaatataaaagttttgtatttattataaaaaatgttcttcgccatttttttatatatataatttcaactatttaagcaactttctaattgcatctaattttagctcaaaaaagtgaccatataaatcaacacaattattttctaatctaagcaagaatatatcactagtagttctaagtgtgaaccaaattcttcaataaagaaatcaatgtacttaattttttcttttttaatattaattttagaataggctggttttaaaattggcattttaaacccatagtaggtaatagaaaaaagcgttcatatataaattcgaaaaaataagttataagatcatcacaatttacatcgaatgtgatcaaagaatgaacttcattcaacaaaaccaaacatggctttacatagatcatctttgataaatattccaaatttgatactaaatttaaataaaaaataaattaataatatatttaaccaaatgtttataattaagtatgtaaaggaacaaaatcatcttatatttattatatacatacttaaaaacagtaaataaataaataaatttttaaagaggtttaattaataaattatactaattgttaaaaataaataaatgaaatattttttttctaaatttaaatcacaataaataataaataagtgatattgattagtgattagtggtaaaaatgtaaattttcaaaaattaatgtgtatcaaatgtgactcatattgtattttaggtaatattttacaccttttattttttttttttaagataagttaaaatattatccatcacttttctaacattccactaaaaatatatattaaaactatatatatacatatattattagtttcacaatatgtcttaacattataagaaccaaattaa

SEQ ID NO: 29959 - DNA, 1569 bp, Cannabis sativa
tgcaatcaccagctcagcgtcctcgaataatgaacctgccaattacattcacagaggagggcgccaaacatgtgaactttccccataattaccccttggtcattgaagctcaaacttccaacaaaagagtttttagagttttggtggataatggaagctcagtgaacattctgatcaaatttccattctaggcaatcgggctctcggaggtagacctataacctttacctattcagctgcaaggctttaatggggatgctctgatgccaatggtaaagatatagctccctataaccctaaaaggagaaaataatatttttgccttcaaacattgcacttttgtggtagtggactatccccacggcatacaacgcaatactaggacgctcagtcctggtagattttggagcagtaacttctatcaggaatctatgtatgaagtttccctacaacaatgaacacattggagtgattagggatgaccaaaagagtgccacaagttgttataatgtctctgttcgggctgtgtttatggtctgggaagaggcacctattgctcccagaatggagattcaagcaaaagctgaagccgtctaggaggactttaaagatgaattagatccctgggttggggtagagagaatgatcaaacaaatggcagatgtagaggaggttagcatttatgacatagaccccaccagaaccatcagagtgggaagaaaattgcctccgatggtgaaagaaagcatcactgatactgtcaaaaagaatcaggatgtgttggcatggagccattctaatatgacagggatcaaccgcaacaccatttgccatgccatgaacatggaagatgtgaggcttgtccgccaaaaaataagactcttagatcccgtaagggcagaattaatgaaggtagaggtcaataagtttaccacgaatgacttcctccaagaagtgttgtatccggttttgttggccaaccctatcctagtccccaagcctaataacacatggagaatgtccatcgacttcacgaacctaaacaaggcatgtccgaaggactgttttccactctcggtgatagaccaaatggtagatgccacatctagatatagattattgagtttcatggatgcttactccaactacaactagataaaaatgcatgtaatgatcgcttagctttattttaagaattagtatataattagggcttgttgttagaagtaagcttttaattattatattatgattatagagatatatttgaattttaggtgtattaattatgttatatatgaaattttatgtttttcatatttttatgctggtaacagtggaatgcgagacttggcctatagagtcacatagacaaggtctagtattttggttttagaggggtaatttagttagacattgggaatgttgagaatactttgggttataattttggactattttacccctaaatagataggttacttctttgagaagtaagggtaaatttgtcctttacctttttatttgttagtgagaataattagaatttatttttactattatccctaa

SEQ ID NO: 29960 - DNA, 3972 bp, Cannabis sativa
aacattactgttacattgactcttggtagcaagaaattgctcaaaatccttcctcgcatcttcctgttagataatcgaatgtagagattacctcggtgatgacagaggaggtcgaaaaacatcgtggagcagaggatcgctagtccccccttgatctcgagccatttccagatcgcacgaggtttccagttcatcatcgaagaagacaatcggattgataccagaaggatcttcgattggattgtcatccagagcttccgtagccacagttactgccttcttcctcactttctaagaaaatttcagtttcgcttccccttttgccatagtcttcgccattgctacaactcacgctgaaaggctagagagaaaacaggaggggatttgcatagcacattagggtttatatggctcactaacctatgcgacaagttatttttaaaaaataaaatataatttttctaaattgaattttaagattattcatcttttaaataagagaacacaactataatttttgaaattggataaatgagataggagttatgcatattttaagtcaaaaaatggtcaaaatgctctttggtcctttaacaggaccctcatatgggaactgaatgacatgttggggcagattctcacttccagttcccaattggacttccagatgggggcaaaaaggcctaggttttcgtgcttaaaaacgactagttttctcccattctctatataactccattttctctcaaaaaaaataaggttggttaagttagtattgatcatattacatctctaaaagtgtttcaaacttactctccatcactcattcataaacacaccaactacacacacttgagccaaacttttccttatcttctctagttttacaattctctctaggatttcacattgtatttcatcttattacagagagtttgctttgtatttcaaaatcaaatatccactgtattgagaggttacattggaactagtagaaaaaaaacttagtcatgggtgaggttgacacttggacacttgttttgtaacaacatgagaacatgagaagagtgagattgtcactacaacaattcgagagtgagattggcacttcaacaatgtaaagagtttgataatcctttggaaaactattggttgtggtgaagttggaatcagtggaaaaacaaattggttggtgagattggcatttcaacaatttggtgaggttgatagtccttggaagaaaattattgtgagaggtatgggaaacaccttggtaaaaaaaattccctagttgtaatggttagtcaagctcattaacttttctcgatagttgaacccaaagctaggtcaataggtttgaagaccaaggaggtaggtggcttagttctaccgaaccttgtaaagattgagtgtttgtaatttctatccctaaactctttagatttcaagtttattatttgtttatacttgtgattatattttgttaacctagaaactttccctgaggacgtggacatcaatgtttgacatatggcatgaaggatgacttcacggagttgagtagacccgagtcatagcagtcaacctaggaggggatgatcctagccctacgcccaggttgactttaggatctcggggatggaagtttggacgttaataacttgaatccaacccactatctctcagtattttgtaccatgaagacatggaacaacctaatcaaaggtctgagagctaaaattatacgaaccagcaactcggaagctaacctgggcacctacggtttccacttatcgcccaagttgacatttcttaactagggttttagtttctaggcccgtcttagtgtaaagtagccaaaaattgcattgggacatcaactagacataacaaacacatatttgagctatcagaattaaattaagagcaagttgatttttgagcacccagggccccaaggccccaagcacccaatgtccaggttgacaatttgtcaatcttggcaccttccaagtgtctaattgaatatcggacttttgcattgaatttgtattcatcaatagtcaagaaataggtccttctagaggaaaacaaaaaaaaaaaactaggcataaataacagtgcccagcacccagtgtaacacgggactggccctacgcctaggttgacaatttgccaacctaggcaacaaaaaatggagtttatcatgaattcttccgagcatcatctatgtcttcaaaaaatattgagaatcaactattttagggaccaaatggaactttcgaataggcaaaattgggtcccaatcgccaggttgacacatgggattgggcccagcgcctaggttgacattttgtcaacctgggctgttttcgattcagttcagtgaaaagtgctctaggcatattcaccgtcatcagaaataataaagatttaagtaaactcgaggagaaaaccacaaacttgagtccctagaaatgaggcccaacgcctaggttgacaatcgacttaggacgctacctttaattgctcaaatgcaagatctgatgcgaccattaaatctagtatggtcaaaaaagggggaggagaccccatcctcaagtttaaaagccttggaagtataaaaaatataatcttaggagctcggtttaaagggcctaactctcaggtcaacaaatggcctagttcactgggttctacttatctgaatttgatgccatttaaaccatccatctagttttttaaaagtccaatgatccgtaaagtcagatcaatcaaattcacaactttaatttttggcaaattgactcactaagaaatcagaagtttcgagtattctgtttccgcaaaatagcaacatctctgagaacatgtgaccaccatcaccaaaacatattaatgggctaagtgatgtcaaattatcacttatgcatctcaaaggacaccccttggacatttttatacttatacagcgtccaggttgacgtcagatgtaattcttatcaagtcattgggacctgaactgccttcagtaaaacgaccataactcactcaatttttatccaattgacgcaattcaacttgaattttgaacttatttaaacgttctatcaagtcatggctcacaccccaaacgtaattctgaagctatcgtcatcaaaattcaccccaagggacttataaaaataagctctgggtaattctgcaggagacccgccgagcaccaaaaattagccatctccaccaaaaaataattttcaccattagatcatcatcaacggtggaaaacactttatttttattttttccttatttttgtaggcctccttaacctataaaggagcgctcccttagctcatttttcacatttagaaaactacctagaaggtcagagcttctctctttagagtttggagtttttgatacttaaacaattgttgtaattaccatctcatgagaaataaaaactcgaattagatgtagtcccattactaatgcaatgtaggggtgaactactataaattgttgtgtctctcattaattacttaataaacttttaattcttgccaatctagcaagcggatgttggcttagaattctaatctagatttctaagtcaatattttggtgctttcattgaaagtcatagctcaagaatgtcattaatcaagatggttgtgacacgttcttcaaggatcgacagaaaaactctagaaactggccaaacaactaggggcacgttagttgacagagttggaactgggactactgttgcgccccatgcaccaagagtaggccttggaaccaactcctcaactcatccttcaaggccaccacgtaccatgtgctctcgagacataaaacaacaaccaaatcctacctcgagagccacacgtagaggtagaacaccctgaggaagctaatccttaggtagctcaactcagccagactgtggctgacttgcaacaatag

SEQ ID NO: 29961 - DNA, 1667 bp, Cannabis sativa
accgataaaggaaagaccaatctccatagagccacagagccaataaattgtcataaaggttccaacagtctcaaaaccaattctatacttcgcattccgaagctcaatcacaaatttggccattgatagagaccacaaagctctaaataaatggattgcaaatccatccacacgaatacagaaatgccaacaagaggaaaacgaataatctggtaccaccatgtatgataagtgaggatcaaaaataaaaaggaagacaaatcgttgctgttagaaaactttaatctgccctaattaattcaagagaatcaaacaaagatgatagattagcggaagcataccggagtccattaaatcgcttgaagaagggtatgatcttccaatttttgcatcaacctttttctctctgtaacttgagagtttcttgatgatagggattcaagaaaatacgttctgtatgaagcgatgcaaaactggggaccctacctctttattaataagtaattaagaatttatatactatttctaatttggcccttcatcaaatcagaaattgtatctatggtacccacatataaaaatcatgacaatcatgcccttaagtcataaacgttattcaaaatagactacataaatttgactcatttatataatgacccatcacacatttttatatttacaactatgaccccaaataaataaatttctaacagttgctacccatttggctttcacactcatcactagaggagaagatgatcagggaatcaataacaggccacctctatcttttgaattgaaaaggcatcaatgggggtgccaacagtagaaacaaattactcttgcactaaaggagaacccaaaacgtatccgctattcccatcatttgaggaaaatgcttataaaaatctattgacttgctcatctcatgaatcttgtcggtgcttgtaaatcctgagcacacaattaattgtaaagcataaggccctacaagagagaattaatttgggcccattataccaaatagtcagaggcaaaaaaaaaaggaaaaaggaaattcttatatatcatatgtaaaatttcctctatattatgaagcggtctccagagaaaatacggaggcccaaaaacttgtggtcaagcggagaagacctaacaattagaagtcttctctccaggtaaaaattttcttacatatatttgatatagtttcaatctataatttattaaagtgaataatttatgtgagcatgcaattaacgcttccacatatcaaagttaagttttattataattgcgaaactggcgagctctgtgctcattctcgcataattgctcaacaaaattattattgcgcttatacataattacaaataggcgagcctaatatagtattcatttttgcgaattggcgagccttacatgtgctcattttttgcaaaattatttaacaaattcataattatgtttatgtactctcaaagagacaagctcaaacaatcattttgtatagcaagtgtatggaaagctcgcgatagtgctcaattatttctgcctgttagcacatcgcagatatgaccaacgcctcgcttaagcaccactccaattcaatcgggcaacacaaacctcaaaaggtttgctggcgtaactgttggaattattttacc

SEQ ID NO: 29962 - DNA, 3037 bp, Cannabis sativa
cccacaaaccaaacaattctcagccgtcggaggattaaaaatgaatcaattggagaccgctcgaaatacaatgcaattggagagacagaagttggaccattcaaagtttcatcctctgagaaaaaaggctgaccccacttcccttagtgggcccccatcaaaaacccacccaaaagaaaaattcttcttcttcttcttcctctttctttcttctattctatttctaccccttttacaatgggcccccaccaaaggccagcatgccaaaaatattgggtcccacaaagctgaatgtgtgtgcttgtttggccaacatgaaaattttttggccaaaaatctttgatatgaccccacagtaccaagaattgtgcaaacaagaaaaaaagcatttatgtcattaacaaaaatactcaaaagataaacggttggtaaccaaatcagaaagaaagaagggcaaaaatgaaaaaagaaaaagctgaaatttgaattgtgtaaacttagtcaggcatgtctttctttctttaccttacaatatctgcttttattttttatttttttttttgacatggaaattgagcaatagtatgataacctttgtaattatttagtcccccatatttttaaaaaatacactgcaccaactaaaagagaaaaataaaagtgagactatatttctcatatcccaagaaaaaccacttttcttatctttctctactcttgccgttgactgccctagctactcactcatatcatatattctttctttctttcaaaattactattattattattaattatattgttatgaaacacacttcttcaaatgtgtaagaaaacatctaatatcggatatcacaaatatgctaaatggagtatcacttttagtatatttttttttttagcttcaatgaatgaacaaacaagaatattaatttgtacagtaatagaaatgttaaatattattttaaattttgtgttttgtaaaaattatcgatttaatatcaattttattagatatacatgacctcatttttctttgaccaaactgatgtctatgaccaaaataattacatttttttatatttggtcgtattaaaaactagtttcaagttatttttttttaaaataaaattaaggaaaattaagctacatttcaaaaaatattgagtgtgatttttcatttaacaaaatagaaagtctaattaattagttttgtaaaatacagaatccaaaataatatttactaaaaaataataataaaaaaatagaaaaatatagaaaaaaaaataaaatttaataggtattcatttgttggaacaattttttcttctatttttttaatgagcattgctattaggcatcagtggtgcctagtactttctcgacatgtcgcgttgcgattggctagtgatactttctaaaagctattatattaaattatatgagacccgatacttggttggaccaatagcgatattgacacataggaatgtgctagacaccacttatgccctttagcatttctcttttttaataaaatagttagtttaccaaataaaaaagtcattccatccatactttaaaatacaatagaaataataaaattgattctttcctattccatttcatttcattaccaccagacaaacacacaacctaagcattaaacattttaagataccacaatatacttttaccattattgtcattattaccttttccttttcttcttctccttctcactttctttttcccatgttgcatataaatatatatagaagcataatagatagatagaaagaacactaaaacaccccccattatttttctccatccatccatcctaaccaaatattttgttgtcgtttcaactaaaactaacatatgaatgaccaccagtttcatcttccaatgtcgtttttcaacaacattaatattacaaataacaataataatagtaataactcttcccaaggttgggatcatcaccatcatcataacaacaacaacaatttcgacagccttggatttctcaacaccaacatgtcttttggtaatttcactcttccatcttctactaacttttcactgtttaattttgtctctttctccaacttactcactatttatattcttctcatatttatatttatatgtatatatctctctctgtttataactctctctgttatgttatatttgcagatatgagtgagaacagttcatttcttttgtctcctaatttattaagttcagaaatattagaagaagaagatgatgatgttttttcaactggttacttagaagatgccttgtttgaattcactgaaaaatcaaagagaagacgtttattggtttatactgatcataatcatcatcatcatgaaaatcttctctctaaggtactaattatacttataattaatttacattattattatataataattaatcaattaatctcaacttgggttttttatttatattttacagagttacttggactcatcagcagcatcatcatcatcaatatctaattgggaaattatgtcatctcatgatcacgagaataatttcaatttcatgactcataatggtcagttcagtattttataatgtgcattattatcttatatactattttttcttttattttttttaatttagttgttatataaattttagttgcaatataaattactctattaattagttgttacgtaaattttcgtaaaaatacaaaaaaaaaaaaaattaaatgtaaaaattaaaaaaaaaaactcttattattatatatgtttaattttgtattaacatattaattatgtttttaattttggtaacgatctcaggtgggataattttaaacagagaggagatgaaaacagtatcatcaatatcagaagaagaaaaatcatcacttgattcatcttcatcttattattcttataataagttattagattcagctaataataacagcaacaactccatctctgacaaagagaacaagtacccttcttctggtaattaattt

SEQ ID NO: 29963 - DNA, 2876 bp, Cannabis sativa
acagttcttgtaacagatttccgaccgatagcgctttgcaatgtctcctacaaggtaatttccaaagtgcttgctaatagaatgtgctacattctcaacaaaattatttcaccaaatcaagcgacttttgtcaaaggaagacacatagcggaaaactctatgatcgcaagagaaattgtccattccatgaacaagaagaaggggaagaaaggcttcatgatgataaaactcgacatggaaaaagcgtacaataaaatggagtgggactttattatctcagttctaaataggttggggttccccaacatgtttactaagtgggtaagctcttgcataatggtggaagatatcaagctattacttaatggtgccgtggcaggacgaatcaagccagaaaggggattaagtcaaggtgatcctctttccccagcactcttcattctcggggctgatgtgttgtctagattaatcattgacaaggtcgacaagggtctgataaaaggctttcgaatgggaaggaatggagtggtcgtaagccacttattattcattgacaacattatcttgtttgggcaggccacaacccgtgaagcagcctctttcatggactgccttaatgaatattgcaagctatctggccaaaccgtaaacatccacaaatcggcggttttcttctctaagaaagtccctgcaataacatcgcaagcaatatctcagcttcttggtatgaagcggatgtctaaaaaggtctcctacttggggatccccttgtttcgatctctaaagcgtacagatgacacaaaattcctggccgaccgggtgctacatcgagttcaaggatggaaagccaaacttctctcatatgctaggaaggcttgcctcgttaagaccgtgggctcttcaatggcaaactatgtagcagcatcggatgttataccatctaccacagctaagaaaattgacaagctccttcgtgacttctggtggggtgactcggaacagaatagaagactacatacaattgcttgggaaaccctctgccgcccaaaagtaaatggaggtctcggttttaaagcaagtgaagcaatcaatcaagctttcctcatgaaatgggcgtggaaagttctaaccgacaaagaaagcctttggcgaaaattcatggaggccaaatatctgaagacttcaagcttccttgacatagatataaaaccaaccgactctctgctttggaaggcaattctgcgaactagaactcacttggagaagggactctatcgcaaaattggagatggaaatctgacttccatctggtttgactcttgggtgccgggggggaccctccaacctacgcccaaacataatgccacatttggaatgagcatggtaagtaactttatctctcaaggtcgttggaatgaatcactaatccgacaatggtttcaggaggatgatgcgaagcccatactcaatattaccctccccaacacaccttgtgaggatacgtggctttggctcccagaaaacaatggaacattctcaatcaaatcggcatacaagatagtgaagaatctggaaaacatggcacatggcgataggaaatggaggataatttggggtgcaaggatccatgagaggcttaagatgttctggtggaaaaccatttccaatggtctactcaccaaagatagattgtgttatattcttccctcgatagatcctaattgttcactatgtaatggcgagatggaaacttcactccacctcttttggcaatgtaactttgcaagagccttgtggtttggatgccgctggcaagtccgaacaaccgtgagtactattgattgctgggaaaattggcttgagtggttctcggttgagtcccataggccagaacacattcacctgcatctattcttaggtggggctgccataatttttgagagcatttggcgcgaaaggaataacctatcccatggaggctctcccactcccatcgggtctatacttcagcatataaacttaagaattcaggagatctccgaggattctaagccccaagttgctgagttgaaggcttggctccctcctcctcctggttgggtgatgtgcaatacagacgtctccattggtaagttgcaggcagcagtggctgcagtgtttagaaatgaaactggagctatcaccaattgcttcactttcaggctggctgtcagggagccgctccttggaaagacaatgaccctatgtaaaggaacggaagaagtagccaagcaaggttttaggaaggtaatcttccaaaatgactgtgctaatgcaatctctgctctgaaaactaaattgcaggacatcaactcgctcaattttaatatccaggagctggtgcataagtttatcggtatttcgagcagtttcaatctctgggaagcttcttggatacccagaaacctcaatggtgtggcccattcgttggctaaatgggcaaatcaaaacaactcttttggctggcttgatttgtctcttgaggatggtcccttacgctctgttcttaaagagattggatgacttgaatcctcccttttggtagtagttgttagttggactggtagttttatttctagttctgtttcttgtttgttgtttagactttaactggcttagcctgctttgttttttctgtgttagtttcttgttaggccgttaggccgggtttgttgtttgcgtcccctggcacttccaggggttccattaataaaaaaaaatgatttaatttgaaattacatcccattgtatgatttactcctttatgatagcaactttaatatggtatttgaatatttaatttcttaaaaataattaaaatatgtagccataaatta

SEQ ID NO: 29964 - DNA, 1381 bp, Cannabis sativa
  modified_base (1308)..(1319): a, c, t, g, unknown or other
aattgggaaaccacaggcccacgtgatacaaagatatttttgcatgctgaaaaggggcgggtcgcggcccgtgtggcttgtaaaggtgggattttcggtttttttaaataggcgggtcgcggctcgtgtgtgatttttcccacctgtgtgacgactaatatcttttgttcttcttaggattccgatttttcacattgatatttttatgcgatacattaaaaaatgtgggggcctcaatcataacaatattttgaatacaaattctcttaaaaaaaaaaagggatcaagatcattttgaatacaaattatgattgacgcctatttgaaattgagtaaaataggagttggtgaaaaatagttggttatattatttttcgactgttttaaaactattagtaataattggcactatagtcgatcgtttagaatagtcggcaaagaaatttctaacagatttaaactatcgactatagtgaaaactttcgaaagtattaaaccatcacacaaaaaaatccaaatttgagccattacgaacccaaatttgagccacaatcaaaattaaaataaaccacaaatttcaaatattacacaatataaacacagatataagatattacacaaatattaaaacacaataaatatatatattacacaatacacaaatcaaagattttgagagaacaaagagacaatgagagagagacctcgccaccaagttatcattctcagaacaccacccacgaaatacatgcaagaacggagagacagtgagaaagaaatcatgtcgagagagagaaagagagagtaacaaaagaggagaaatcatacctgggctgtgtttcgggtctaacaagtaagcgttttctcggttattggtgtcttttggagtggttttacgcttgattttccttgttttgaggttcacggggtatcaaaagtcaaattcagtcaattgatgaaaagacgggacaaactggtaaaaaatcgaaaaaatctgctcactgggtgtcagtagtcgcgactagctagaagccaggtcgcgacccttttctgtggttggtcgcgacttgggagatttggcagaaactcggtttttcgagttttgcctctcgtcgcgaccagcctttaagttagtcgtgaccaggtacggaaaaacgcagttttgacctaatttagattttttctcaattggaggcacatctttcatccctatataaggaatacgactcagaaggtcaattgaagcaagaacagacctgaaaagtagatgaaagaggagaggaagcgatcttgaagacccggagcgannnnnnnnnnnngtttctttcttttacccttattctttcttttatgtctcgttttgtttcagaattaatcatgg

SEQ ID NO: 29965 - DNA, 2550 bp, Cannabis sativa
  modified_base (350)..(350): a, c, t, g, unknown or other
  modified_base (2007)..(2011): a, c, t, g, unknown or other
aaattatcgttttacccttcaatgtattttatctttgaaatacttagctgcttgtaaatgatatttcgaaaaactaatataattaccgaaataaacattcgaccatttaacgcctttagtgaagcttaaaggaaaccatcatttaacttttaatataatatagatgttataaatgttcatatctatgattaacactctcactcaattgtactattgtgttcttaatatgtaagtatgggctagtcttacgggtaaattcgtaacaaactagtcaaagaactcgtgcaatataattaagctagagctcaatcatctcaaaattgatatcaaatgatctatgatcaactaantgacattgacttagaaaaaatatagcagtaagtttacgatatcttttctactatcaatattgatcaagtctgaagtatagccaatacatcgaattctggtttactttactagtgacttggaaaagatattccactcagctaagtgtaagtaaactttatcgttgattatcacgtcatacatccagtgcactgataaatcgtgggactaaatataagtaatttgaagcatataatcacaattactttccattgtgatgacatcattgtaattgtgaataactatatgttcgagatttaatagaacttataatcacataataaacatgtaaacaaagcatatgccaatttcagatttatgatctttattgaaagtaaataagattacaataaaactgaattttatttaaggtataaaatctcaacaactacactgtgtattgtatatatagtcttacattaaattgtactttatataatatttttatgtaaaactatatgtggtattgaattttatgaacatataaatatattatattttagtacaaattaaaatttaacatagtattatataaaaatataatacaacacagcacaatacaacataccaaacgatcccttcaaaaattagtttaattgtaataactatgcttacttctacttatccaatagaccatggtttaagtcctagttaaaatatatacctttaaccttcttctttttttttttttttttttttgcatactatattattcttgtaaaagttcaaaattgtgtcccccctcaagtttatttttgaaatcgccactgattatttgacaatattttttttaagttgtagttcttgtcttaattaataatttttattctattcttttatatagttgtattttaaagtattgaaatattattctaatagaatgattttttcattatttttatcgaatgactattccaatacaaaattctttattagtgtatatttgtgtacacatatgaatactcaattttggttattttagtaacaactgtgactaatgaacagtgactgtgtatagtagttgatgacatgagtctttctcttttttatttttgaatgactgaatttgatgatagtctgttgagatcattcattttggtttgtatagtttcattcaatttaaaagaatgatgtaatgtaactatgaataaccttcaaaattggttcaaaatgaattaaatgaaggtgatcatttccaaagtcatacatacgtaccatcaaggttgctggcattatttaatgatgcataaaaatccattgaaaatatgagtagaaataattaaagataatacaatatagtatactatatggcagatcctatcaattttgccaaagtcaaaagaaaatatttaaagaatacataaatgtaaaaaattgtattatataagtgggaaaatgtcttattttcaatcatattaaattgaattatagttaaactaaatatgtgaagaaaaaactaattcttctaactctcatttgattcaagacaaaataataaacactaaaatcagctaattaaactaaacaagttaattaaagttatcatttaagaaatactaaaccacactgatggaagtggtgcctaactctatctaaatatgttatattattattattatnnnnnttattattattattttatgtattttaatttaattattattatatgtcaccaaagaccatttataatacaaaatgtataatttgtggagtattgttgttaggcatcaatactacattctagaggtatattacgattaagatatatctcttaaaagttatcatattaaattatatgagattagagacttaattatactaatagtaatataataacgagaaggggtattaagtgtcactgatttcctttagcattttttataatttatgctaaatttaacccaaaatatagaccaaagtttttttttttttttttttttgtaattatgctctaatacaaaaggagcaaaataactaaaaaaaatcaataatcaataagtaattaatgtttattaaaattgtacaatacatttaattcttttatgattaactttttttttactattataaattttagattaaaatgtgaattaaaaataaaaagcttttttaattaataaatgtattaatgagaggtaaagtagtaattaaaaaatgtggtat

SEQ ID NO: 29966 - DNA, 2246 bp, Cannabis sativa
gattaaaggatttgcaagctaatcgagctaatgttttgaattttcaatgtttgatagaaaatatttctatttttatgtctagtttcttaggattacaattctatcatgtttatcgatttgcgacacatctcatgagattaaagtatgctcttttggtggactcataatatatatggatgatcatgggggatttacgacatcgtctattatctattgtattatgacattattaaactaatatataacattctatctcaaaagaaaaatattatacccgattttataacaatacaaaaaagtataaaatattgtacccggttctatcaaaggatacttgacctcagcccctaccatccttttcttaacgtaatagacagaatgttggacctttccttcctaccggactagggttgagctaactgcatttttggaggtagccaaataaaggtagagttgacttggccgtatgtcctttcaattttttgaatggtttggatagagttggaggcttggccgtatgtcctttcaattttttgaatggttcttcgcattcctcggtccatttaaatttttgacttttcttcaatatattaaagaacgggatgcgtttatcagtagacagggagatgaagcggctcaaggttgcaatctttcctgtcaagctttgcacatccttatgtttcttgggggatggcaagtctagcaaggtttgtatcttttctgggttggcctctatttcttgctagcttgctacgaatcccagaatttttcttgacttaattccaaaagagcaattcttggagctaagcttcatttcgtgctttcttaccaccttaaagcactcacagaggtcatcataatggttcttaacaattttatatttgaccaacatatcatccacgtaaacctctatgtttcttcccagcagatttttgaatatcctattgactaaccgttagtaagttgctcccgcattcttgcgcccaaagggcatgacaaggtaatagtatacccctttatctgttcgaaagttagtgcattcttggtcagccacatgcatcttgaccttaagtttttcataaattgtttaaatatatcataatctacatccaaatctaatcttattaaattaaaaaatttagcccatatgtaatttttatttaataagatttcatatttaagcatgtttatatattggtaaaaacatgatttatttaaacttcaaaactaaaaattaataattacgtaactttattacatcactattcatatatttctacacaactagtagaaaattccaaaatttattctgataacttcatctagaatgtacaaatttttattgtataattaagaaaattatgtcacacttcatttttttatcaagaaggaagaacttcattaatcaaggacaaaaccaatacaaatagccaagataagaaccaacaacccttatccaaaacaaatcaaccagagtaaattacatttgaaactgttgtaagaatctactctctactctatccaatcttctatactttacattttagactttatacttcactatgtttttaatatcagcaacaatgtgagtatccgtattcaagtacccctcaaaaacatatctgttatgattgatccagaagtaatagcaagtagcagctgctatattgaattttctcatccagttatccaagttcaaagataggcagcctatccaccctttaaaatccaaaggccacattcggttaccaagccaattaaacactaactcaacaactttgcgagagaggcagcaagagaaaaacaagtgttcatgagattcattgaactcatcgcacaccgggcacttgttcgactccataggtatgtgaaatctagccatattgtccattgttaacaaatgggagttaactacttgccaaagcacaaatctgtgctttggtaaattaagagaactccaaatagttttatggcaatgaaactgattttgatcaactaagttattgtattaaatacgagttttgaatttacctgaaatctcagccacctttatttcttgttccgtgaacctcttcctcaagtggcaaagcttacaccaataccaactagtatcgggctttaaatcatactaccaataagaagtttgctttaggtaaatggtattgacccatttaacccacaacaagtcttttttattagaaagggcccaaacaaacttttccaggttcacatggttccattttaca

SEQ ID NO: 29967 - DNA, 1291 bp, Cannabis sativa
tgcaaccaatgtaagatttcttgaactttaatgtgttttgttaacatagattttcgttgagtatatttgagcctaaattgtgataaacttgtacaaaaaagagaaacagtaaagaaaaaagtaagaacacgggttttttacgtggttttgtagttaaaattctgcatagtccacgagtcaatctttttagatttttaatacaattttagggtgtttttctcttatccccgcctttttttagtgtaacatgcctccagttctaattacatagtcaggcaattaattacatagttgactgatatctttacaatgattatcccctgaaatcgtggggtttgattacataccatgtagaataaatgtggttaatatttgaatatcacaaagctgtgataagtccgcttttaccaggtcatggtaatcgtgtattatacacgttgtaaatcataacattctaggatgtctcgatgggaacacaacatcaataaccttggtagcgagctagaacattcccacatctttttcgaggttaatcatataagtcttgtcgattttgcgcttgaagacataatgattcatctaacaaccacaactcttggcgacaagctaaatttcaacagccaacatcatttgaatgtcagcttctatccgagaaaactaactcgacgagactatgaatctcattgaaagatgtttgaagttaattagtgaaggtgccaaaagcgtgcctccctatagcgatggacatctcgctaatagtacttgggttttcccgactactatacttagtttgtgtaaggtatattatacgctaaatgtcttagcaatcatttacatctcgagtacgtctcttcatgcgtaacgaggttgatgcctcgccttacacatccaaggtcgtatgatttcttgttaacacacgagatgacagtttgtatatctttatctcgcgtaagaccttatagtcagcaagttgtaaatatactctgctatttccgcattaatgagttattccattttcaaatgtaattaccgttacactcattgattcatattcttcccaatttgacacgtgtcctcctttgaaatgaagctgaatttcggttataacaattgccacttaaaaagttatttttaataaaaattgctttttaaatgatcacaaagggtacatttgtcataatttctttttcaagatcacgcatgtccttgattttgacagcttcatgattttgagggtcattattatctttaatgatctgccctttcaacttcttcactcccagccgttaga

SEQ ID NO: 29968 - DNA, 2925 bp, Cannabis sativa
ataattaaacactaattatctgctgaattccaatttaaactaagtggtctttacacaccaaattccaacaggtgaaccagtttgctaggccttttcccactactgccatgtacgagagagctcttgcgttagcccaactgcctaacttcaagaaggatatcaggatcctaacctcttcttgtgctttagacgattttaggttcaactttgttattaccccttataccggagtatgagaaatcccgcgacctttgggaccccaaaggccggccttgacggccataacaaaaagcattgtgtctgggccttcaaagaaaaggacagttagggagtgcgactctcttggtgataatttctattggtctttcttattgcatttctttattaattcgcatgctgttatactttactaattgtttttgtgtgtttttgcatatataggcagcctgttgcgacaagtgacctaccaggttaaagggggttttccctcgaacacctctcttatggcccctcctggcaaagttagaaaaatagctctcgctcgattattgacattcatacccatggtgttggctcacctacctcatctcaattgcatctttcaaactccacatctggggcagccaatgataccattctcattggcttaacgtctacgggggctgacttacttgcagcgctacccttgagggttgttgtcagtgcttgtctacgggcttgtcggtggcccgtacctacactaaaggcctcatggataagactatgtcaaggcttgagtgtctcacccctgcccaaattattgcccttgggtgtcgagagatgataagggtaagttttctcatgcttgtaaaaattcttttctttagccatcatctaacatagatgtcacgacgtgtgacaggccgcgacgattacttcctacagtcaatccaaagttcttgccctacaggaagagcatgacaagcagggagcatcttcactccagcttgagcttgacaccttccatcgagagcattctcacaaaattcttgacttagagacttctgttgagaaggtcgctgctgagaatgaacgtctcaagggtgagcttgctagcaaagaagatgcttacactaagcttgccaaggagcatgaagctaaagccaaggagtatggggttaaagccaaggagtgtgagagcttagctacgaagatgaaacaggataaatacctctccaccgatgtcttcttcaacttttggctaaacaacaaggaaactgactttagttatctgggtaagaacatggagggcatgttatcttattgtcgcaatcgcgaggaggccgaaataaggcagaaggcacatgcagcttgcattcaggccgattcttacctcaactttggggttgaagcatcaaataacagtccccttgatggcttgcttgatggctctttttgatgcacctttacttttaccatttttatgcacaccagtactttgtagagatttatgactatccgagcagtctttaatcccgtgactttatttttgagacattcgtgtgtttaatctttttgcttgactatatggcctttatccttatatatggctttacatgttgtcttttgtttggtgtgtgccatgctatgtgtaagcataccgtaggcatttatttatattcaaccattcaccacacataagttgctcaaaacgttgagtaatgcaccaacactttaaatttttttaaaaaaattatatctacttaagcgggggtgcgtttttgcttacttgtccatgtatgggtgtggttgccccccaaatgactaagtaggttcacctcttggtgacttatcttatgacctgggtgttacttttaagtcttggctgcccactcttacccatacacaattgaccattatgaggcttgcaatatgattcaataacaatcatacaagctacatcattatgtgaaaattacttgcaattttattgataaatgaaattggcaataatgccctattacatcgctaattagtagtatttgctttagactaaaacaaatctaaaagaaaaaactaaacactaataaaaattctaactttgcttacgggcatacccttagcatgagttgttgctgaggagcaaccattattgataatatttgtggaggtgctagccattccaatatcggggtactggtataaggttcatgttagagtcgtaacgaccgagcttgtatgtgccaggggtacaatttccgtgatctcgtatgggccttcccagtttggcctcagtactcccgttgttgggtctttagtattggctaagactctgcgtaatactaagtctcctaccttgaagcttctttccttgactttggaattgaagtatctggctactttttgttggtatgctgctaaccgtatttgtgaagcctctctacgactctctaataggtctagggactcacccatcagttggtgattactgacttggtcgtatgtcgttcgtcggtgggagggtgtgtctagcacaatcggtaccatagcataatacccataagctagggcgaagggggtatcaccagttgttgttctttccgtcatcctatacgaccacaagactttgggtaattattctggccagtttccttttgcatcttcgagtcttttcttcaaggtatccttcaaggtcttatttactacctctacttgcccatttgacagggggtgtgagaccattgagaagctcttcactatgtcatgtttaatgcaaaaatttgtgaacaagacactaccaaattgggtaccattgtcgaataccaatttcaaaggtaatctaaagctatatataatgttcttgactacaaagtcaagtaccttcttggatgttattgttgggaatattttaccaggatctagatttaataacaagtatgttgatta

SEQ ID NO: 29969 - DNA, 4558 bp, Cannabis sativa
cctatgctatttagggtgttacatgggctgtagaagatcctttgttgatagcatttgcaacaataagagaatctgtctgtaggaagtgaatgtgcaaaccgtgattcctagcccaatgtaagctgtgaatgaccccatagcttccatttccttcacagaatagcaaccccgcaaaggagtggagaaggccccaacaacatcaccaaaataatctctgatcactgctccaataccaataacagccccagcagcgtcatatggggcatccacatttaatttaaaaaaaccagcaggcggaggagaccatttaactgtagcagtgggactcgtgttcccattccgttgctccgtattgcttgaaccaggctgtgcaagggagcaagaatcggaagaagtttgctgcaaagaggaatttatgtattgttgaatataattgtcagcaaaaaagcaaataaggtaggccggttttggtttagtgccatggatctccttattacgttcagtccatatactccacatacgacacaaaattctctccaaatcagagttggaagtggcagcagcaatggaagaaaaaatttcaaaaccgttcagatggaacatatttggaatagccttgagaaaaggggatagagaccagacctgctgagctcgagtgcacagaaaaagagcatggcctaaagactctcttgagcaattacataatgaacaagcatttgattgagtaaatttcctgtgcaagagatttaacagcagtgggcaaagcatcattaatcactctccaaacaaaaattttgacttttttagggagctttagagcccatagttgcttccaccaattgctattagaagaggatgtagatgaatcgttaatcttgtcaatactctcagcaaaatgatatcccgtctttaccgaatatgtaccagtttcagagtgatgccaaatcaatctatcttctcttggattaggactaatcgaaatagaaaagatgcagtcaatgtcgatttggccaaagtgctgttggagaaggtttaaatcccattggcggtcattggttatgtagtgttgaacagtaaagagaggatcagcttgataggtatatggaaggaaagtagtgttacccggcaaccaaggatctgaagcgcatttaaccttatttccaaacccaatcttccaacgaagtcctttaacgagaaggtctcgaccatcacatatactctgccaagtaagggatggaagtgtaccctttgaagcgttaaggaaatccccatttttgaaatagcgtgcttttaaaactcgagccaaaagtgagtgaggatcctctaaaattctccaagcctgtttggcaaggagagcttgattaaagtggaggaaagatcgaaaacccataccaccctcttctttagattgacataacatgctccatttcttccaatgaattttggatttgtttgtgctagaaccccaccaaaaatttaccatcatttcttcaagttgtttgcaaaatttcttgggtaaactgaaataactcattgcatatgtgggtatagattgcaccacggctttgagtagaacttccctaccaccaattgagaaaagctttgcatgccaagagttcaagagcgtccaaattcggtctttgatattactaaaacgttcagatttccctctaccagcataagagggtaggcctaggtacttttcatgaagatcacaaagtggcatacccaacacattattaaatcttgccttcaaatccgcactagcattcggagaaaaagacataactgctttgtcagtgttaagaagctgtcctgaagcacggtgatacacatctaaaacacggctgatagcttgacaagaggaatcattagcttggcaaaataataagctatcatcagcaaacaaaagatgagtaaccgatggggcaccccgagatatggataagcctttcagattgcctaagctctcctccattcccagtaaagctgatagtctctcagaacaaatcaaaaaaagataaggcgataatggatcaccttggcataagcctctctgaggactcaccgagccattcacagccccattgatgttgaaagagagtgaagatgacgatacaccgcataataagttccacccaattcttatcaaaacccattttgagcatcacctcttgagaaaaaacccattccacccgatcaaaagccttgctcatatcaagcttgagagcagcataactttgtcttcctctttttttttttttatttttaaggcaatgaacaagttcaaaagctagaagaacgttatctgtaattagccgacccggtagaaaagcactctgattttgagaaatagcagctggcaacacccttttaaaccggttgacaatgaccttggaaacaagtttataaagaactgaacataaactaattggtcgatagtcaccaatccgttgaggctgatccactttaggaataagagtgatgagagcagagtttatatcagtaatatccacactattgtttaaaatttggagaacacaatccgaaacatgggaaccaacaacatcccaatgacgctgaaaaaacatggcagacatgccatcaatactaggagatttgtcaggagccatcgaatgaagagcttcatcaacatcagaatgagtaaaacttgccagcaacatcagattcatctcattcgtaatagtaggagtaattgctgaaagagtagtggtaagggcttcattatcaacacccactgtagtgaacaaagttgagaaataggagacggcttcagtagcaaactcatcttcaggatgaaggactctaccatcaccagagataagggatttaatcttattatttttatatatgtagcaaaatggaagaatttagtattggaatcaccacattttagccaatcaactctagctctttgatgccaatataattcttctttctccaataagtcatctaaaattttctctgcattaagaactttggccgtgtgagcaggggaattgtccatactattgtgtaaagaagcagccataaattgagcttgattaatatcctttttcatctgaccatatttaccattatgccattgttgaagagcagaagaacaagcagaaatattttgcaacaagttcggtaaagaacctgtcacagatgaccagctattgagaataacctgacgacattcagggtcagttaaccagaactgctcaaaacaaaatctgctatggttttgtcgaaccggctgctcttgatggtgagaagtaacataaaattcaatagctcgatggtctgaactaaaatagtcaaggtgcaataggtgattttctgaaaaaaattccttccatttttcattaataaatccacgatccagtcgttccttgatgagtaccccactgaaatgtctattagtccaagtaaacttgtctcccgaaaaagccagaggagtcagattgcaataatcaacagtttgcctaaaatcctccattagagtttctcttcacaaaggacccccatccttgtcatcatttgataaaagttcattaaagtcacccattattaaccaaggctaagaagcagtagaagatgcaaagctttttgaaagattccaggtaagaattctttgatgggattcaggggatccatagaaagcagtaaagtgaaaccggaaaccacgatcatacgaaacaaaaacatcaaagtgattcattgaaaatgaattcagagttacatcaatgtcatccttccataataacaataaaccccccttcaaaccattcctaggtacttctaaaccatgactaaacttaagagaggaacgaacccggtcaactgaattacaagcaagtttagattccataataaaaagtaaatgaggacgctgcttgttgacaagcagtttgagatgtctaaatgccgaagggttgcccaatcccctcgcattccaactaataatcttcatggctccatgcggggttgctgacccaaaacctccgctgaaaaaaatgaattctcctcattggaatctgactgagcattagaaatttgctgattgttgaattcattgacctccttactgctaccaatgttatttcggcatctttttaacacacttcgaaaattttcaggatcaacgtgtctcttgaaagccttactaggtgcaatcccatcaagagaggattcttcaactaaaaccgctttgcctttatccttgaaagatgtgattgtggaatcacaaaagagaccttgtggcccttgacccgaaagaggagggaggtggtctgatggtggataagtggcatagatatttgatgacatagagtggctggtgtagttaggatgaggagtattaggtgtaatgtgacaattagttggggaagtgagcatggtggaagagaggctttggaaaaagttgggaaatggtgaaggtaaaacaggaatggtctctttctgagggagcatatttttgctagaattactagtttcagcaacagtaagaggagacgggtatggtttagtggtagtcaatctggtttggtga

SEQ ID NO: 29970 - DNA, 2115 bp, Cannabis sativa
ctttcaatcgtagccttttcattcttcctggttaccggtcttgccctctttcttttgatcgtggcctcttccaccgatcctggggagaagctcgagccgtctgcgattacaatgggagaggtgatcttgccttcgataaactgggtagattgattgtgattttcatacatattgatcgcctcttctgcctttgtgtccagttcattgcatttagatggtccaggcccgatgatgatcccatccaaagcctttcgtttctttgggccattctcataatccatggaccttaagtcacttatctccatgaggggattgaataaagatggctccctcatgtacttgtccaccgttccaagcctagttaaagtttgaaagcccatttcccataaatttttagatggccaagggatgagttgggcttggctgccaagtaggcttgaatatgggtttattgtctttggatccagcttgggctgtgccaggcccactttagcttgggattcctggagggttgacttctttggtattttgggactactgttcgctgttggggggattgtttcagcttggtcttgagaagaaatggaaataaagtgaccgtttcccctgcaatcatgcatagcagacaggctattggacaacagaattgttgcatccgaagcacttccaggtacggcgttgctgtcgacaacctgtatcagagccgaaggcacgccggaggaatggtcactgtctgggttgacaacagaggcttctgggtttggcaaatttgcagtcgtttttttcaccacaaggttggcagtatcctcaaaaggacagacttcccctatccctggtaaagaaaccaccagaaaacgactcacccgttcttgctccatttccgacaggtcttcaaccacttgttccaccattcgtcttttccctggacattggtttcgttgttctctagcctcccaagactcaatggccttcatcgagttatctattttccaaagttgtttgaatttgttatccaccgtgaggcgtttttgtattatccactcttcaaaccatttaggcagcaatggagagaaaggccatcttgcatcgtcgtcgtatttcatccatgagccaaacattgggaagaatgcaccgttgacatcctttataaccgtagggggcttgaagcagaacttttgttcatgtgatatgacgctgcatttgagacagaacttggggagtttttcgtatttatattgtatccataagtccttgatagattgccttttcatatagaagcccgagaacagaggtttatcaatctcgactgtggccttgaatcgcagtgttcccattccaaacgagccccactcgaagtctatgtatcggagtagtttataaactgtcgacactttagctgcaagttcttccaagttagttttattccattaaaaaggggggatgtcgcttagtcttacccagaatggtgatttgtcgaattgaactttagacggagctagccatgatggccaaggcatgataaccaacagagcaccgcaaatgatccaagggcgtctattcagaacattccatgcatcctcattagatgcgaacgtgaaatgtaggatcccctcatcatcctccttccaactccattctttgaaagaactccaggcttttttcaaagttccagcaatagcttttcgccttagtttccctttgcaaatgagtttccccagcaaaatgttactttgaggctcttgggcttcggattctccaggatcaaggcgacatgttaagtccttcgtggtaatctgaactgtgtcttcgaagaggtggctaaggctgttgtctgccatatcaatgttcactcgtagtagcatccctgaaagaagtgtttttgtgacgatgatgtccacagcctatctgcaaagtgcactaggctctggtaaaaaaaacttccgatgaagtcacactttgtagtggtggttataataatgtatagagaaattaatatataactaattaataattattgtatgcaacctttggaacagtactgatggtatatataataagctatatatactagagtttgtcaaagatataaacaaatacaatagtagagttcttgaa

SEQ ID NO: 29971 - DNA, 918 bp, Cannabis sativa
ctagaagtcttctctattgattcaaatttgtcaaaaagtaagcccaccatagctaactagatatttcattaaacaataggagttgattgatgagttttcatgatttaatattagagcactaatatactgcatatgctgtatttcaatatacaattattactaacccaccaatatgcccattgttccattaattttcttgagttcgtatttcaactatagcaaatgacgtctcctaccttatttaaaaattgatgaccaaaattctatagattattgcccaaaaatcaagaggaatttgtgcaaggtaaacttattagagataataatatgtttgaatttggttagataggattatggtatgtttgaactttgtccgacactatcgaagtaaatgtataaaatcatcttatatgattaagatggatttagaaaaagcttattacgaggaaatttcgagacatttgaatttccctaagcactttatcaatttggtcgtggtgtgcatagaggcgcccaaattttcactcctcctacttaatagttcattacatgagttctttttagctaagaggggtcttcggagggtaatcccatatctcctttgccttttgtgctagacatggaatatcttgtaaaagatgagtcaaagagcttaattattttaataattttatcattgttgtaagaagttgaaactcacccacttatgttttacaaatggccttattttcctcaaatgagatgtgaaatttattatgcttttgttacattattttaaaatgcattctcaaacttcggggttgcaaaaaaatgcttccaagacatctatatattgttctgaattctaatatccaagagaaagatgtcaattagattttgaacgagactggctatgtgaagagtaagttgcgatttata

SEQ ID NO: 29972 - DNA, 3841 bp, Cannabis sativa
  modified_base (3533)..(3534): a, c, t, g, unknown or other
atgaccccgcagcatcaccaaaataggtggttgggaccaccttggccctcgagtaagctgaaggctcatctaaaggtccaccagctaaacctttgaatttggaagacatatctgcaagaagaaagtaacaaagttagaatacaagttacaaatattcaatgcaatacaagaatgtaaaagattgtgcaatcaacaatcaaataccaccatcctaagaagaagaatcatccaaatcttcaatggctgccttgcccttgacttttgatgtaggcaaggggcgagtaggcgtagtagagctctggccttcaggcctaactgtagagtggcatccctaacggtgcctccacgagccaagcgctaagagagggccctttctctcttctccaaaccccgagctatttgggatagaggcacatcatcatccatggctggagcatgttcaccacctcgactgacttcctcagtagctggggctccatctacacaacgtgatgggccctcagcccccataactccaaaaataggaggatacaagctgtatttctgaaagtttcctacactagccaaccttattttatttatcctcggtacggggagggacaggatgtggttcgctcaatccctcatttgtagagtaaggatagagcgagatagtaggtaggcacttgcaagaaatggtgatgtcaaacctcttggacatcccaaaagatgaagcaagtttaggcatatccaccaactttcgagagaggcgtactattggtgtcaccaaaccattggtggccaacatggctgaagtagaagtaccccgtccaattctacattggagtagacttaaaatcaaagtagtacccaatcttgtacggagtaggctgaggccagcctagctctacatagagaacaaacattgtcgagagatatgtaataactttttggggttatttatattggacacatcccaaagtaagcagctatgtatctaaaatatgagtgcaaaggcagcaccgcccctactggatgttgtgctctaacaatgccatccaatcaaaggccagtcaatgtgcttatggatcccttgagggcacctcacagtggacgcctctcagtagtgcacttgctagtatcctatcgaaagcctcgacactgataacagatggagtagagacccaccagtctccctgtgacccgacatcaagaacttgaggctctgaagagtggacaaagacatggtcataacctatcactgacagctaactaaacctattcaatggctacctatcaacatcatatgagccaaaaggactgttggagaagacagcacaagtcatgtaaattgtcctcctaataggcgcatcctcttccacctcggattcagtgtctggactctctgtgccctagtcaaccacgagcacctctacttggtgaacctctagattctatcattaacgagttgtgtgacctcttctactatgccaactctgcccatcgttgccaccctgacaacattaggattagatggtggtgcactacaacatgattacttagttcttgccatggtatatcagtataagtctagagatcactcagaaggtggcaaggggatagacttgatgctatctctcaaaagtagaattgactagacctataacacacctattgtcacctccccataccaatacttgaaatcacctgcatagaagtgacaaggggcggtgatcaaagtgacaaagcaataagatacaaacaaacttctggccaatcgtacccaagtgtacttgtaagataaattatattgtataaggctaggtatcagcgaagtaccgtctcaagtataccttcataaataaattgtgagtcctaagttgggcacttgactataatggactcactacgaaatcttatacagagttcccaaggaaaccatgtataaggtcacaattgtatgtgactacaaggccatcacaagacccttgttaaggtcaaaagagcacaaatacttggctgtctgcttggaaccttggccttcgccggccaggtcccatggcctagccaagagccagccaaggaccctatggccacgcacgggccaggaaacttttgggacaccctcttatggccagctagaccccatgatgaagacccatggtcggcgaggtcttgaacaagacccccatggctggcaaaggtgtatgcctgatctaaacttgtgttttttcaagagcttaaacgcgttcttcatgttgttcatgactcaaagagccaagattcacaacaaaggtcaaatgaaatccttttcttcaagaaatcacacattatacatcctaagactctcatgcaaatcaaagtaccaaaaagattacaatctaacattgcaattggaaaacattcaaagaaaagaaaagcttcatgcaatcatgaaaaaataaactaaaataagtaaatggctggaatagaaagcttacccactacaagaaacgtttggtcaattgaatgggaagcctggattattaaaatagcgcaaaaatcccaagagttgaagcaatggggggtgtcagcttctagagagaagaggaggttttagaagttgctttttctagagagataatgagatgtggatagtgaagagaggtttccctccattaagcgtatatagcttcagtgagactgcctttctacttgccatgcagtgtcaactaaaaagcatgcaaaagaacaatgcatcaaacttactgcaacaagtgagattagacagtgaagagcagttacttcgagggctatatatgttgcaagatttactcagttaaggctacatcagtaccaacaaagttgtaaagtccctatctgcacatttatccgcacgaagacttagggggcaaatgttatcctaatttttacccacctaacgtgggatgtctatgtggcaaatatcagagccacgtggaaatacaactcaccaacgagaaggccaagtaatctatttggtactacaactaacaaggagtctaagcggtcaagcaagatgatgaatgatgaactagccacctggccagccaaccctagctggccttatggcagcataggccagccaagttctggacatctcatggtcagctagcatgcatcctgcaatgcatgcccaaataacttttagcctggcaggatattggtgtacaacttcacacgtggatagcaagtcagacaatgaattagcccttaacaacccacataaattgagggaaaatatctattttaaggggcattttagttatttctatttcactaatttaatatgtaaataatagcttaagttacttatttctaagggatttgaagggtgtaagttctcctatataaaaagcctcactcaaaccctaaaaacctaagtcattaagtcaggaaccctagctctaagtttgagaactcacctctctctcgctcacgcccactgctatactcatacttgatattttccaactctgattcctatatgtaatctttagagagctacttcagattgttgggattttatgccctanntaaaatctatttcaatataatcttatttcttattaatagaagattaaaagtcatttatgtttaaagatatttttcatgtttatggtttaatatacaatttctattaaatccaaaacatatagtcattcacaattatagtgatgtcaacacaatagaagacaaatgtgattatatgcttcaaaagtttatgtcccatgattcatcagtgcgctagatttatagtactgatgtgatagttagcgataaagcttacttacaccttcgataagtgttatattctttccaggacattggaaaagtatgctag

SEQ ID NO: 29973 - DNA, 2206 bp, Cannabis sativa
aagactacaatcaccttaaaaatccaaacagtattttaaaaaataaattaaaaaaacagttatgaagtaattcttcaaaattaaattgattgattaatttgtacctgagatataaccctgtgcctaagaagttctgaagagggcgtagaagaatcttgaaccgaaccatgagaatggccatgagtggcatgagtatgaacatggacatgatcggcatgatgctcatgatccttctcctcatctccaacgccgccaaagtgagaattcttgtaataagaggtggcgaaagcgtcgaccatgagagtagcgatggcggacatcatggccacgaagccagtaaatggaaactcccaagctgtgcctttgagacatggcgaggtcaaatgctcgaaagcgtccggcaacacgtggatgaagccggtggacagtatgactccggctgcaaaggccttgatcatgaaaaacacgttcttgtctggactcagagctggaatcgtctttccaagaattggaagacagacccctattgctccggccaccaggattgaagctatggcggctaacttgtatttgagtgcaagggttttgttcacttcttcgccttcttcaacttcgcacgtgcactccccacgtgccagaaatgggagcattgctgctactaccaagagaggtagcaagacgtgtttgtgaaaattcttcattgtaaaattcttgtaatagaaagaaagaaaaagaaaaataaagagagagagatagagattagagaatacgagtatggagtttatatatacagagagagaagttttgatgatgatgtcattattataaatagaaaaagaaatattgatttagaagaaagtaatcatatatgaaaagagtaatacttgcagttataaatattttacaatcggtggtgtgatatttacggcgtggaaaagtgtcgacacatatgagtttgttttttggttttgttaacgagtcgacacctaagagttttaattggaaaaatatatataatgaaattttctaaatggagaatgggttgggatttcaaagacatttaaggcgattaataagggactgtgataaacctcattcgagtgtcgaaaaaatgtcgacataatattgccttaatattgaaagtcaagtgcttcacataggagtcaacgttaactaagatataattgacccttgaatgatgatattatgtcttattacttttaaattagttttatttgcaaagctggctataccttaattgtgcatcttatttctttttctaaaacctcattgagaacaaacttggaaaaatcaaaaacacaaaacatggcatgggcgattctttttttcttaactaattaagcactaaattcacattatgtttatgttactagacattctcgttatcaattctgataatagtatttttaatatttctatttctagtgaactcttacattttttatatagagaatgttaatttattcaataaaattggtatttcatcttaaaaaaaaactaattaagcactaaattaagaaaaaacatattattcctctcaatataataaaaatattgatatatattaggtttttaacataattaacttgttattcaataaataatactattttttattaaaaaaatatttatttttttaaaaacaaacataataatctaaaaaaacataattttaatttgagccgtaatatttttaattttatacaacttttcattttctaaaaaatatcacaaaaaagaaaatttacataaattaatactatacccgacagttttaaaccgagtataagggcccattaaaaaattatcacctacttctcgccacatttcccacgtgcccacctactttttttctacttcccacatacctccctatttcttctcacatatttcttcttcattttccacaccataaaacgaaaatcttaactctccaaaaccccacccacgcctccgcaccttcgccctcctctctcgtcgtcttcctccctctctcgatctccctttcttctcgtctctctcgtccatcaatctccacccagccctcctcccgtcggtctcccttccctctccgtcacatacgttgaaccaccaccacctcctgtcgatgtccctctcatctctgtctcatacgtcagaccaccaccacctcccgtccgtttccctctctcttcgagctcggtat

SEQ ID NO: 29974 - DNA, 1873 bp, Cannabis sativa
acatatttaatcataattggtatttttgtattttttgtataaatagtgtgagtcctattctttgtattttaagattagccttgcacattcttatctctctctctctctctctatatatctcaatgtaattactccacctatatcaataaaacaacacaattaattcaacttgttcttgctggttcttttagtcattgttctctcgatgattcattactggtaattagcagtttgctggttcattgctacaacattcctgctgttgctgctgttcatgttcatgtgttaattgtaactatagtatatatttatgatcactagaccagtttcgtacaacttaataagacgaaacccacaaacattaaggtactatatttggttagaagaaataaaaatataaaaataaaaataggaatggattcaaacataaaatatataaaaaaaattgataaaaaaattattaattttttttcatcttgcgtaggaatggttgttctttcaattttacataaaatatatagtcattccactaaaataataatagaaaaatcattctattagaatttaacattttaaaatgcaactaaataaaagaattgaattaaaatgatttcctttccattctattttattatctccaactaaacaccatctaagtactttaatatttataatattgcatattaaatttccatatttaatgccattaactctatatgtaattatatgaatatattacaataatataatttattttagtgatgatatatacaatgttgttccaatatcatcttcaagtcttaacatcataataaatgctagcatgatgatgtcttccaaacactatgaaaaaaaaatcatgagaaaaaggcatatattctttcaatatgttcactataagaaaattatcttatctcggtagttaaaaactcttataataggatctgatcgttgagatagcataatgactaatctcgaaggtaggaaactggcgaaacaagataccctatctcgacgattttaccttgaaccgccgagataagtgtgccatatcctctcacacgtttaggcaatctcaacacttggaaccgccgacataagtagcaatctcgatggtcacctcctaaaccacatatttattattgttagaaaaattagactcaaaataatttcattgatggttaaattagtttaggtcatttgatcattattgaatagtaatgcaattaatttaaaaattaattaaaaattatgttgtgattcaatcaccataattcaagaataagactagatctaaaactcaacaattataaccagaaactataaaaagtaattggcagaattcaatgcaccaagaacttgagagaaaacttaagagctgtttggcttcataacttaaaaacagaaaacaatttttaaaactaataggggttgtttggcaaaaatttttaaaaacagttttttaaaatttaaaaaactaaaaaacagaaaacatcaaaatgttgttttcaattttcaaaaataatttttttttgtttaacatattatattttatatttttgctcacatactcggatccttgacccggacccgaataggttcatattatagtatggtgttaaaatattagatttttttagtaagaaaaaaattaaaaataatcttaaaaaacttatgccaaacatcattaaatttttaaaatgacaaaaaattattttctattctcacttttaaaaacacaattctaaaaattgaaaactgaaaacacaactaaacaagctcttacctttgttgattatgcaatctgtacaagaaagtggtagctagagagagtgagaggaggttattaataagcacaagacaatggagtttg

SEQ ID NO: 29975 - DNA, 2227 bp, Cannabis sativa
  modified_base (490)..(490): a, c, t, g, unknown or other
acacataggctcacgcacccaagcattttcaaactgaaatttctttaaactaaccacttttctaaataaattaagattcaacaaaataggacaatggtcagaagcaaaaatttttaaattttctaaccttgcatctgaaaaagatcattccaaccatgcgacaagacaacaagtcaatctagagaagtcctcagacatgtcaagcgacaaaacaaaaataattattattattaaattggtttataaaatatagatcaaatgaataacacttatttaaaaaagaatatattttataactttataatctattaaatgtgtctatatatattttattaaatgtgtctatgaaatattttttttttaaaaaaaatattataatctatatatctaggcgtttacgtgacagtctaaaataactttttttttttttttaaaaataatatattttttggcattttagttattttttaaggagaattaccccatatantattttttttttaactttttttatttttcaaatttacggtttgggtttctaaaatagttgtagttctagttggaatttttgtacgattttctattgcaatttaggttgcagcactagttgcaatagggatttctatgtagaattccataaaaaagcaaaaaaaaaaaaagaaaaaaaaaaaagactgttttgaagtgtaaaaataaaaaacctcctttttttcatacacttactaaattctctatatatattttatttgtatgtacattgatattagtgcaattctttctctatataattaaaagttcactatttatataccttttataaatatgttacctatatttaccattatctttctactatacaaaccatgatatgtaaaatggaatatgttaatacaatatgtcaatatgtatactttcagggtcggccctgaaatttagtgggccatagaaaaaaatttattttgaacccttatttataagaaaatatggtattttttaaaatcagtaaaaaaaaattgtataatttcacaagggaaatattttttttgagcccctgatctaggtgggtcctaggcacaggcctagcccgcctatgcctagggccgagcctgtatactttcacattgttcttaatttttgtgcatggtgtaattattttgttttattatttttgcaacaaattattaagttatctattattatatatattttttaaaaaatcataagttaatctcttacttttaatattctatgatattttatcataagtttctgagagattttttctccatttagtgacactctctctccatgcatctccatctaaccatcataaccatacatatattttttatgtacatattttttttcttcatcttattctttttttttctttcatgtcaaattttcctttttgatttcaaaaattctattcgggaccatcaaattataaccactcattcatactttctcttcatctctattttattattataattatactctatgtatatatggaaaatttattgagaatatagtgataacataacgactttgaatatagtgtcatctataagtgagagacggtgatgacaacaattttaaaatgatataatatgaatgtttttttttttttttatataaatttatcaattgtactttaaaatgatttaaggacaacgactttaaaatcatatatgataaattttctagatttatcaattgttacatttttattttaaattccaattcagtttattcaaacgatataatattttgaaaaaataaccttataataatatttatgtataataaactaattaaataagaattcttttaagtttaaaataatttgtacaatattaatttatttttcttatattttattaatatatatatttatataaaatatcaaaatttaaagttttatataattttatgacataattatcattgaacaaaatacaatcgcacgcgacgcgcaatttattttctagtttaaatttaaactgattacacatatttctttcatattttatcctatattaaatgtctatatttttttagtattacaattcaaatttaaattcattgctggtgaccgaggttttcggcaaccaatataataataatatttaggaaaattttaaggagttaatgcaagagatttttacgtggttgaggcattaatgagccttagtccacgagtctgtgtatttatgagagtatt

SEQ ID NO: 29976 - DNA, 4585 bp, Cannabis sativa
taaaaattattaaaaaataaatatcaaaactatgctcggtcaaatctatattacttaaaaaaatacattaattactcttaaatagtcccattttatgggacacaagcctcaagctagtgctatcttggaatggtgtagcaaattccttcatgaacttcaagagagtgttgtgccgaagcaaactggacagcagagagaggctacaagatggactccacctgtgcggggctcttttaaaataaatattgatgcaggagtcaaggttggggaaggaatagcaggtcttagttcagtcattcgggatcatgaaggtcgtctttatgctgctactaacagctttgtgcagaaggaaatcacgcctttacaaggcgaacttcaagcgatgttgactggtcttcaagctagtttacagcacaacctgtcctcttttacagttgaatccgattgcctccaagcagtaaacttagtgcagaatgaaagggtggcagggatttcttttgtatttagagaagcaaaccaggttgcgtatgttttagccaatgatgctttgattaacaaagctagtgtcatgtgggttgggattgttccccttgtgcgagtcaagctattcggcgagattcgctttattcattgtaatgtccttttgattaaatgaattctgtttttttaaaaaaaaaaaatagtcccattttattattgtctgtttaaatagaatacatgtggcaagtattactaaaagtaaattacatttaattttgggatggttaaactcaagaaaattacactttacactcactttttattttttattttaattttaatttttattttattaatctttaatttatatccaattttatcgattatattctaattacgtgtattagatagaaactttaatttgataagttatgtgaagttatatttaatactttgattataaaagaatattgtgtaataaaaaaaaaagatagttttcaacatcttaaacttcactcaaatgtttgtaagaaaattaagtaatataaaaagaataacattcaagttttatccttaaaaaataatattattaaatgtgaaatgttttgaggccaccctttatagttaccaaaaccgattacaatattattaaatgacatcagcattttctaccgtatctcaattataaaaaaacaatattatatgtaactatactcacattaaaattatatatattaattttttaacaggtcatgccgatgcccaggtttacatccattctaaattgaagaatgtgtattattgtcataactttcacgagtaaaatgaacaaaaaacaaaaaataaaagaaaatgtttactaaagatgctattagagcatttgtaactaacaccacaccacttgtataatactttataattggttaataatttctcatactatttattaaattaaaaatttataaaatattaaaatacaccaatattagtatactacatcttttagtacttaacactttaaggttattcttcccaaaaagaggatttagaaaacatgtggcacatcttccaatctataacgagtaacgaacaccaccaaaatttctcaggaaaaaaaagggtttttttcgtagaagctactagattctagaggatgctcattatagaatggctatagttttcacttaagcagaaaaaaatttggacaacatccatttcacgaactaaaaaaggcttatttcctaaacgtgtataatcacaaaagagaagagaatggcaacaaaattatgagaattaccaaaaggcatgcaattgatcgtgcaaacacttgattcattccctgctctaatcagatctaatttgaatatacccataaacaaacagagaacacactattagacaatgaaacttgcttacacacaattcttcaatgaatctcctactccctggaaaaagaagtaggatagaacgaagtccgcaatgaagataccaactagggagatgacaactgatgaggttgtggactccccgacacccttggcacctcccatggtggtaaccccccaagcacagctcacaatagaaataatagcaccaaacacctgtgacttaatcattgcactaataatgtcccatggcttaagggctcttcgagctgaatccaagataatgttgatactgacaccataaacagcatcagcaagaaaaccgcttgatgccatacctactatgaagcacattaatgtcaaaaatggcaaagcaacagaggcagcaatcacccttggggtcacaaggtaatcaacagggttagtcccaagaactctcaacgtgtcagtttgctcggatacttgcattgttcccaactctgcagcaaaagcacttccaatacgtcctgcgaccactatcgacgtaaccacaggactcaactcccttgcgaatgccaaagctagtactccaccaacagatctgcttaatcccaacctggtaaattccctaacaaattggatagtgaaggccattccaacaaaagctgaagttaggagacagaccccaagtgatttaggcccaactctctctaactgttgaagagtattccgccaatggatctttcctgttaaaatccttactagtacctgccctgcaataacaagaactgataatcccctccacaaaaaccggggaggggaccaatggtgaagcaaggattccacttcagagttgggggaatgattagtgttcgagtcttctagcttggagacagatgggtgcccatcatttgtgttcggaacagaaaacagtctagtattctgcattaaaaacttacaatcctgaggtcttcgaagaaaagcaatacttttaacccgttgaggtgaacatgggatttgcattttaaaccacccatccggttttatgcttctttttctgcattattgacaaggcatttaacaaaagatgaccagagaaactcaccgtgtacaaaggtaaatgacaaaatagacgataaaaaatacctgttaggacaacaaaagtatagatgactggaaattatttgcatagctgattgtgttaaatatccgaagtctatgaaatgagttccttctaaaatacagcagcaacgccaaaccaaagctgactcacctaatttaactggacaaaaacaaaacatgaattttatgagaattgatccgagacaccaaatgtttcaaatcagtccatgaccataaaaggaataaaagtaaagaaagtgtccccttctccatctattcatgtgtttactgtaccatttaagaaacaaaattataatagtactcttcacatgactagtagattagtttaataaaaaaaaaaatagtcctcattcctctccaaacctttttccttaatattattctcttcattatacattagaaaacattgccttaaatttgaaataacatactgaaaagaaatctgatttatctccaattttttttaatcccatttggatttccgtaagcatagctacaatcaatcaagaaaatcgcagagtaatggtaagtttttattttgaaaatgacaaaagttcagtctcagcctcttttgatgatacatatatgttaatccagtttaagggaggagaaaaaaataacacaaactgaattcttctttgaaggttatcaaatctctatccccaagtttttctcaaaataaatggaggcaatgaagaaaaggaaaatgaagtatctctatttggttgagtaattttgacaaacaattggtgagtgttggcaaaagaaaaaatcagtacatgtaagtataagactaagaggaggaaatcaaaagtaaatcgatcaatggaagaaggagattacgttaccaggtcattcggaggttcatcacccgattcagtggttcgtctttcagcttctctttttcgctgtcaaaccaatattagtattagttttcagaaaggtgaaatatgatcgagagagtggcccaagggagactaacaactacggaatttaagataataattcaaaccactcccaaattgcagtcaatctaataaacttctatctctatttgacactaaaatttcaaaagaaaactaggaaaaacaatccccaacctgtgaaaaaaaaatacagaccatgtatgtagctctctctttctctacagataatgttaatctgtccaccaaatcggcatttaaactccacccgttagcgtcgaggtttggccatagaagcaagcttcgaactctgtagatggcagtaagcgtcgtcaaactccgagttgtggtagctcagatctggcgataaaagcaagcttcaagctccgacgatggcagtaagcatcgtcaaatactccggctgtggtacgtagcgtcgaccccaattgaggaagatttaaaattggttttccagaaaaggatggtggtgcagatagaccagagaggatctccaatgaaatgaagtgacataattgggataatgatatattttgataattttgtaattaggatttttgttccgacatataccaaattatattccttgaattttcaatatcgttaaaaatgtcccctgaatttttaatatcgttagaaaaaaaaagtccttaaatc

SEQ ID NO: 29977 - DNA, 4140 bp, Cannabis sativa
atcttgctctaaaaggtcaacaccccaatgtttgtcactagcgtctatttgaagaacacgttttctgttagagggaatctataaaggtggtagattctgcatgatttccttcaaatttctgactacaatggtttggtcatgtgaccattcttgtctattcttttttagaatatttctgagtggccttgtcagtacaaacagttggggaacaaagtctcgcaaataattgatgatgtccaagaattgttgcacctagaatttcgtaagattttcatatgggaatttgagtatttcatgggctatatgtggttgggcttcgtattgtcctttggataacttcatcttaagaaattctatttgcatctgtccaataatcattttcttttcagacaacatgataccatgggctttagtgatagaagcaaattgggccgctaataattgatgggcttttgcatcaggttaaaagagaaaaatatcgtcaataaagatgagagccttttccaatattggaccatatatcttggtcatagccttttggaataatgaaggggcatttttgagcccaaaaggtaggacggtccattagaaatgatgatttgaaatgcaataggttgttttcggttgatcatctagtttgatgtctaaatgccaaaatcccgcttttaggtcaaattttgaaaaaatatgggctttaaacggcaaacaataaattcttttttggtattaggaatttatcacttgctaagaactcacttaggggcttgtagtttatgaccaacctttgctttcctcgagcttgctctaatcgattcttgacataaaatacatgacatgcccacagagaggaagctgactctttgcattcattggacgccatttgttgatgttctggattcatgcctaggtgactagcctttgtagggtttatatcttcattaagcttataaggaaggcttatgaagaactcttgatttttccataaaggatggtcacatttcttcaggaactctactgattattggcacatgagactttgatgtgctctttcttgatttgatgaaatggattatggggcattaagaaatagtttggtatggcttcccatggagcaaaattttgtttgtaaccaagtccattataatgaatacgcaaacccttcttctttgtttaaagatcaaatccaacaattaagtcttttttgagtaattttgatccaatgactctgtgagtaacagaacaccctgagaagaacaacaaccaaatcagtttgttgatgagtctgtgcaagaaatacctccatttgcagcatgaaagtattttttttctttcttccaatattctttaggaagaatatcagggttcattattgtgtatgacgctcccgtgtcgaaaaatcctgccacttttattggcttggcatattttgttggaagaaattacacagtgatgacaggggatggttgcatcatgtgaataatggatatttgataacattctggagtgtccgaatcactccattgttcaaatgtactaagagattttgagttgaattcatcatatgtggagaagattgactctatgtcattttccttgagagacatcccagtcgtttgttgtatatgtgagataagcttgactgtttttcctttagggcactgttttgcataatgtccctttttgccacacacaacatatatcatatttttaacgaaagtcgcgcttccttttcaaaaattttattttacgtcctttgtgctttgagaacttgaacgttttgaacttgtttttgttctttgggtttttacaagaatacgaagatttagaagggcatttgatgagtaaatctcgtttcctaaaaactttacctaattttttggattgcgtcatacatttcttggagaaacttcttatgggatcacattttttcaagggcctttaagacttgtaggaaattttctccaattgtagcatctgttaggctttttctcaatctagagagtagcctgaaagtttcttcgccaagtggctctggaatagaggaaaggaaggcttgctttagatttggatcatcaatgccacctatttggtagaatggtttagtcatttttatgttatgcttttccaagtctcttttgtccattgaacaacacttgagcttgaaaaactctgctctaagtttttaagttacttgtgcatcttggcgacaaaactcgacatagacatggtgtagggcatttgtgacagatgggagttgcaagaaagtcatttgtctttattcacctaagcttttccaccaatcttgcaaaattctggtgaatcttgagacaaaattcaagaggatcgtccctgtctgtgcttgtggtttttgcgtttccaagctaagccaagcttgaattcttagaatctttctcgccatttagatgggggaatgtcatcaagagtaaaagtttgaaacttagaatatttactcttttaatgatgattggattccggttttgttgtagctgattattcttcttcactttcatcatcacttttaaaaataggctcggtttgagagtatgcttcttctgcaaattgagccataaaatgtgggaattacaaaaagtaacacctttggttagtaactaccgttttatcataattcttcttgaaaaaaatgaaaaacttgtaggaattacaaaagttcacataatacaaatacttaaaccttgaagaagcttatctataccactaacctcgtgaaggtttggttaacgttgtcaacactgtttaatttgctgacacaataatggtccccaatccaattatcttaattcctttaaaatagttgcatttatcatcacagtagaatcggtgtttgtgaattgtttcatttgaatatgagaaaatctagaaaactcactctccttactcataccctaacttttctttactaattcatttattaaaccaagagagtcacaaaaactcaaaatccaaccagttatttattcatgatgtctttgttgttttccgtatgttaacttatttcttttcgaccatattgcctgtgaaaaaataatcactctcacaaaaaaatctttatcattaatttcagaggcatagagtattatttgctcaaaagattaatcttctttagccacatggaagaaaaggtaacttaatgaagtctaaattccttgagcgcaaggacaccaaaaaattgcatgtaaattttaatcacccatataatttcagataggacatttattatggataacaaccttacgacgaaacgaacaactcagagtggctaaaatctcatggaaaccttgccacggaaaatatagaatttttgcaaaatttttaaccccaaagtttcctccaccatattgagaatacattactagatgattatggtaagcccttattcactaatcaatgccaaattataacaacttttaactgaatagttaccatactctgtgtagtgccaaaactaattattctcatgctcaaaaggacttaacgggatcgagaagataagctctgcatcttgtgaattgaaattactattaaccttactaacatcctaacattctgatggatcacaatgagttctgaaactgtgattacattaaaagtgggtcttgaactaggaagtaaagatggggatcatggtaaccaatgatcattaaataccctcataaaaactctattcccaatacatcaccttaaccattttagtaatctcccccataaaatccccctccatgtcatagatgaataataaccctcacttgcctccgaaatggaagagtctctaaaataccttgccttacccccttgagccaataaagaggaaggtttaattaaaattctccatgcttgttttgccaaaagagcatgattatattaattgaaccttcaaaaacattactcatcatcagtcttaggttgccacatcttatcccaagctctccaatggagactccgacctgtattcactaatccccacaaatattgagctattaaacttttcaatctcttcatttagatcttctagaattcaaaaacatgacattaaatatgttgtcattgcttggactactgcctttattgaaaactctttacccccttgtgagaaattttttg

SEQ ID NO: 29978 - DNA, 5095 bp, Cannabis sativa
aaatatgacccgaaacttagactaattttagcctaacaaccagaatagaagaaagatgacattttagttcctgcttgggtgtttgctttgacctaggcagaggctgatgttggtccttctatcgtgacaagtcaaccttttatttatgttaccttgttgattgttttaaattgattctggtgcaatgtattattcataggtgtcgagtatagcgattggaaatctgcataaacttggagatgctttaccaagaggttttggtaccttactgcctactggagaattgttatctccagtaggtgggtaggtcccttccagtgtttgtggagggaagggaattgtcggtggattcgattgaactgaacttagaggattttgatgttatactaggaatggactggcttgcaaagtataatgtaaccatcgactgtaaaaggaagattgtaacttttgaaccagagggtgaggacacatttgtgtttgtgggcaaggttcaaggatcttagattccattaatctcggtgctcaaggcaagagatattttatgtgatcaatgtatcagtttcttaaccagtgtagtggatgctacaaaggaaacaccaacaggatcgaaacatgttccaattgtacgagaatttttggatgtctttctagaggagttaccagggttaccaccaaagcgagaaattgatttagaattgatttgataccgggggcagaggctgtatctacagctctgtatagaatggcacctaaagagttgaaagagttgaaggttcagttataaggattgttggacttgaaatttaccagaccaagtacctcgctttggggtgcaccagtttttttttgtgaagaagaaggacagaaccttatagatgtgtatttactactgggagttaaataaattgacggtaaagaccaagtatcctttactaaggatagatgatctatttgatcaataacagggaaagaccatcttctttaagatcgatcttcgatctggttatcaccagttgaagattcgtgaggaggatattcccaagacagcttttcgtacccgatatggacactatgaatttcttgtgatgtcctttggattaataaatgctctggcggcattcatggatttaataaaccgagtgttcaaggattttttttaagatgattttgtaattattttcattgatgatattctgatcttctcaaattcagaggagacacatgagaaacatcttcggatggtgttgcaatgtctcttggagcataagctttatgctaaatacaagaaatgtgagttatggctgccccaagtaagtttcttagggcatatggtgaacaaagatggtgttttggtggatcctgagattgaagcggttcgggattggcctcgacccaagtttgcaaccgaggttagaagtttcctaagattagtaggatactatagaagatttgttgaaggatttgctaagatttctacgcccttaacggaattaactcgaaagaattaaaagttcatttaaactgacaagtgcgagagtagcttccaggaattgaagcagagtccaggaaagttattgcctaagagcctaggcaattgaaggattatgaacagcggtatcctacatatgatatggaattggcagcgacaatgattggaactggttaaagattatgactaagagatcctttactatccgtgtaaagcaaatgtcgtagcagatgttttaagttggaagggtccaaggcaagtttatgaattgaagaagatctcaccaaagttggctgaggatatgaccagagcagggattgagttcatagatagaaaacaagccaatattacgatataatctgatttgttagaaggaatcaagatagcccaacagagtgatccaaaattacaagactataaagaaaagcttgaagtcaaggcagcaaagagcttcttaatttcattagatgaattagtacaatttagagacagggtttgtgtaccacctgatgatagtattagacagaaagttctagatgattttcataccatgccatattcactacatctggggacaactaagatgtattacgatgtaaaagccctgtattggtggccagggatgaagggtgatattgtggagtatgtgtcaaaatgctagagaccagcaaggttacttcaacctctaaagattcctgagtggaaatgggaagagataacggtgaactttgtggttggattactaagaacagtaggactttatgattccatctgggtaaatgtggattgatatacaaagttagctcactttttgctagtgcggactacgtacacggtagatcggtacgctgatctatatgtcaaggagatagttatgtttcatggtgttctaaagtcaatcgtttcagatcaagatctaaagtttacatccaagttctaggagagtttgcaatgagcaatgggtaccaaataaaagttcagttcagcttttcatcctcagactaatggtcaatgtgagaggattattcaaatacttgaggatatgctacggacatgtgtattagactttgaaggttcttggaacaagtaccttcctttgattgagttttcatacaacaatagttgtcagagtactattagtatggcaccgtatgaaatgctttatagaagaaaatgttgttcacccattcattaggatgaagctggtgaatggaggtatctaggacctgatgtagtccaaagaaagagtgaggccattgagaaaattcgagcttgtatgcttgcatcacaaagtagacgaaagagctacgctgattcaaagcgtagagataatgaattccatgttggggattttgtgttcctttgggtgtccacaatgagaggaatctagagatttggaaagaagggaaagtttattcccagatttatcggtccatttgaggttttggaaagggttggtcaggtagcctatcggatagtcttacctcctgctgtatctggagtttataatgggttctacatctcgatgctttggtagtttgtgtctgttacgactcatattttgagctatgaggatattgaacttcaaacagatctgtcatacgaagaacaacctgtttagatcctggatagaaaggagaaggtgttttagaagaagactattctgctagttaaaatgttgtggaggaacaacaagattgaaaggcgacttgggggttaaagtcacagatgtgagagctatatctcgagatgtttagataaaattttgaggacacaatttctataaggaagggatagttgtaatatcctggaaaactatactaagatttaaatggacatattttattaaatatgtaattatatggatattggagtaggattataatcttacttaaactaattacgagttaattagtaaaatttgagtacataaataaagcgtaatttattaattatggaaattttatcgaattaagggagtattgtagataccattttcaaaataaaatattttcgggttcggcggcagtggaaacccgatagagtggtcagaaatatcacaataataaaagattaattgaattggaattaaaccgaactagtttagaattctaagttgtcagtttggcagattagttggaaattaccaaattatccctagtccttatttttatgtaagtgttttattagaggggcaatttagtcttttaataagttagaatgttgacttttatggactttgaattatggctgaatattatgttaagtgatataataaaggaattcttttttttttggaaattaaaaggataagacttaaactaagaaagaaaccaattaatctctctctcctcttttcggccctagaagaaaaccaaggaggtcaagctgttcatctcaaatttcagtccagattttgctacaaatcaatactaaatattgtccaaaaccttgaggtaagtttcttttctagtttatggtgattttacaaggtttaaattgagttttgggtgagaaattttgtgattttggggctttgtagttggtttaagcttagagcttgttctaagtttaatttaaggattgtttaggttctaatttgttaaattttatggctgtttggttgggaattagaaattttagtttaaaaacccaattttttggttctaacatggtgaattggatattgtcatgaatttttttagagttgtttgattgtatacattgtttttatgttattgaactgttctggagagtttgaataggtatcatggagatttggttgggttttgatgtaaaaacccgagtttctcttttctgctacagggaaaccaattaaccagtcggttttgccagcaatggaaactctgggttttagcctcaaatccagttttactaggggtgtttttcaaagtttagattggggtattttagtggtgtttgagctgttataaaacagtgggagttagttatgtccggttacagaaattagggtttgtttccaaagtttttgactaagttatttatcaagctttgttgtcgtgacataagacccgtgatcgtcaagtgtagttccatttaagtagtcagcatgcacgcctgcttactagtagattgaggtaagaaagctaattgcactactaagcatgttaagtgtggaacgattattatcgtttgtgactcgactataatcgaggtagcaattactattgtgtgtggctcgattatgatcgagataaagatacggtcataaccgttattgaaaatggataaagatacgatcattaccatttattgtgaatgagtaattactcgcttgaaactgcaaataggtttcttacttatcgattgatgtatcgggcatcgatagtgacatatgtagctcgtggatgacgagtggtaaggatgctttatgaggcattaagagcagtttgtcttattaggcagatagttttcatgtaacgcttgattatgtgttgtataagcgtttatttgtgtattatggaattaagtgccatgtattgtattgctatctcatgttattcactgtttgtgattacttgctttcttgctaagtcattgtgactcatgggtgcttcgtgg

SEQ ID NO: 29979 - DNA, 2113 bp, Cannabis sativa
  modified_base (761)..(764): a, c, t, g, unknown or other
gacctgggacccgaaactcggagccacactgggacaaggacctgaacttggagctgaacccaaattgggacttggactcagaccgggactcgagacccgaacccgaacccgaaccgaaacatgaacttggatccagaccaggacctaagatctaaacataaatgggggacccagacccgagaattgggccccaaaactgggacaagaactttggcctcggaactgttatcgggattcgggtcccgaccccagacccaaacttggacttacaacccaccacgagacctgggatctggaactcgattcttggaccagacccgtagttggtgtctagatcaggacttagactagaacgcgaacccaaactcaaactcaaaccaggacccggatacatacccaaagccagacccacactcgggaaccaaaaccgaaacatgaaatggaactagacctggatcttggaacgggaccgggacctggacccgcacctgtaccagaacaggaccaaaccacggaccctaacggagaccgaaactcagacccgaacctcacctcggacccaaatccagaccagattccaaactaggacccaaacataacaagaataagtaccccgtgacttgaaactagaaccgaaacgagaagcggattgggaccccggaccaggacctcgaccctgacccaaaactgtaaccagaccagggctccccgactcagacacaaacccaccccaggattgggtcccaaacttgaatccaaannnnaatcgtgactcaggacccgaacccacacctaaactcagacccgaacatggaataggactcgggacctagaataggaatcgagacctagaactgcactccagtgtcggtcttcgacctagaccgagacccagaccgggacctgggacatgaaccgagactagactaggacacgtgattgggatccaaatcttgttctgggatatgagaactggggcttggaaaagacccatagtccgtgtcttgatttgggagtcggacaaggacccaaagctggaccaggacctggatccagaccaagacatgggactcgaaactgaaactatagctagaacgtgaccaggaccctggaataggaccgagaccgtgaccaggacctagacctggaccggtacccagaactagaccataaccaatcccaaaaactcgagctcagaccaagtctcgaacttgttcccgtacccagaaaaggaatgagacacgaactcgaaccctaacccaaatccagaactcgatcttgggcccagaccaagcccttgatcgagactgggatttagacctagacttggacatgaacccaaacccgaactgaatactgacccagacccagactgggatcgaaacacgggacgatgactcagacccagatgcagacccagacctaaacctggtacccgaactaagacctgaacccagcgcgggattcaaaaaagccatacccatcacacccaaacctagacttggacccagaccagaactcaaacccagatcaggatcagaacctagtactcagactcggaactgaactcgcactctgatcgggatcgaaacatgggactcagacccgcatctagacccagacccaggaccctaacccaaactcaaagcctgatctcgacctagatcgaaatccgagcttgaaccaaaactcggaccaagacatgaacaccgacccgaactcgaacccaaactcgaactctgaatcacaactggacctggaaccaaacttggactaggactaggacaaggacctaaactcgaacccgagcctagataaaaaccaagactgagacctagaccgaacaaagaataggactgaaactcgaacctagattgggacccaaacctaaacaagaaccaggacctgaacccgaaaacgggatagggacctaggcaacagaactaggactgggacctagtacccgaccccaaactcggacttgaatctaggacctagctcgtcacatggcacccaaaatggaaacagaccaggacccgagatcaagatccggatctggacccaacgcttggatcgaaccagtagtcggtgtctggatttgggacttagacca

SEQ ID NO: 29980 - DNA, 4191 bp, Cannabis sativa
ttactttaagattgtaagtattttgagtttttagtataattttttttattaatttagtgttttgttcgctgaattttgatatgtattattgttgaatttaaatttttttatttaattttactaattcggtgataattcatgtattaaattatgttttctgaattttaatatctactaaattatatctctcgaactttgacatgttctaaattatgtaccgtaaactaacatgatttttcttgctaaaattagattaaagtacttagatctaacaaacacaataattttgaaaaattttaacggtcttcaaagtttaaaaatatgacttcgtaaatattaaaattcacgattaaaaatcttaattatataattatgattctaaataactagaaactagaaagtactgaataaaaaaaatactaaaaatatttctcaaatgtccaactatataaaaaattaccttaatcatttaatagtttcctattattatttatttttttttttctctattgatttgcacatttctagggacccacccaactctgtaaactcaacaatatcagagtttgtatagcaagacaaagcacattggttatttgggttgcgccataacttccctatcaaggcctctctctctcttttctcaaagcattattctcacttctttagagtaagccaaaaaacgctctctttttctttttcttcttctgcaaaaatatttgtttttctctacctgggtagttatgttaagacccattttgttgagttaagagagagatttatttatgggtgcttgtgcatcatcaacccatagaagctcagacactgccatgaagcttagactgtcgtttggatccaaaaacgacaagcttggaatcccaccttcaccggtcaaagaaaaaccagctggtgggaactgtaggatcaaagatgttgccttgaaaccttggtccccttctccttcttccaaaacttttggggattatggtatatacaactccaactttacaaagtttcattctttttcatttttttttttactgttaaaagattttggattttatgtcttctctgccttttcttgagttggtcttaaaagatcaagtttttatttttttttctcaactcataaaataaatcacatacatatacttggttactacaacaatgaagtttttttttcttcttttaatttaatagtttatatttctgtcaagtgactgtattccagagtttgtgattggggcatgatcaagcatgtttcagaatttgttttaatattaatattttttctgggttgactaagtattttaatctgtatgtactaattatatttttgttttaacaaattttatgttttatggggtatgctagtgctctcaagggactttttttcaagtaaatcttaatgattttctacctcctttgctttgatatattttgtaacaatagagtttttgtgttagactcgttttacattataatatagtttagctctcttaatttggaatgattgagatttgttgaaatgctttaagaattctttgagtataatttaattagtgattgtatattttctgcaaatgggctcagaatatatgtatttatatttaaaaaaaaactatctttattgactattctttctttataaaatatgtccaaatgtgatataatcactatgcaagagagtaagtggttctggtttgtccactaaatataataacagttagattatatgcacatgatggtgagtggagaccaacttggaaaatacccttttaacctcatgtctgataatgaatgttttatatcctagattttaacaggactttcttaggaatggcaagataggtaaagacaactttcttagcctttccatgaagacatagatattttggtactactactggtagataacatcacacctagattattatggaggtctagtattgaatgttggtccatgcctttaatttaggaaaggtgtattgcaagtgggggccattagttttgcactgtgttttggcaaagcatcttgctgtagatgatggctttgtgattgttcaggatcatggtcaagattaagtggtagatgggacccttttggctatgtttaagtagggtccagttcacagatagtgtagtacactatgttttaattgtttatatgaatctttcctaattagtaatgaactgaacttttcactgactggttctgtctttattcatttttaaatagaagtaaatggcagcataagtcctaatcacgtgtgttttacttaattacttttgatttgaataatgttaattgtcatgttttaagatattgctttgtaccctttttgcttcataatcacttgtgttcatattggaaatgaaatcttatgctttgtgttcttctttacaggtagtaaagatgaagccttttttgattctcagccttggttagaatctgattgtgaagatgatttttatagtgtcaatggtggtaagtaagaatatattcacattcttgaagagccattatcttgtctttcattccttatgtctttccacactatgcctttcttgtaatagttccaaacactaaaaataagtactttaaaagaataaggtgaaacttggcatggtggcaaataaaggagaattaatattcactcactttgcatctgatttttctttttgtaactttaagttaccaactttgaatgtgtcattattgtagatttcaccccatctcggggcaacacaccggtccatagagggttcacaccaggctcgtcgcgagttaacaacaagaccccatttgaggacagaatgcctggctcggtaacaccagcgccaccaccaccaacagagaagaaaaagagattacttgaactttttcaagagagcatgaaggagcgagaggaagaggcgagcaacacggcaaatgagacccctgtagtgaagccaaccgcgggtcatgacacccctgcagcatcaaaatctggtcacgagacgccttttgtctccggggctaattctgtgtgtagtagcgaatggactccaaacggggaaggccttataataaggcatgaggagaaaccaatgaggtctttacaatgctgccttcctagcttgatgtcttgccgtagctttagtgaaaggaagaagaaaatgagccctgccattgctgtaaatgataggccttgatcataatattaatgatagtaataataataatcaatattattattattgttattattagtacaatgtagattgaaggaagaagccagtgtgggtggtgggtgttaattatggttcccaaaagatttttataaagttttggtgtggatactccaaactcttcacatatgccaaaaagaaagaaaaaaaatcaatgtaaagttttaaaaagctctctctctatatatattctagtcatgaataaaattttgtgaatttcttttttggcgttcataatataatgaactgataacatatggctaataatgtgtaactcagtaaccatctttgatgataggagctattagtgctaactttaatttcttttgagtggagtgataattacaattttttacgcaatttccacactttaaattatatgttcaaatatttttttctcaatttttattttcatttagtatttattatagttataatatcattttttataaattttttaaaaatactgatttgtttttgataactctatttaacacatgtgttcaaaaaatatttcaaacgtattttcaatactgtaaattatttatattgtaagcataataaatactgctatgaaaaaaatttaaagaaaatattcagacatagagattaatagaagattgacggtagaacttatgtttttttttaaaaccaaatatactgggggagtattttctttctgatttttttaaatattttttttttttgtgtatagaattttttgaatattttaaagtgcggaaatatatttgattttttttttcaaaaggtaactggttttttctccatccataatccattggtaactgttaattaatgctttggaaatggaaagatcaataaaataaaaataaaggaaataaatttgagccaaaataaaaatttatatttttttgttataataaatgaaatggaatccattacagctagagtagattggagtaggataatatcccccaa

SEQ ID NO: 29981 - DNA, 1739 bp, Cannabis sativa
  modified_base (102)..(103): a, c, t, g, unknown or other
aaaattcttataaggggggatagttgtaacatcctggaaatttatattgtatttaattggacatatcttattaaatatgtaattattttggtaatgaagtannattatgatcttacttagggtaactagtgaggatttattaaataattatataaagcgtaatttattaattacggagattgtattgtgatatatgggtatcgaggataccatatttgaaataaaaatatttttttcaggctcaatgactatggaaacttggcaatgtgattaggaatgtcaggacaattaaggatggattattttagaaatattctgaactagtctagaattttagaataccagtttggtggattagttattaaaatactaaaataccctaaaagttattttgaagttaggatggaggaaaggggtagaatggtcaataagtaataatttgatttctttttgttttgctgaactaagtttaataaatataataataataatagttatataagggatttatgtagtaggttaatattaagaaaagttaacttaatcttagaaaaaaacatctctctctttttcttgtttcttggtcgaacctaaggaagaaaagcaaggatttcctttttcaaattcagcatattttggttggattatttggatgtagggatcaattattcattaaggtgagtgtttagcataatctcgtacttgttcttgaagctttagattaataaagttaaaatttatttgagtattaggcctgtgatgttagtttagggttaggatgtgtttttgagttaatttataagtttgttgagcttatggtagttagatgtaaggattggttggattgaatatgttgagtgaagtattttgagtttaaacttttcatttgagaaagtaatttagagcaatagatgagtggtgatgaactaatgatttggctatgtgatttttgtgattttgaactattctggaggtgttttacaggtatggttggttctggttcgagctgggaagaaaacccagaatttttctagtctggcagatccattctaccggttggttctggtgcaccagaatcgttcgatcggttgccctataggggaaaaatctcgggttttcttcgagttccgttttggctcggggtggaatttggtacctgttttatgtcatttgggtattatataacctattttggagtttttaggggttaggttcttattcggttttgaattagggttttattttggaattttgatttaaagcatttattgagttttggttgtcgtgacaaggaccgggatcgcctagcttgttttccactcaggtcggcccgcatgcttgagttttgaattgaggtaagaaaagtggtaagcaccgtatgtggctaaattttaatggttaaatggttatggccttgattattatcaagactctgattaagtgttgttgagcctcgattatgacttagggttggaaacggttattaccgttaagggtaattactcttgaaactgcggataggtttattacttcttgtttgcttcatcaagcaacgatagtgacatattcagctcgtgtttaacgagtggtaaaaaggggtactttataaagtaccagaattgtgtttatgatattgtgtaaaagtgtatgcacgttaatttgagattgaattgctaaatgttactggttattgttttattcacttttcttcctgagtctctgtgactcacgggtacttt

SEQ ID NO: 29982 - DNA, 1715 bp, Cannabis sativa
cagattggatcatgtcttggaccaatttcttgagcctaaaattcttgatgaaagtctggaaggggataggtggatttccccgatttcgtctctctcaaaggatagtttttgagaggatgcagactgctgggctagtaggggttatctaatgtaagatgccttccccagatcaactagctcataggttggctctcaactggatggcgtggtcaaaatgctacattgatcagggagctatacctcctcttcattcatacttttttgatattgtcgcttatttctagatgtgtccgacataatcaccctggaaggtattacgtacattttagcgatgtttgttccttataaagagctatgttggcctcaacctactccttatgatgttgaagactatttggatttggagtccactttgcagcaacatcggtctgggtacttctattttagccaggttcgccatcagtggttagatgattccaacacctcatctatgcgaagggttgatgagcacgccaacaagtactttattccttgggaagttaatgggatccatcattgacacttctagaagataccatttttcaagcgttccattcccacattacaaataagggacagggcaaattgcattctttctttgtcagccgagcagaggaacatcacccaattgaaaagtgtagaccattttcaaatgtatggcttgtatccttctgctgctagagctacaaggatgacagcttcagatgaggcttgccctggagataggcaaggccttgtcttggatgatgatgatgcacctttgtctcatatcatacaaaatgtggagaggagagagagggctctacataggtgcctggcccatgggggtccagttggtgacgcctttcttcgtatcgagcctagaggcccagcttccgatagacctacacgccctatgctcacaactaggggcaagggtaaagctatagttgtgagctctatagctcatcttttgatgatgatggtagttgatagtttataactccatgcttttattcttgttttgaatatttttgaatgcattctgaatttgctactttctttttgcaggcatgacttcaaggatgagaggtctcgcaggtgggccttcagatgagcctaccagtcgagtgagggccaatgtggccaggacctctcgcgatgtagatgctagtggaccatcactgcctccccctccactagagcctgcatccgctaggcaacctatagtttagcttactggcccaggtacacagaggcctggtagagaagtggggtcatctgctagtattagggttgttgagtcagccactcggtgtatatagagggatatccctttcttggatgggctttgcaagagttaggtgatagtgtgcttgaaaggttgtactctaccgaactttagggcctttatctggtgacttatgctttcaactttgttcatctttatggcattgtataagctagtcggccatagtgttgcttgtatgtggttggccagccttgatcatctatataggtgtctggctggccatggcaatccaaagaggggactgggtggcaagaattgactttttgatactaacagtgttttgatttatttttaggccttgatgaagttgagttcagctcatgacagctctagagggtcttcaaacgctttttaggagcgcatgaaggtcttggaggcatctatt

SEQ ID NO: 29983 - DNA, 1472 bp, Cannabis sativa
tgtaattattcaaatatattaaataaataacatataatatttttaagcaaatatttccattattttctaagatgtatattattattattattgttgttgttgttgttgttgaacatgtcacaccatgaaatttttagcaacaaggatcttttggttgaaattttcattcgagttgatgatagcaaattcgtgattcgatttagcaatgtctgtatgtagggttgtttgtaaagtattcgattagatttaatctgcacgatacaatccaatctataaaaaatgaatatttgtatttgtgcatattagattggattgaaaaatttaaaatccacatttaatatttgattgaattggattaatttttggttattcattcattatattatcgttgcaaaaagctgcttcacaaatatgtacaacactactcctttaaccttcaaagttgattttctgagactaaattcaaaactctttattaatagaatcacaaactttctattttagtgtttgtattttataagaattattaattagattttttattttgttaaatgataaaataaactttatgttttctaaaataatataaataagatcttaaactcaattttcaataaaattatttttaatataaccaatttaaaggtatacgaacagatgcaagaaaaatataactaattttgtcataacacatctagatcagattattattaagttttattttgacaaaaaaaattagttcacgatactatttagtactattttgaaaaattcaggatctaatttatcatttaacaaaacagaaagtttaattagtaagatttacaaaatacagagtaaaatgatatttatccataataatattagaaatttttgtagtataaccctcttaaagggtcgatttggtagactttcggtttattttggtatttagaaaaactttttagcctaatttttttatgattgtgtctgtagtagttatttatgatcatttgtaaatttttaaaaaattctgaatagttaacaatatcgaaaattaaatttaaatagttacttagcacgtgtataagaaaaaatagtcacgcgtgtaacaaaatatgtaaatcttattttcaacattgtaaattacttaattttttttaaaaaaaattacaagcgatcataaattactataaccctacacgatcataaaaaacattaactaaaatattattttatatgccaaaatagataaaagtctaccaacactcttttaaaaggtgtaatatagacctactcaatattatatattatacatgattaataatatgaattttaatatataaaaaatgttagatattttaatataatggaagataaatcaagaatatacaactcaattgtaaaaataatataaaaactaaaataagagattgattaaatatatgttacaatacacatatatacactatatacattgcatatatatatat

SEQ ID NO: 29984 - DNA, 3106 bp, Cannabis sativa
  modified_base (2053)..(2056): a, c, t, g, unknown or other
gtcttcaggaaagctagcctcacttcgggatggagttctagttagctagttgtccctcctggaatggtagtttcggatagtcgactccaacaggctctatcctatccagaagcatcatcagcgagtgtccttaatttgtgagtctggaagctcgtatatgttcctgaaggatttgatacttaagctgatgtggagacttcgctcaaagaggacttggttaagatagttatttctaactaacttaacagcctcgtttcttgcagccaccgactttaggatcttgatcctaagcctataaataccaccttggcttgttattttgagatatgagattaagaactcaattcatatgagattgagagtaagagagagaaaagattgagaagtgcagagaaaagagagagattgagtttgggtttgggttttgtaagaataatcttctgtagatgaagaagattcttaggtgtaagtgtgagagttgaaacacttagtgagaacttatcagagaatctcgtcctgatattgtagtgtacctattcttgctcgataaataaaaaaggaattcaatggtgttctaggagtagagccatagattacattgatctatcagacttgaaccagtatatatcttggtgttgattactttattttctacatttattgtttctagctttatatactctgtttgcccatgttttacattcgattgttgttcttgatttgataatcttatcattgataattgtttgattgtttaatattttgttaatttgattctgtgcatttagttgtatttttctcacaaatcagagcttgataatcgatcaagaacgcgaaatcacgattcattgtgctgcaattcttgaagaaactttgaatatcatcaatggcgagattcgaattggaaaagttcgatggaactgtggattttgcactatggatagaaagtctaaaaggaatcctagtgtaccaaaaagtttccaaggttcttggagatgagaagttattggcagaaaataaaccagaggaaaaaacgaaaatagaggagatagcgtactacatgatcaccatgtatctatcgaacagtgttcgaaggaaactcatcccagagaagacgactaaactaaaggggtttggaataaattagaagaattatacttaaagctatcaattgctagcaagattaatttgctaaaaggattatacaattttaaaatgatttcttctcttttttagatgagaatattgatagatttaatgagattattgtaggattggcaaatataaatcacaaggttgatgaagaaagtcacgccatcattttgttgagattgcttccaattgcatatcaagaaatcaaggaaaccatcaagtatggcagagacgtaattgtattggaggatgttcttgctacacttaaatcaaaagatttcgaattacagttggagaaagattctaagaaagaagaagtgtacttgacaaaagaaatatcacccaagaaaattagttcaaagagtaaacaccatcactctcaatcaagatcgtagttcaaagagaaggaaataagaaagtgttacttctgtggaaggtctagacacttgtaaagattttgcaagaagtacaagtagcaacaagatttcaacaaatctcacaatagaaataggaaggacgtccgacaccatcacctagaaagactttgttgcaatcacgagttggacaatttgaggggttaatgtatgaacttggttttaaaatatttgattaacaatgaaaagcaagttgttttggtttgtttgtcaaaagaagagccgtcaatacaacaacaacccatctaagaagaaaatttaaataagaaaaataaaaatggagggcattaatttgttgtttagtggctgaaatataaccttggtgttattattcaactatttacacacctacctttctctaatccttacatcttttccaattttgaattctgatcttcacttctcaaatgttcattaacaaatcaaattttgaaatttttggagactaataataataataataatannnntaataataataaataaataaatttgatgtagtcatatgcatagattaatgattttacatgtctcctcataaagaggagatcctaaattcaaattccctctctaatatccaaaaaaaaaaaaaattaatccctttttagttaattattttcaatgaaatgtttattgtaaaaaaataaaatataaataatatttgaatcaagagtacataacataacatttttattttgaaataattaatatattataagatatagtatctagtatttcatttttctaattctctatctctagtaaacattaaatgtaaaagcaaaataaagatagtggatgaactacattattttcacttaacaaatatttcattatagaagtatgtcccataaagaaagaagaagaagaagaatccttttattctttaatgtagattttatgtttgatttgctacttctttttaagaaggttagagttgcatgtgtttgtattgttacagaactaggaatttggtgattggaaattatattctcttcttagctacctaagctttacaattaggtatgtgaataatgtgatatatggaaaacaattgtgtgtgttttaggacaaaattcttttatgatattaatttttaaatttatttatttatgtttggtaaaattttcttatatttacatatttcgtaaatttgaagtgtcagttgaatattattgttagatatcaactggattattattgtattggcttcgaagttaaacttttacgtatacaaaagtatacatagtagtcatccaatttatatttaaccgtgatatttaattgacgcttcaaatttaaaaaaataaaaataaaataaatctaaaaaagttttgccaaaaaaaaaaaagaaagtcaattgtataaaaactaaaatataaacaagtttcactattaattactctttatatatgatatataatatattatatatatgaatatgtgtatatgtatgcatagtatattgtgtttttatgttgcactatgctttggatgtagtctttttcagtagttttact

SEQ ID NO: 29985 - DNA, 1188 bp, Cannabis sativa
gctccactgttttcacactagttctccagcccagccagtccttgaccaactcaagatattcacgtatttgtgagagaattttcttcgctaaactaattctgaatgagcagtaccctctcggttagaaacttttttggtgttgttgttttctttgttgttattgttcttttgtttttaattttcaatactcaaggacaagaaatacactaagtttggggtgtgataactctacgatatagggttattgttatgatctttaaactaatttgttgtgtaaagagtaatgaaagtgtgtttgtttgttaagttcggttagttttttctttattttttatatagtatactagcttttgagatttgtaaactagttatgtttgactatgtttatttaattaaaccttgtcagttgttaggaatgaaagttaaagtgctaagggaatggaaatgatgcaaggctaaaagggttattgaagctaaaagtgggaggaatcgctgaatagaatgctataacaattcagcattctgggcagtgacatggtcaagttacaaagataattgaatccatccacatcaacacccatgtggcagtcatttaaattcataccgactggctaatgtgagaataggaaacaaagagattatgtgggccaaagagagatgttttactttctaattagggtaaatgaggtgtaccctaagggaagagaagaaaaagaagtactagcctccattgacattcattacacacacatgagctgtagaaagagagaagaaatattgtagaaagaaaagtactcaagatcaagtacctaaaagaggaaatcaatcgaggaaagaaggaggaggacacaagcttcattagcttgaatttctattcttcttcttctattttcttcctttctttatatacttcgagtttgataattttgtaaaaataagtagcagccatttatgaacagattttattttggattgtaattactggtttgaacatgagctaagcttcttgccaaaaaaccttttttttattttttctcgcccaatcataaccggttcaattctcaaattaaaagtaaatagaataaataatactttcatacaaaatcttaatagaattagatgtaatgattaataaattcatccgtttaattcaatatctacataatagaaaaattctatcaataattt

SEQ ID NO: 29986 - DNA, 1117 bp, Cannabis sativa
attataatcataattataattatctcattaattataacaaaaataacaacaaactaattaatggaggtagctaggttccattgatacacattattacttgtgtaatctatggtatttgcggaatccgagaagcccggaatccgcaatggaatcagatgaatagaataatctcaaccccggcgtccaaattccgccattttcggcgccagctgggaaataaacccgggacggagaaagcgactagtgtggacgagcacccaacacacattctatggaggtaccaaatcttagcaccggacagcgacattgttggcctttggaaccacctctttctcttcaccagtttggtggctctgttcatagaccctctctatttcttcctcccttacataggaggcccagcttgcttgtccacagacgttgatttggggatcaccatcacctacttccgctctgtcttcgacctcttcttcttcctccacatgctcatgaagttccgcaccgccttcgtcgctcccagctctagagttttcggccgcggtgagcttgttatggacgctagacagatcgccatgcgctatttgaagtctgattttcttattgatcttgcagccgctattccattgccccaggcatgcatttatatttatatcttcctttataaattttctttctttcactcatttttttttttttgcttttgtaaaaattactaattggaccatctattctgttaaattgtaaaagtaagagcttgaactcaattttcaacaattttattttttaatatcatcaattttaagacaatttctaatacgaactcatacagaaaatgtaactagttttgtcattacatctttagatcaaattattattaagttttatttagataaaaaatcagtttaaagtcctatttgtacaattttaaaaaatataagatccatttattatttaacaaaatagagggtttaattaataacttttacaaaagatacaaaataatatttatcctaattttcatataaattatttattatatatgagtagatgaacaatttgttgggctatcaaggtccagtttggactaaggcagattaggcaagtcttagaaatggtg

SEQ ID NO: 29987 - DNA, 2457 bp, Cannabis sativa
tcatcaatttagtcttttctttttatgaggctatgagcaagtgttttttttagttctattaagtccttgttatctgtctttctaggtgtatgtcttcaacatgtaatgcgaaatgataataccgcagaacatggtgagattatgcactatagatgaaaaacgagatttcttggttagaaaaaatttcttccttgtttaataatgaatgtattgtttgattttcagcaatattaaaattagttttttttaaaaaaaaagaaaagagataatggtgagagatagagagagataatggtgagaaatagtgaagaagaagaaagcgtattcttttgaaagaggataatggtgagactgagagggatgtaatatacagtacttgtataaaaaataaaggatatttcttcaattagagaaaaaaatattgcaataaccagagaacaaaattaatggtccagccatcccgaataattcattttattaatggttaaaatttaattgaagagatgaaatattgaaaggtcaagattgggagaggaacaacttccacgttagtacactgactgcgggttcgagtcaagtcctataaaaacttgtagcatatatgtttgatgatagtggtgcccaatatttttgtataggtgaggctccacgattagttattattgtggacaatgtcccacatgaaataaatagtagagaattgagtcatatataagaacatggactactccactcattgtcaattggttttaagataaaactccatgattcttaacatgatatcagagacatatagctaaagaatgccgtgtcttcggagaagggccgagaacaatgacaaattactttctttggtcccacgtctcatgactactattttgttattatttgtacatcatgaaaatttattgtgaaaaacttgccataaaaatttattatattaatcatttaagatactagtcaaagcacgtggcattgctgtagctattttctaataataagaaagtattgatcaattcctaaactaatcattttgcatatatttatttttatctaagactttgtcaatttaattttataaatatattaatttataaaatattagaaataatacatgcaattaattattatataactgacccaacaaaatataatgtttcctcatatttagacataaataacatagtaaagaataagaaaaaagagtaaaaaaaaatcaacaaaattcactagtcctataatccaaccactactccatactacacaaacatgagtttagtaaattaatatgaaaaattgctaattaattaatattatattattgtagtgtaagaaaccttagagcatatccaataaatgttgtaaatacattattttagtttatatttataaaataaaaataatatataatgtggtttaaatttcgtacatacataaagttgtgtcaaatttaacacaaaatgtaatataggccaaattttataccaccatgttaatatcattttttatttattattttgtgacttatttatttaatcactaacttatatatatattttgacactaacttttatattttcatttatatatatttaatataatttttatatacttctcataaaaatgtaatgctagcttttgttgattttttacactttactattaatgtaatgtttattttatttttagtgcattagagaacaattataaaatagggatcaaatatagcattgatctactttttgagctaaatttagcacaaaatttgcatcttatcccaaataacaatgttcttagaactaatgattttgtgcatattgttatttcatgacctagtctctgttttataataagtagataaggtatgcgcttacttataagtaaaagacttcgaatctgtacataaagtgacttgactctgagccccatgatatgacagttattaggtgcgactactggccggtttaggatatcgttttcgatgattggtattgagagctaggagtctagtggatgtgatatgcacgagtagcttgtcccttataattatttgtgatctctctactttgcttatagatgatgatatgttttgttttgaaagaactaaccatgttagggacttttattaaactattaaactactggtccttagttgtcttcctatactagactttataagcttacccctatatttatcttctagaaactcagttggatatctgtggatgtgggaaagtcgttgatggagaacgacgagattagcttagtcctactttaattattaattaactattactcttttttaaatattggatatgtatctaattattaacggatggtctgtatcatttatatagagttagggatgaagaatatgatggatgctataagtattgtcttggtattttttggcttattaattaattctaactattaggtgactacataactatgaga

SEQ ID NO: 29988 - DNA, 1752 bp, Cannabis sativa
tatatatgtttaggacaagtggtctctgtgtttgtttgaaagggacttttctttatttatttcttcctcgagactctcaaatccataccccattccatcttatcccctttcctatcccaccttatattacctaccgggtaaaatgaaaacactatctatggtggtgaatatacatatatatgctttatggacttgtttgatatagtgtgtattctattgtgttatattagtattatttaatataataatattaacttgtactaataaattgtgtaaatttatcatatattttcaataaacttgacttcaacaccgattctggatccagatctaggttcgagttcaagtttggattccagtccctgtctgggtctgagactagctttggatctggggtctgggtccgagtttgagttaaggtctagagtctgagttcaaggtttggtttggggttcaagatccgtggttcagatcccgaatacaggtttgagtccaagtcccttgatccgggtccctggatctgggttggcgattagggttactctatatcttttgtaaatattataatataagctaatacatacaatttgttatgtattaaataatacaacttacattgtattaaaattattgatcgtaataattaatacaatatattattttaataaaacatagtgttatttgttatttaatacaatacaacccttatacgaaacgagtaccatgtacatcatagtataccctctagtttatactactaataaaattattaaaattaaaaaaatatcataaaatagttatcttatcagattatataaaaagaaaaaaataaactaaaaaactctcttggttattgaaacaaataagaggttcactaaaatactaaggctgaccctgagttgaaatgaatcataataaaaaaaaaattaggtctttactataaagataaatggtttttttttttttaaatgagtccctaaaatgagtaggccttaggtgcgggcctagccctatgtctagggccggccctgcaaaatacctaaaactgtttcaggaacaaacaaattataatgattttgcgtctctatttttaatcatcttttgatattttaaaataacttcatcaaaatttttcttatcaaactgataatcatctttcagttaatctagcctccttggttcctcgggactaataaagggtagtacatgaatattcacatgtccatcaattatgcctttcggtctgattttaggccttgactcaccttcttcactagaaggatttttgttgtcttgatctcaatttaataataaataagtccgaactaattgaatactagttccagaaatttgtaaaatgagtttgctatttccataaaaaatatatatatataatttataattctaaatttaagaatgtactattcacttaccctatataatttgaagagagttctacaccaccttatgtattgttttgtcacccaacacctaactcttttaaacccacaagttattatgtaaaaataaataaagagaaatcataaaaattaggttcattgttcagaagaagttagtcaataattaatataatattattattattttgtcaagaaatgaatgcaaatacttacaaatttagactattcttttaatataccacctttaaataaatactctaaatattctccaaacaccttaaaaccccaaaattacccttacaatttcaaaaactctcttctcccactttct

SEQ ID NO: 29989 - DNA, 2376 bp, Cannabis sativa
tacgagatttatatccttaaaatgaggagatatcacctattagttacacattcaaacaataaacaaataacatgttaattagtccccaagaataggtaaataattgaaatttatctcttattttcgtgggttgttaagttgatatgttgtgcatgatgacttggccttcttgttgacaagatgtactccacgtggcatcaatcttgtccacatggacacgccacgtcatacgggagaaaattagtataacagatgtatgctgacttggatgtcatatcacattcatagttgtcaaactgtgtcctacttttgtggataataaagacactttaatgattgatccttaattactatctttctattttgggaagatatatgatcctcggacgagatcttagtgattaagtcctgatattacaagatctagttaatgagtaggataatgaactagatgtctagatgcttgctaattctttatctggatactctaactgagttcttctgaatacatgttatgcttgaagtttgctcgcccagatgagtcatttgttcagcatccagaagtcatgattttgctaatggatttggtccattctcttaattaggccttctgttgagcctgaagtagatgagttgcattgcgtttggaattacacatgtcctcatccaaaaatacaaataatatttacaccctaagcttttgaaactttaggggttatgtcaacttgctctcccgaatgatatgaggacaggtggaggctaaaaggaggaacctttttggatttcaaataaatagtttgtggttacttcttattgttttgaaatgaaatgacacgtggcattgtgtgtggagattactttttttaatggaatgcgtgcaagatagctttgtgaaactgtagtggattacgttagcgcgagtcttaagaaaaatataatcatttagatatcttggttccaagcattgcattaaatgcatgactggcagctttcccaaactattggatacatcttgtattttcttgaatataatttgatagtattaagaaaatagttaaaatatttttctacaaaattgaaaacactagcatttacttaattttatacgcgattaatgatcatattactccaaatcccaatataaaatacgaagaagacgacaatataaacactacttttgtccctattggtacagacatttatatttttagcattttaaaaattataatttatttttctatatatatataacgaacatctatcaatatgacagttgtagtagacattctatctatttttaaaatttctaaataatttatgatgtctaaaacataatttaaagatttagtttcatgtatgcttgattttatattgcaagtgtataattgaagttttgaaccttgtatttgacaatataaattattctacatttttcgaaaataggtatgaagtgtctaccataactataatatagataatcatataaaaaaaattattataatttctcttaatgctaaaaataagtatgtccctatttgtagagacaaaaatgtagatataaatcatttttgatatagtataaagtattctaaattttatatgataaagtacttaccataactataaatgtgaataattatataagaaaattttaattataataaatctctcttagtagagacaaaaatgatctcccttttgtaaaattttccgaagacactaataacgtataaaaattatcgtactaaaattaatttttcagagagaaaaaaaattatatctaataagagatttatatgtacttctctaatgattccttttaatatatatttatataagatgtaagaaagggtaccaacaaacgttaataaattaatattattatttttctttctttttttaaaagaaaaaaaaatgttaatattattgttattataaaaagcgttaattattaatatgcttttgttaagaaagtcaatatattgaataagtattacaagtgtcaaattataatatctaagaattgagacaattttagacacaatatcttactaaaacaatttttgtatatatacccataataaatatcaaataatcatcgataaaagttgacgtttatttgtttaatttacatcttcattattggagcacaacaaatatagcatggcccctatattttctgtgtgtaaaatttacaacatgtgcatggcatgggagatggtcttatattcctatagcattaagtcattttctgtgtgtaaaatttacaacatgcatggcatgggagatggtcttatttataatgtacttttatgagcattactattgggtactaatggtacttagtactcttagacatgtcatcttataattggt

SEQ ID NO: 29990 - DNA, 1159 bp, Cannabis sativa
atatattattaattgtgatgaaaaatagaatatagattaaataaattatatgtttcattgatttattacctagattaacttatctctatagaaattaataattttcctagaataaatagattgcatgcttcttggatctattgtttagtaaaaaaatttaattattaagtgatttgccttgattaattataatagggaggttggaaaaattgactgtttctatatattctgcggagttaatagtttaattgagaaatttgaataattcttattattattgattttgaatggttatggagggtagagattgactcttaattattttttaatagcgtactatctatctttatttgcttttcagtttatgttatttgatctttatattaacccctcattttaattcttagttctaattcttgaataataaattgataatagtcctcgtagattcgacttatatctatcgttatactgaagtaactggtaatattaaaataaaaatagtaaatttgttgtgggaaacgatacgcattaaatttttagcgccgttgtcgggggctatttaattcaatttgttattcatttttttcttattacgaacttgttctcctaattgtgattttaattttcagatctttcgttgaaaacatgaaggtatactatcaatagtataatgatccatattatgtatcaccacaagtgtaacaatatgatccctactatgacagttacacttcataatgtggagatcattccaatacattatatgacaaaattaatcaatatgttgagccaaattactatgatcctctttcacaaccacataattaaggtccatttattaaagatttgataaaggatctagcgagtaacaccattccatttcagtagcaagctcacatatatacttaaaattatgttcttttttctcaacaacctactcctattgtgccatatagtgaaaagtcaattattgttgagctgattaaaatgataccagctaataacatgcagattcaacaaaatacctttcagttttagcaaagctttcatgaaaatgcagagctttcaacaatctctacaaaatgttggattttatgccctaaataaatctctttacaatctgattagttatcaacacaagaaatttgaagtgatt

SEQ ID NO: 29991 - DNA, 940 bp, Cannabis sativa
tttggtaactttaatataactaagaagttattttagtaatcacaaattatttttttagtaacgttcttctaaataatatatatttgatttttattgtttttaaggtacaaatttgcaaatcaatttttcttaaaaaagttattttatgaaaaatatcaaaaaaaatatgacgaaaacaggaaacttattacactaagaaggcccttaaaattgattgaaaaataaaatcatacttttataaaaactcataaaatatttgtaatttcctcaaaattacgttcacctttcgatatttaccactctcattagtcattaggttaggcccaattgccctggtccaatttcgaagcccattacgagcccgcctcttccggaagaactctctacaagaacagagcagaagctaaaagctcagctaaagactcttccagaaaccgttagaactgagtagagtgatcactcacagtcaccgatcggagaagacacaaccaactttccttccataccagaaaatatctatgtctgaggaagacaaaggtagaagaaggatcatgctcttactctactgtccttcactttccaacctacttcaactcgctgtttgtgaggatcaacgaatagatttgggttacatagccacagcatttgggttagacccattaacactcagaatcaatggccacttcatcgctacaggaatcgacttcatctcctcctatcttacttggaactcactcttttctttcttctctgctaaacgactctccactggtaaataccctgcttctgacccattaatcgtccatggaaagctctccagactcggaacgaagagtaagtatttctttgtttggtttcggagaaaaatcatcagttgctgcagctgatgacgtatttattcatatcttttgcaggagcgcatgatcctcaggatgatcgt

SEQ ID NO: 29992 - DNA, 1951 bp, Cannabis sativa
actaatgatgtaactgttaccttatattcccaatctatcaatcattttgattgttatgtgtcgtgtgctattacgaatgtgtcgtttcacctcacttgtttttacggctccccggtggattcactcaagcctcacacctggcaaatcctgaaaagaattggtagagataatccccgggacccgtggcttatcattggggacttcaacgcttttcttttttcccatgacaagcaaggagggaatcccaataggggcccttcgtcagcttttagacagctgttagattcttttaacctttccccgcttacccccgaggggcccctcctcacctggaataataatgtcgctcatcccaaaaacatccaagaacgaattgattgggggatcatcaatgattcctggctagatactttcccaggagcctctctccctcacttcggtttctttggctcggatcaccgagccttggagttagtcacatccaaccctccgggcactcggtcaaaggaccatagcaagagattccactttgaaaatgtgcggctaaaggaccctaattagacccaaatttttgatcagtcctggactagttccacgaccactcaggaagccatccctaaactcattgcttcgtgcgcgtatacgcttaataattggaatcacaaaaaagatttcaacttcaaacaacacattaataagcttgagaaagagctggaaacagcccgttcttcttttatttgggatgatcatgccataacaactataaaagatcttcaatcccggcttgacgctcttttgtacaaagaagaaacttactggaagcagcgagcgagaacccaatggctggctcaaggggataaaaacacaaaattctttcaccgatttgcctcccacaggaaaaaaatcaataaaattcatcaactccatctacctaatggaggcattgtttctgacgaagagggtattattcgggaaatcgaatctcattttgaccacctcttcacctcctcgaacccttctcatgaggacatgagcaaagccttggaaggcatcacgcgttctctctccgacctggacaaaaaccttctggctgaagacttctctccggatgaaatcgagaaagcttttacccaactccctttggataaagcccctggcccggatggcttcaactctcacttttacaaagtaaactggtcggctgttaggaatgatgtgattagtgcagcgtccagcttcctcaacggaagcggcaatgtggccccgctgaataacaccctcatcactcttatacccaaagtcaaacagcccaagtttatctccgagttccgacccattagtctttgcaacatcacttataaaattatctcaaagactattgctaacaggttgaaaattgtgctgaatcagttgatctcacccaatcaaagtgcttttctaccaggcaggcttatatcagacaatatcattatagcccaggaagtagcacactccatcaaactcaagacgaaagggaagaagggttggatggcggtcgaacttgacatggccaaagctttcgacgaagtggaatggccttttatagttgccattctccagaaattccaattccccctaggtttatccaattaatccttgcctgcatctccacaacctatttccagttcaatctgaacggcaaagtcgtaggaagtgtcatgccctctaggggtatccgccagggtgatcctctctccccctatctctttcttttatgtgctgaaggcttctcttctcttctgcacctacaagaaagaaggcaagctctctcgggcttcaaagttgccagaagagcccctgctatctcccatctcctgtttgcgaatgacagtttcctattctgtcaggcatccatccgctcctgcaacattatcaaagacgtcctcgatgtgtatgagcgagccactggtca

SEQ ID NO: 29993 - DNA, 1205 bp, Cannabis sativa
caagttatttccaactgggttttatatagagtgttggctatctattgagtcagctcttcgactttcttcttttgctcggtcaaaccttggttggcttgctctagggccttttccttctcagcgagtgcctgtggaaccttctcgatttcaagtctgtttgtcatggattgcttggccatggctttggtctgagaatagatatagcctgcctgtaagtttatctaaaagtaaataaagccaagttagaagacatgaaatggattgggcagacataaaattagaaaattagaaggcaaatttttctgcagtccttaagcaaattccccatcaagaagtcagtcagaagaatgtctgctcctcccagtagctccccggcctctacacggattttttcatggtagttgttgcagatttcctcgacacactttagctccgtaggcactgtggctgcagctttgtcctttggttattgagtcagcaaggcaggagctaggggcagaccctttaagttcttggtcgcaaaggatttgattctggttgtctcctggtcaatgttaatgatgaccacctcatctctaaaaaagacattaggatcaatttttgcacttttcttgggctttccttgcctgaggtgtcgcccaactttcttttgtacaaggacttccatttgctcaaaagtggaaaaagtatcataataatggttgggggtaataaaatgacataacctattaataatatctaccccgaacctacggaggaacacactcccgaacaagaattgaaggagcatcatcatcagaggatttttcttcaatttcttcaaagatggcctttccttttcctttaacatgctgcacgaccctatgaacaggttcctccttaagaaccctgagacgaatgggtgcttccacagccgaagccttaatctcattgaccttggtctttttcttcttgcataggatggttttactgatgcagagggctttttggggaacagactgtctaggctcggatagagtccatacttggttaaattctcaaaggatgtcaacaagataatgtgccaagaagaactagacaagcttaaaatggcttgggccctgtccctaaggccaagtgtgaaagtaggctagatgtatgttttagcacgttggaaaactgagaatttggtcgtcatcttgttgaccatatagtagtcgtggagg

SEQ ID NO: 29994 - DNA, 1593 bp, Cannabis sativa
ccttttgtcaagaacataaaggctacctttgggatcctattgtatggaaactcaacaacatttggtatcattgaggctctccaaaacagttcctcatcgctcatcgaatgctgtaactctttaggagctatccaatctccgaattccattttcactctcctctttgaaaactcacacgacggtaaatcagaattgtaagatgtgtcgtttcggggatgagaatgtgtattcaattgaggaaagaaagtgtcgtctgatgagcttaagaagtttaggatacgattatgaatgaagagacctagaatcaaagcaaagaaagtcagcatcaaagagagtattattgtggttctgatatgaaaattgcttaagtttgcttctcttttgatgcgtatgtaaaggtcatttacaaagacggttattttactatctttcatcataaaccaaagtaaaaaaaataaaaaataactgttggggggtaaatttttggacacatgagaagtgacttctaattatatattgctaggattaagtgcatgcatgactatcatgtgtaaaaaagtttataaaagaaaacgaaaaatgggtattttttaatgtaattttagtcgtattaaacacaacttgaaacaaagcatgattagagagaagagtagaaagaagaaaagagaaaaaaaaaatggtagttttccttttcgggtgagtaacttgtgacggtatccggttattattgagaaagagaagatttttggccaacaaatcttaatttggagatggggttttggtgagagtgaagaatatgaagaaataaaagaaaaaaaaaggtaactttattacaacaagttcatatttttcataagaaccatattcactacaccaagcaagctctcttgccttttatcattaggatagtaatgtatggctttaccaactttaatgtcttaaattatgctgtaaatcaaattggaatttattgctaaccctttttaacagaataaaacacagcaaagaccgccacagcgctaataacaagtaactttgaagaccttaacttgtgatttttcgacgtaaagctattggtaagcattgtgcaaatccaacgagataagaaccgcagcccacatgtttttcggaacttctggatggaaaatccctacataaaccaatgcagcaatctttaatttagatctaatatgatttcaaactcaatgtggtaagcaatactttaagaagttctaagatttgacattggagtagtctaacctaaagtttggtaggtggtgaaatgtgccaaatgagaagctattcctcaatggaactataatttactcaagtcgtcagcaaatgtagcgacactggcgttgaaagtttctaaagagaaaccctgcacattctcaaaaacaactgttggattttgactctagaaaggaatacacatatccccatttcatgcaagcttgcaaaaacaattacacactaactaattaagcattatgtgttacaatggagtggtagcaagaaacaagtacttttgatttcgaaattatgaaaggaaatacaaaagttgaggatttagttttatgtgaactaatttta

SEQ ID NO: 29995 - DNA, 2584 bp, Cannabis sativa
ctaaaaaaatttaactcttaagagctttatggtttaatcatccataattatacattaaatatttctaaaaaaataaaaaagtagaagttgggaattgatttctgacctaataattttatttatataataataattgttcttttcgtatttttagagccctgtttattggaattttttaaaacttaaagtttgtatgacattattatttttttttcaataaaattatttcgttgcttaaaataaaagtacgggacttactcactttcatattaattcacctaaaaattatgtctatttatatattttttaacacacctaaaaattatatttaaaatctcataaaatatatttttttttacctaaatcctcattataaatttatttttcatttatgaccctaaaagaattttctaggtcccttcctagactgagtgtgctctctcttatccgatgtatgatttgtatatttgacacgttttaatgtagtgcatgaaaatgtgaaaagcatttacattattaatgaatgtataccactaaaaataaaaaaattatatacattctcatttcattttttttttttaaaaaaaaagtttctctatctagaaactactctactcaggaattcattattacaacaaactaattataagtattaatgataaagattttatctacatataatagagattatcttgtgaacaaaaatctcatcaattctaaatattatattcaatattgtaatttttttttttttttttgtgaatcagaaaccttatactgctgcctcaatcagcaactcacttgagtctgaaaaaaaaaaactattttaagaacaaaaaaattcaacctgctatatatatatatacttctctttacaaatatgaacaattcaatccatatctaaacatgtaatcttttttaacttcatttaataacgtccgctccagagattatacatgtagctgaattttgagaacaaagagtttgatttctatttgtccaaaagtgatgaagtaattaaggctagctgttgtaactttaatattcgattctaaaaatacataattcatgatcatgtatatctatagtaaaagaaaaaaaaaattataatggcatactctaccatatccattttgtaataatctagacaaatttcatttaatgatatatatgggatgaaaataccttcaaaattctgtttttataattactaaataaaattattaaacaaattgttgtaaaattgtttgaacataattaaattctgttctatctggcatatagaatctgacagaacagaaataaaaataactaagcaaaaaataaaatgacgcacaaaacgtggtatcaacaatccttttgaactcctagtctacgagaatacgcccagagaatgaaatttattagatgaatttcaagtgattacaaaatcaaattgacttatataaataaagattttctttgaatttactacagctgttgtaatctatcattcgaatccaatttttgaagtgctaagaccttgaactctcttcaaatcgtggcacttacactttctcccgaaaaatgactcacttgcaatcttccttccgattaatagtgtctaacttgcacttttcctcccgaaaagcatcccacgaacaagattttctcccacagcttgatgaacgatatatctaaggtgtataacctacacaattttaacaaaaaacaatccagaataatataataataaaatactaagaatttgttggactcaagtttttcacataactaagaaactctatttaaatttgaaagtaattttccaaataatagaaattaaggaaaattaatgacctaaaggtgtatttatgtactttagaatccctagatggtggtcaaagaaccaaaaaataattaggtcaataaatagaaaaccttgaaaactatgtctctttttgtactaagtcttctccctcctttattagttgtaatttttcttatgtttcaagaacttgtaattttgccgctcataatgtggctagatgggcctttgctcatcaggtgtttgggaatatcccggtggcctcgctaccagacaatttaatttgtaatgaccgtgaggtctaaccttttttgattctatgttataaacgctttttatcaaaaaacaataaatagaaaacctttccaaacaaaaaagccctaatctgtttaaacaaagtcagtcttttcaaataggtacattgaacctgaatagtttttcaacaaaattttcataaacaaataaggaagctttgacaatctttaataaataatctaaataaagaaaatttatatttattcatcaataattaaataaaaaatttaacttgaaagacttttcacaataagcaaagaaagttttttttttttttttttcaaaattcataaatataaatacaaaactattttcaaaaatatatcccataaacactaattttgtctattttattaaagggctaattacataaaacaccattttttttataaaaaaaaaatacattttatgtttaaagaattttttttacatttttccgatttttcataaaaacaacacaaa

SEQ ID NO: 29996 - DNA, 4657 bp, Cannabis sativa
atcctatatttttcaaaatagtaaaaatagaattctgagtttaattttcgacaacttttttttatacaaccaacttgaaaacaattcctaatacgaagagatagaaaaaatgtaaatagttttatcatagcacttttaaatcggatattaaattttattttgataaaaaatcatttcaaggtcctatttgtactattttgaaaaatacattattcattttgtcatttaacaaaacagaaatttcaattaataacttttgcaaaacacatgatctaaaataatatttacccttttaatatcaaatgtgagactaaactactatataaataatgcttaagatttcaccaataacactcatcaactaatttgtgatctagcattatccaaaacataaatataggccatctatcttctatattggaactaaaagtagaagttataccaccgaaggcacatctcatgtatatgcttctttctaagtggagatgacatggagataacctatatggttgccattaattccactcaaactagttgacttgggcttcgatttcatcgatgagcattagattttatgttattattgtgcaacactaaacaaatgctttcaatccttttttttcagtccaaagggaataaatatataaaataaagtaggagcaatgttggacgtcaattggcatattccaacttgttatataactataacatttgtatataatgggaaaactaagagcaagagaggaatctcctatagtagtgagtgatcttcaatgcttttacacaaatcggttttacacataactcacaaccaatcttagctttgaaaccaataacatttaaggatgcacattttttcccacagtggacacaatctgcttgtaatgagacaataatttcatatatatttaaatggagaacagaatgggaacagagataatttttcgtccctattgttaaaccgagtttggccaggatgctcctcgccccagcagagtccatttaatgtagtttacatctttttctagtatttttttagaagtaaatatctttcttagtgtttttgtggcacaatagtatttttttttttaataaaaatattgaatttaattttaatatattttaaattataagtagtgtaatgtattaattttcatttgcaaattaattttattgaacaaactttaaaattcatttttgaatagataagttcttgtggtattttcaactctcccgcaacaaagaataaataagtgttgcaaaagtttctatcgattcagcactataaacactccaaaataaaatctgagattcacacacactatactaaaagtgaatcttagctctattattattgtagtaattgtgtctattacaatgtaaaaatattataggaagtcttaggcctttatatagaaatcatgcaagagacaaacaacaagcaaatcactcagagtgagctgacgaaggctaactgctactaacacaactaaactaactattaactacctctaattgttatgggcattattagcaacgcaaaatttaaaaattctccgcattgactactaatgtacataggaaagatagtttataaaactgagatagagagtaggttcaagcaatgcttgaacttgtcgctaggaagagcctttgtaagcatatctgaaggattgtatgcagtggaaactttgaggagcttgaccttgctttcattaattatatccctaatgaaatagagtctgacatcgatgtgtttagttcttttatggaaaacttagttttttcttaactgcaatgcgctctagctgttacagaaaatcaaaattgcctttaatcactgccaagttcatttgtaattctccttagccagattgattcttttacagcttcagtgcaagcaatatactcagcctcagtggttaataatgcaactactaattgcagagtggccttccaacttattatgcagcctctcatctaaaatgtgtagcctgtttaagaccttcttaagtcaatgtcccctgcataatttgagtctacagatgtcattacatcagtgttgttgttgtctaatccataaaccataccaacatttgtagttcccttcaagtatttcacaatccattttactgctttccagtgctcaatccctagttctttcataaattagttgactatgataactccatagcataattcaggtctggtacagaccataggatacatgagattgcctactaagatggtataaggcactgagttcatgtattctatgtcttcatcagtggaaggactttgagaacatgacagtctgaactgttgactcattggagtgctgataggtttaaattcagcaaagccaaatcgatccatgattctgttgatgcatcattgctaagacaacttgagatttctttgctttctatctctaataatctcaatcgttgggattttttttgttgccctcaaatctttcatgtcaaattccttgcctaatgtcttcttaaccttttcaatcttttccattttttttgcttgcaataagcatatcatcaacatacataagcaaatacaccaggaactttgagttcctaacatataaacagctgtcatatgcactctttttgaaacatatcttgattacaaaatcatcaaacttcccgtaccactatcttggtgactacttcaggccatagagagatctctttaataagcagacacggttttcctattagttttgtggtactaaatcatgtacgcggtgaaagtatttatttagattatcatcgtaccacacccaatgttctctatatgtacatatattaaatttaaaataaaagatgaaaagatatatttacctcttgaagtgaatgagggtatccttgaatatttttgtaagtattatctaagagatggtgacgtcaaaaactcacaccttgatcttcctgagatcaactaccacacataagtattagtatgggctaataggatataactatgtgtgtgtgtgcattcttgagtttgcctcaacacatgagcaataacttttctttctctaagtgaataattatgtggttaacattttctaagtttcttaaattatacgtatatatatatatagatttaagatataacggtatattaatttaaaataataaaaatttaattaaataagatatatttttttaataattaaataagatatttattattttaaataataaaataataatatttaatattgaataaatatttgtaactgattatgttatagatatttattttgaattagatattatggtttgaattaaatatctaataactgatttgagagaatctctcaactattttgagagaatatctcaaatatatataattatttttttaaatttcaaatttaaataaatatttatcttttagactaattaattaatccaaaaaaaaaaaatccagtggggcctatcttatctcataggtgcatatcaccatgtccttacacactgactgttgccaccattgacttaaccagacaatagtgatacctttgtcttgacaacaaattttctcccaatttatttattacaaaatgaataattacaattttgacaatttaaaatagcttctttcaaacatcattatacagttttattttatccattgccttcacagtgttgcaaggtgacgattcgggccttcatagcttctttcaataaattagattatttattgaatctcatcaaccaaatagttttatttattaatttaatgattactccactatgaatatagaatttagttcttactaattatagaattatatttaatgagtttattgtagtgtccattgatataataaattttagtgattaaccctcattgtgttggttcgtaattagttttggacaaattatcgctttacccttctaattatttcttcattctttagtaccgttaattcagtagtgaaagtataatttagatccaatctaaatttgtgcacaactttttttagctctaaaattaacacttaaagagaaccaacattcgatctcttaggaaagtcaagattccataattgtaaatcaagtttctaaccatccatattattagcttcccaaaatagaagttgtaagaatcatattgtttgagaaactttaacgagtgaatcaaagaaactaataacatgactagagttcatgattactcaggattcaaggcgatctactattgatcatcgttacgatataaattaggtcattatcataaatgatacatttgataaagacagatgttaacctcaaaaattaacaaggctaattctcaaaattagtctcgagaagtgaaagacacttactttaagagttggccaaggaatgattaataagttggcgcatgtatcctagggccattcgaccaaaccgtagtgctaacccccaaaaatcagcacttacaatttttgggacttattaaagcaccacaaagaccaaccccatgacgatccacgaacggaggatgacaaggaagaaggttgcaagtgagagagatgttgggagagtggtgtgtgtgtcagtggagtggtgtgtgcaagtaaagtggagtggtgtgtgcgagtggtgtgtgtgtgtgtgtgtgtgtgagtgtgtgtgtgtgtgtg

SEQ ID NO: 29997 - DNA, 2961 bp, Cannabis sativa
acttgcgtgagatactacttgatacgtacacttgcgtaataaacagaattttcgtaacactctcaatcaagatctaagttcagagagaaggatacaagaaagtgttacttctatggaaagtccagacacttgcaaagattttgcaagaagtacaaggagcaacaaagctttaacaaaactcacaataaagataggaaggacttctgacaccatcatcatgggaaatactttgctacaatcgcagagataatgaagactgctccatggacggagagttattctctatctcatagtcttcaatgaacagggagtggattcttaattctgggtgcacttattacatatgttcaaatcaagagtcatttttaattacaagtcagttgatgtaggtaaatttctaatgggtaatgatcattcatgtagggtcattggaaccgggaggttaccatcaaatattatgatggtggaatcaaggtgctgacaaacgtaaggcacatcccaaaacttagacaaaaccttatttccctggatgcgcttgaggatgaaggatactaatacaagtccatacatggaagcttggggatcagtaaaggttcttagtaatgaaaggtgaaaagaacaatggtttatatgttctccaaggagaaactgtcccagctagagaggcaagtatggtgaaaggattagaatcagatatgaaattgtggcatcacagacttagacatattagtgaataaggcctcaaagaattgcacaaataaggtatcattgaaaatttaaattcttgtgtcttaccattttgtgaagcttgtgttttagggaaacaacataagctgaagttcactttggcaaggcacacaactaaaaagatactcaaatatgtgcacgctgatctttagggaccatacaaggtgcctactcactccagtaagcaatactttctttcaatagttgatgattatagtcagtgtgtttggacctacttgttaactactaaggatgagtgtctggaacagtttagaaattagaaaactcaggtggaaaaccaaagcgaccttaaaattaagaaccttaggactaataatgggttggagtttgttaactttgaatttaacaagatgtgtcaagaatttggaatactagacatagaaatgtaatgaagaccccgaggcaaaatggtgttgctgaaagaataaactgaaccttgttgaacaaagttagatgtttactattcagctctggattggaaaaaccatttttgggggaagccttagcaatcgcaacctaccttttaaagatgagcccgaattgagtactagacttaaaaataccttatgaaatgtggtacaacagaacccccaacctaacgcatttaagaacatttggttgtacaacatatgtacaccaatctattgacaagctagaatatagatccatgaagggaactttcttaggttatgccttaggaaccaaggggtatagaatctatatttccaagaagggtagaccaaagattgtgattgctagagatgttattttcaatgagttagaatatcctcacttgaccttcgggaagggtagtgtgtctccatgtggtgtaggaaaaatagaaaacaaagacacaataagtgtggaaatggagtacggaataaagctcccaaaagaaggttcacgtgtggaagatagtgtggaaccggaagacaatgcacagacgaaagctgttgtggaggcaaaagaacaagataacgaagaccaaacaaaggtataggaagggtttggacagacaagtttagaaggttatcagttgactcatgataaaactcagagatagatccatcctctagcaaggttcgcggaagcagacataatagcatttgcactggcggtagtccaacaaactgaaattgaagagcccagaagttatgaagaggtaatttcaggtggaaacaagtctaaatagcttcaagccatggatgaggagtgcaaatagattctcaaggtaaaagaaaattatggagaacaagaaaattatggagtgcaaatggattctcaaggtaaaagagggaatcaatgagaatgaacctgtgatgttcaaagccaagttaatggctaagagtcttactcaggggttttactcaggtggaaggtatagactatactaaaatcttttcacctgtggtaaagtataaaataataaggttgatattttctttatctgctcaaatagagttcgaggttgaataacttgatgtcatgactgtctttttgaatggattcttagatgaagagatctacatgaagcaaccacctggattttaggtggaagggaaaggagttaaattagtgtcaagcttaacaaatccctctatggtttgaaacaatccccaaggaaatggaataagagattcgatatgtatatgcattaaatcgggttcaaacgatccacgtactatcactacttatatttcaagaatttggagcaatctacggccgtgttctttttactctatgtggatgatatgctcatcatgagcagagataaatccgtgatcaaaagtatcaaagccaagctcaaaagagaatttgagatgaaaagacttcaaccagtatatattttggtgttaatttctttaatttttgcatttattatattttggttttcattactctgtttgtccttattttcatccgattgttgcttttaatttgataattttatcattgctaatcgtttgattgtttaaaattttgacattttgattttccactttagtcataattttcccatatatatatatgatagtgtatagtattatttgagatattttacaaaattttaaaaaacttaaaataatttagggacttttttatttttacacttcaaaaacagttttttttttttttttgtatttttatggaattctacatagaaacacatattgcaactagcgctgcaattta

SEQ ID NO: 29998 - DNA, 3161 bp, Cannabis sativa
ctaaactatatattttctaaatagaggtaatcaaacaaatggcattacgaaataattatttgaccaatgatgaattttgaaccacttaatagatttagaattggaaaggtgtggtatacttatttcctataaatggaaagatttagtggaaagttaatttgaagtcgtctagaagtctaacttcaccactttagatgctagtggttctttccaaaaagagttctggaaggctagttcttttctcttaaaagaaatttcgaatagtctaatctaattgattttgtatctgtctagaacatctttttaaggacatgcttcatctttttaagatttctgtctagggaggatgcttcacatttggagagatctatccaaagctaatgaggagattttattacaatgagtttgttaagcctattatgtcataattcacttaacaatttagttgttgcagccattgactttgggagtcatatcctaaatctacaaatatcaccatcctaatctttagaagaaataaaatacagaagataattttgagattgagattaagaaatatagaggtatagagaaaaaaaaaaagattggattttggtgtttgtatgaaaaagtttcttgggtaaaagtgtgagagataaacacttttatagaatcctaacaaagaatcattctcaattgtattgtactcttgttctttctcaatcaataaagactattatgtggaatttcaaaattggagtagagtcgtaaatcacatcaatttataggacttgaaccattataattactgttgttgtttttattttcattaatctgctctactctattttatcttcgatttttgaaatacgattttgttaattttgttatcgctaattgtttgttgatatattttaagttgaaatttattagaattttataagtttgtggttaaagtacattaagtttccatttcaattaactaatttacaatgaactgtattattttttttcacatattaactgtttctaatgaatttataggaaatataattcttacgtaaaacccatcatatccatctttcgagatacattttagaagtgagttatcataataaatttccattataaaatctgtgcttttccaaactctaaacacagaagaaattttgagattgagttttggaaaaaatactgtatttttgtaagataatacacactagctaataatggaatgctaatctttaaattctattccttggtgtttccaaactctaaacagtaaacacatatgaactggcacatatatatgtaattttgtttagaaaaacaaaaaacaattgaaaaaaattaaatggactcaaaatatggactttggagtttggcccaaatgagtccaactgtagatgtccaatttgaaagttgggccactatgacctaatctggactttttgggcttactttcttaaaagtttttgagtgtcatttctcattagttcacaactttctcatcaagttttatagcctcttaagttcttgaaaaacaaaatattcatttattaaggcaaacatattaagtgaaccatatttgtcaaacatgtttccccatttttttgatttcttatctttacagcctttgttggttcattgtatattgtttatcgatgtacgttttaacaaatttgaatatattcttttggcaaattttggtacttccttgtgtgcaacccaatagtttgaatatattaatttcttctcctgtttttgatgaaaaaatgagttttccaaatttatttaaacttaaaaaaaaaaaaaaaagtatctatgagctgagccacaagaacattttccccatctttttcatgtgttccaccaaaatatgtaagttctagaagatgatgaccaagaagctagctagggctttataatagaaaatgacaatgacaatgacatgtgaacaaaacatttcatgcaaagatggttggtttggttactttatttaattcaatttatgaatttcactgctaatttatttatttatgactgatgaatgatgatcataaattttgtcttcaaccaatgtcatagtaattaagtaaccattttaccacaactacaatttgccatcctcataaatttctctagcacagcagtccaccactgccattctcttcatatttactttataccaataaatatttagtgacatattatattaaataataaattatattacattaagattaaggaatatattattttaatcattaagatctaaatttttaatataatataagttatattatttagtccgtacttaaccctaaattcaatattaaattgaaccaaatattacaacataaaaaccctctttaacatttctcataagtataactaaattgtttataacatattgcaccttcaagtaaattattgtcattcccgaaatttttgttaccaattcatttatgtaatttgtaaatattttttggtgtcataaacgatgcaaaatgtaaatatttattatttagttttccaaaaacatttttgcatgaaatcactcttcctttatgcattagtatctgaaataaacccatgttattgttaaatgtattaatttttacaacttttgaatcttattattgtgtctgtctgttctacaagagatgtaatatcattttagttatgtatgaaatttagcataatatataaagatctttagcgaaaaaaaaataaattaattaataatatctgacagctaaatcttagcaattacagctaatcaattccctttatataaaaaaaaaaaaaatccctttataaacgacacccaaccttaaataaataaaaaaaaacagccacaaaataagaaaatatcgtttttaaatataaaataaaattaattatcagaccaaacacaaaatcacttgtacggcaaaactgggttgtattgtaataaaaaacaaccaaaaacactcttccattaataatttgttttttttaaaaaaaaaaaccaacaaatcaaatttaaaaatggtttctttttcttacagccacaaaaaagaatagttagacacgtaggccttaacccaactaacaccctagcctagccgagccgagccgagcttatctgtgagctgtaaccaacgtttctatgaacctcaagccgtcgaccctaggcg

SEQ ID NO: 29999 - DNA, 2619 bp, Cannabis sativa
ttttcttatggttaaatagaatttttgttcgcttaactttgaaatgtatcatattatgttcttaaattattcgtgttattaaaaatttctcagaacaattaaaattattggatttaaagatttttatctaatttcattcaatgttgttagtgttacgattgttcgtgtactaaatcgtgtccaactttaatatgtattgaattacgtctctaaattttcattcacgtgagactttctttagtaaaattagactaaaattcttaaatccaacaatctcaataattcgagaagaaattttttgatttggtacatgtcaaagtttggagtacaaaaatctaaattaacctttttttttatgggtataactaaattaatctttaaataaaaaataaaaatattatgacctgaaccaattaaatattatcacgtgatcattgacttaacgcttaacaatcaattatttatggaagttttaaaaatacaacttaaatattattaattacttaattttggttttaagttaataactgtatttatttgatttgatttattatagtgtaattattaaaaattaattaaatattaagtttcttattattaaattgattagcattctaaacggtaattgccattgctgttgctgtctcatctcaaattttattatattttatttaaatatttatttatttataaatataataccttacaaaaatatatattaattaattaaaaaaacaaacaactgtttagagcaagatcaggttcggaaatcagaaccgccagttatgattataatttatttatttttaacttattaggttttatttttattttttgaaaaaatattaggttttatttcaattcaataaataccaacataatttagataagaaaaataaataaataccaacatttttttttttgacagagaaaatatcatgattaaatgttggtatttaagtacttttgaaaaacaaataattggtatttaatactaataattagattggaaagtatttttattgttggaaaaaaaaatataacctctgctattattttaaattgagtatatacggggtcggtcctaggcctaaaacgaattgaattttggacactcaaaaatatatataaaaaaaatatcaaaaaagagtgttatggatttgaacttatgaccttaaataatatgtcatccacctcaaccaactaaattatgaatatttattgtttataatacacttaaattttacttaaataagagcataataaatttttttattttttttattttgggactccgaaaaatgtggatcttaggtacgggcttagcctgcctatacctaaggccgaccctgagtatatataaaacttagattttatattattgggtttaaatagaaatataatattaattacttttaaattcatcttgtaataaaataaaaaattatactgaaaaataattttgtgctcatgatttctacttcaacaacattttcacttttaacaaataagtattttaagtttttttaagtctttatatttaaaataggttggtttactatcattctttcacattactttttttttccattgtattgtgtggtaatagagttttattttctgatattttgtaggttgttttgtggaggacctacaattacagaaaatttaccaataagtttttaaatatagtctgtttgatattaatctttagcagttttaaattagggtgttagtatgttattactagccaaagggtaatacctttagttagttatacttagaaattttattagttttttagtaacgttgagctagttatatgagttgtgtgttaaaaatctaagtttgtatattaatttttattttgaagattgtcattataatatatctgtgttttttggtttagtgttgcgatattttttcaatttcgctagctctgacaacaactattaatagtagaaaagtattttttttaatgtgatggggtgttgtttgaagatgttatagctttattgtctaaatttttggggccagttttgtctcatgtggctcgcgatgagaattctgcagcttatggtttggtaaaacatgcccttcggttagacgatgagctatcctagttcgaggaggttccaccgatgattgtggtttactgtattgttaatcatgtgtgactctgttcaccacgtcaaaaaaataatactattttagcattaaattttttttccaattccaactataaattgcactaaaaagtattttttattatattattttatttaattatttagcactaatcttcttccaattccaacccaaaagatattatataattattaagaagtaaaaaaaaaaaaatgtccgtggtctatagtgccactcttattagtgggacacttgtagactcctataaaaatatgattagattcaatttgagtattttgtagaaaaaattatattatacatagaattttgccacttgataggagatggccttatgcaactatctatcatatttataaggctaattatgatttttttttctcccgaattttgacatgtaccaaatcatgccccctgaacttttttggtcgttaaaaattccctctaaactat

SEQ ID NO: 30000 - DNA, 2506 bp, Cannabis sativa
gaaaactataaatgtaaggaactaagcttaaaagaagataagaaaagattatttgccacaaagatatcagtgaaacatctttggccaatgacatgtggaggcttggaagtaaccaacttccttaaaggaatgttctcaaccttagacctgatccagccatctccaccaaataggagccatgtgccttgtgcacgcaacttgtccaccaactctaagtggctggggtttgaatcactagtattagcctccttcagagaaatttcaattggagaagtaggagacttctcgttgacctcaataacttttgacttccctttgctagaatcttggacaggaggattagctttagtcataattactttgtctcttttcctaaacttcttctttggaggagcacaagaagcagcagggataacttgcatgactttcctaattgaaggttcatcctccttcggtacagttgtctttctctttgaatagtttgccatacaagcaaggaaactcatgttgtttgcagaaaggaaaaagcaagtggtaggtacaacagaaaaaaaaaaatgaaaaacaagatcatatgttatgactgcagcaaatagagcatcaacgacctattgattccccaattttctctgacaaactactaccagagttaacttctttgtcacctcattcaagaaacacaattaatatccctaaatagtttggatcattttgaatggaatcctccccttcagagatgttcttatcttctaacatcactctaaatccaatgacagcttcactttgtccgtcttcttcatctttaagaggcatagtccaagagttatcagcaaagtgagcatccaaataaacttgctgacatgtcattatcaatccaaatttgtaaagattttcagtggtaaataaattactcccatctctctcccatgttttaatgtcattgagcgtgtcatctactctccttttcatgttaatcagcggagcatgtctcttgaatggatgagccttctggaaggtaatatgcctcaaatgaagaaccgaggtatagaagtattcctaatggtagaggctgcaattactgttagttacattctcaatgtatgaattgaagtgatggaagtgatacaacccttcctcttttcaagtggacttctcttcagataacataggaagttgatctcgtgaggagtgggaataggccaattcctaagacgatagaagatgaagaaggtcaaaaaaatcttgtagccattcaaatttatttggtagggacaaactccaaaataatccacaattgagataaaccacgggtgtaaaggcaagcaagtacccacgtttatatggaaccacaaccaagtgctacaacacgaatactaaaaaccattaggacatccaagttgaggttttcaaacaacaatttgaggaagaagatagtcatttgatcaactcgacttgatgttcgaatatagtacaaaataagaggtcttaacttgaatgcttgatctctcgaatcatcactctcaatggcaaccatatggagtttggtttccatctctttcccacaacccgtgttgtctaaatttttggacttgagcgttgtgagcttagctttaatgaattaagccacatgtggatcatattcatcaagtattctttgagttctcttcatatgaggcaggacagcttcaaatctcaacttaattcaacttagaacaagtaaatcacaactcaaatcagctcctttcaactttattaagacaatatcaagattattgcaccttaccagaaaggagaattttagctcaaacgactaacaacaaaatcatatatttgatttttggaggtcttatcaatggagtttaagaatttccaatcaaccctagaatccttaaaccaagctctataggatgggagtaagaaaaaagaaattgaaaagaatattttctacctaaagatttgatttgaagaacattcaaagaattgatgaagttggaacactcagagctctcagagaagcttgggacgtgtgaaacaagaaaggaagtggagagaaaatgaatgaagagctctcttatttatagtgatacatgtcccctattcgtaaagcaattagaagtgttttaaatttttattttaaaaggaaaagatcaaagataagtaaaaaaatgatgcacatcttttctcttctccttttctacttaaaattttgaattcctcattagaagaggaatataaatttgaaatctaaaaggacacccaaattcctaatggatttaggattcaagcaaattctatgtttgaaagaaaaagataaatgacaagggaaagatggctcacttttctcttttccttatacaaataaaatttcaaattatttatccttaaaaagagtggaattcaaaatcctaatcctattaggaatgcttgaagaatagaaccaattgcttaagattgctaaaattgatgcccacctagtagttttgagagaaacgggcttagttcacgt

SEQ ID NO: 30001 - DNA, 2225 bp, Cannabis sativa
atagtttttccaagtgcaactcgtttgcgtcagcatttcgttcagtgtaaacacatttttcttagtactttttaaaaatgccctagtaaagtttttttgtcacggcaataatataatgcgcttgtaaaatttgagaaatatgttttttggacttttgccaacgcttaaacatgcgagtaaaagttataaacacgccggtaaaagctttatgagattagaaaaataattttaataatatttttagattttatttttaaaattttgtaattttttataattatttcacatgatttttgttataatattaataaaatatataaattttggtaatatctatttaattacttaattaaatattttgatttatattttaaattattatttataattattttctaattcattcactattcattttcataaacataattaacaatttaaatagaaatattgatcaattaaataagactaataaggatttgtattaaatcatgtcccctgaactttgacatatactaaatcatgcattatgaaggctaatctctcgagctttgacataattagccacctcttgaaggctagccatactcttctcgaaagcaccaatattttcgttcaagtcagccacctaatcttctacgacaatggcacactcctctacagctgagagcttttcaacaagctcaaccaccatcttgtgttcgttatccatggtgtaagcataaccaacacaagcctgaaaataggaagacaaagttaggtgagatgataaataaaagaaagctagttcaagagaagacaagaaaaattattaccccgaagatatcagtgaagcatctttgagaaaatacgtgtgtaggtttggagctaaccaacttctgtaatggaatgttcttagccttagatccaatcaaggcatcaccattgaaaagaaactagaagccctacgcacgaaccatgctccaccaggtctgaaccagagtttggaacaccattatcaacttcatctggagagatctcaatgggagatccctcattagctccaacaactctatacttcttcttgttagggtcttgggcagggggaacaactttatcaattttacttctcttccaaagtttgttcttcacaagagtagaagaaacagctaggataccctaaacaacctccctgactggaggttcaatctcctttggtagagtaacttttctcttcaaacaggtgtccatggcagcgaagaaactcatgttatctatagaaaagaaatggcaagtggttagtacaacagaagaaaagcaagataacaaggtataactaccgaacatgaagcatcggcaaattgttgattccctaactctttctggaatagattgagtagaagtaacttctttatcatcccggtctaaaaacaaagatattctccctgaatattttgagtcattttgaatagaattctcatcttctgacactgtcctagacaagatgacagttacactctgaccatcttcttcgagaggcatcgtccaagagtcatcaaaaaagcgagtgtctacataaacttgttgacaagacattatcaagccaactttgcagagatttttagtggtaaacaaaaattaaaatttttgcgttgcgagtctttcatgatactcttccaattgccacatctcttgttcgaagaaaggttattactgatttcaattgctcaatttgtcaacaggcttggacatgtgctccaatgttttaagttgagataatagaaacaacgtagttgagataatagagacattatatgttttaagttgctctaagacatatggacatgcactttttggttgtaaatacgcccgggctatgtggcgtttatcttaactatgttttgacggatatgcttcttcttctatgaacatgagagattatcttgtttacctatcgacaatgcattcgaaagctgagatggagctgattttttttacactttggtgcatgtggactgaacgaaatcgtgtggtccatggacaaattaacgaactaattgccagccaacttgcctctttcgcggaaaattatttgtctaactacagatctgctcaagccaagtatcacccaccagtttattttgccctagagcctctaaactctcatgctatctctgttttgtggaagccacctgattcggggaatctgaaactaaatgttaatgcggctttggatgctcagagaa

SEQ ID NO: 30002 - DNA, 2093 bp, Cannabis sativa
cccttcaaaggggcaacacagaatcctggcttcattaaaccagaaatacagccatgagtatgttggatacgcgaactgttactgtagaaacttggtgctcaaactctgctcgatactcaaattaaaagaatgttgtccccaccccatgtgaaacagccatttcaaccaaacatagtgtaatttcaaacatgttttagactgtgcattattatgccttggcaatttgagtaactgggttagaaaattaaaatttaataccaaaaaaatgattagtatacacataaacacactatctagtaaatatttaccactgagagacttcattagtctgcaaattccaacctggcgagctagaagcagcttcactcaaagcagctctccatttactaatcttgttctccacactagagttagaatccattgcaaaccgctcttggtggctagcaaaagccttggcaaagcttcccgtctgatgaaaaacgtcatctgggctaacatcacagaacaccgggatcacgatctgaccgtccacgtgtttgcactcgatgatcttgaccagctcatcaagacaccacccagaagtggcgtagttactggagaaaacgacgaccgcgattcttgaggcttggatggctttgagaagctctgaagcgatctccctgcccttctcgagattaatgtcgtctttgaaggtggggatgttggcctcggttaaagcctggtggaggtctttggtaaggccgtggcgggtgtcttcgcctctgaaactcaagaacacgtcgtgcctcaggtgggttacggctgaccagaacgaaaacgacgacgtagtgcaaatcccatcaccagaggaggaagacgagtccatacagtagttgggttgttggtttgatttggtaaagatgtgtcatttactaccatcattacatttgtaaatattctacatttagacttcaaaatcttcaatacgacaaataatagttacgttgaaaagataactaccatcattacatttgtaaatattctctatttagaattaaattaattataatctaaattaaattaatttttttttttctaaaaaaaaacaactaaaattaatttttttttttttgagaataatcaaagctattataatagacaatgaacatgagtaatgagatccgaaaaacaagatagatcaactgaatttgaattcagtgctgcagatactctcaaagcatctgtctcaatgtgcgtaattggaagttgtaattgcgaagcccaattgagagcatggaaaagaacttttgcttccatttcgtctgatcgaaaactaccttgtgccatttttgaaagggcagcaatgaccataccattatgatctcgcagtacagctccaactcctagttttttatcttcagaacttgttgcagcatccacatttagtttatactcattaacacaaggtggagaccatggaacctccttctgcaatctggtgtggcagggtggctaactatccattgtaggagacgaaatagcaacagtatcactggtttttgcactggttttggcacggctaaaatcttggtggaatccagtaacataggccacgattgatgagttcagtctagctttaccaccatgaaaaattttgtttctatcagtccatattccccacatcagatatataattaattcgaaatctgtttgattgaaaacagaagacaaaaactccaggtaatcaccattggtcatattttgagcttgactaaaatccaatgagaacttcgattccttccaaatacttctagcatgcttgcatccaaagagggcatgtcctattgattcccaacttgaagtgcaaagtgaacaagctgcagaatcaataatttttttcttgaaaatggcagctgcaactggtaacacattgttaagaactttccaagcaaaaatccttatttttggaggcaaattcaagtcccaaaagaatttccaccagccacgattagcatcagaagtagatgagtcattttgttcctccaaggcagtagctagatgaaaaccagatttaacattgtaaatcccaaaggaagagtgatgccatataagtc

SEQ ID NO: 30003 - DNA, 4479 bp, Cannabis sativa
  modified_base (3328)..(3329): a, c, t, g, unknown or other
  modified_base (3776)..(3776): a, c, t, g, unknown or other
cattcggttcaccattctttgataagtagcaccagtattttttaatccgaagggtataaccaagtaacagtatacccccttgttggtcctgaagctagtacattcttgatctgcgacatgcatcttgatctggttgtatccagagtaggcgtccataaaggacaacaacttgaatcctgaggtggcgtccaccattttgtcaattcgaggtaaagggaagcaatcttttgggcaggccttgttgagatcagtgaagtctatacaaacacgccatgtcccattcggtttgggtaccaataccggattagccagccattccggatgaggccattggttaacagcttatctacctctttctctaaggcgtctgcttttaccggatcaagaggacgtcgcttttgctataccggaggcatgtctgggttaacatttaagacatgggtgatcacatgggggcttatgtcgatcatatcccccctagcactacgcaaaaacatctgtggctgcctttaatgttttgataatcttacttctttcatctggctctagattttttcctagacggatgaccttggtggaatcgaggtcgcacacatttacttcctcagtgtcctccataggttctacaactgtttcggatcccacgcggggatccaactcatcttgttctgtcaatcttggttcctcatccctgtgcaccaccagcaccgataagtgcattgcgtggttgtagcattgccttgtctctccttggtttcccctcaccgtccccactccggcttcccaagcagggaatttgaggcataagtgtcggatggaggtgattgctctgaaatcaaccaaggatggtgttgtacgctattgggcaatccactactacgaaggtgcagtatttgaaagtgctctgtggggtgtagggcagagggtgacaggaattcgcactttccccattgggataagtgttgtcctgttaaatcctgtgagctggagcctctgggtgatagatccctgtccgtgaggcctatggctgtgaagtcttctttgaacaataatttcacggagctcccattatctactaatattcttggcacaactttattggcgatgggagtctctatgaccagaggatcatggtgagggaaacgcaccagttttgcatcgtcttctatgaaggtaatgggttggtccatgagctggggcctttgtgctgggagttgagtgacttcccatacttcatcatgttttatggccccaacataacactttagctcgtttctggtggttcctccgatatgggacccaccggagatcatggccattctcccatttggtcttggtggcaatccaggtgcctgctgagggagtgctcctccggggggtacactgggcgcttgttctctgggcctaccccctggtgctccctgaggtaaagggcctcctactaaagttgggttaagatgggataatcgactcttgatccattcatacaaatgacctaatcagattaggttctcaattttgtcttttaggttcttacattcattggtactatggccaatgtcgttgtgatattcacaccttttgttgggatccctccaggaactatccctatacaggggaggaggtttctagtaatgtgtatttttcttggtggcaaagtatacacgctcctgcgtgtctgtaagctccgtgtattgagtgtactgaggggtgtatccccacgctgtcgtttttcctcagtctgggtgctgtcctttcaggacctcttgctctgagagctttgaggaggtccagtcaggctggtgacaggtgcggattgagacggggcttggacactcatccccgagggattgcccatgcgggtcccaaagtgtgataatgcgggagtcagggcgaggctttgattatatcctagggtagcggagaattgtatgccgctcatttgaggagtggccggaggcagggctcctgggagttgagctctgggtacacggtatcctccgtaagccactatttgggcttcttccaagttgatatacttttggacccttttctggaaatcttggagattagctgctccctcttgttgtagttcattccaaaaatgagtccccgtgcagatcccagcttggaggagggccatctgttgtccgtcgtccaccttcttggtccttgaagcctcttctttgaatctttttataaagttctttagagtttccgcatgcaattgttttatattagtcagggcgctaacttcaaggttaatttttctcgccacgacaaactacctccgaaagctaacttgtagcttgttccagcagtccactgaccctggttccaacttcttgaaccattcttcagcggaaccgctcagtgttagtggaaagcaaaaacactttgcgtcattgctgaccctcatgacagtcattacccgattgaaccgggacaaatggtcactagggtccgaatctctggtgtaagttgccatctcgggcatctcaaagttcttggggagctctgcatctagtatgtgccgagcgcatggttcccgatcctcgcaatcagaatccgagtcatcccctttttgtctccgggagaccctagcaatgtctttgcgtagtcttgataactcagctaggattccttcattcaacgtggccccgaaaactggcagtgcgtgtttcttcttgtcaagatggtctcgtaagtcaccatgcttttcattgatttttttgtcttaggtcagctggagggtacctccagtttttcctccctctctccccgggttgttggtgcatggatacgctctttcggtcctcccgatcctgagggccaagactcgctcgagggagctttcccctctgcggacctttccctttcgggaaatctgagcggactttttgtggatcttgcacctttttctttctccctaggattgaagttggatttttcttagggttttcctcggaagggtatcgtatagggcttggttccctggtcttgggtttctgagtacttggtgaggattctttcggtgtttcctcgggtcccgctgagatggccttgggatgtatatgtatccctgtcgtttccatggatttttgcatggcaaccatcacctcttgcatcctattattctgttccttttgagctgcaagtttggcttcatgattagctgccttttgcctcaagaccagtagttctgtatagctttcttcgtcataggtgtcatacccttcgaagttttcctcgtattcctcatcgtttgcctcatctcgctcctcagaacccacatttactcgcgaggccacttcttcgccttctgggnnttgagcatcctgaggaggacggggctgacgtgtattgttacgagtttctaccattgttactctgactttttttttttactgttgtcttttagacgatgcttccttcaactctcaatgaaagcaccaaaatattgaccgagattttcggcaaccaattaaatgaaagaatgagaagagctagggaagctttaatacaggtgatttttacgtggttcaggcattgacgagttttagtccacgagtctttgttatttatgagagtgtttgtacaaagaattttctcggtgaatctctctctctctctctcttatttactcccttcgattccttatttgatcaatcgaccccttttacattctatgtttggggtatttatagtgttttttcgagagaatccttagaaggggatcacttatctttaagtgttagcctcttaggggcacaaantcctagcagatacaaaataggaaatacatgacctatgtcgtaggtatcttagggattaggtgaatataatcttttatccttccttgattgatgtgagtcttcataatggagtcgtcactaaattcgtcgattatggtgtaatcgccgtaaaagaggcttacaccatctgtcaaatcctcttatggaggtattctgatacgtttcctccatgcagcattaaatgcgaaatgactgttcgaacgatctctttccctcccggagatgcattgttacatttccagcctctcggagagtaaatgcgtgttttatgctcctctccgggaggctcactccgtgagatgcacttctttgtctatgacttaaccaatttttgtgagtgggtgttctttgagatctatgtgtcgcacgcagcagctgccccgtattttggaaaaaatctgaggcaacagaatttttaattatttttttttatttgtatgagtttataaatataaataagtttgttttttctcaaaaaatattagttcatttagattatttattagattctcaataattttggtttgattttttaagataggtgttgatagataaaatttaatttgaaaatatttttttaagtaaaattaatattttttaattaatttaagattttatctaatttttaaaaaattttattattttttttgaattaatagaatat

SEQ ID NO: 30004 - DNA, 1821 bp, Cannabis sativa
taaattattattaaattaaattaaataaactgaaaaaaataatcattagatttttggcgtcggttgttatggatgtatatggcgtcagttattggctagaaactgacgccatatacacccccttggcttcggtgcctaacaaataatcgacgccatatgtatccctatagcgttggttattttagaccccacaacatcacccggattagcgtcggtagcgaattttgccaaaatcaacactgaaaggccttaaaaatcgtctttaaagggtgtttttgtagtagtgggtcctcaccatccaacgaagctgtctgcacagggtgacgtggtgcttatttgggtgacatgtgaagcatttatagacctggaaagaaggaacctttatcggtctgtcgtctagagtggattatccatcatatactgctcatttgagaataaagtaaatgcgacagagaaagctttaaagatactttcctcttttttttttttcaattaaattcctattttaatggggtttctacacgtaaatagtgtaatttagtaaagtaactagtcttcatttttagtcttttgtttttgggaaacctaatattagtaattcttctctataaataatggagtcattttactattcggggatcacactttcaagagagctcttatgcggtaaaaattataagctttcgagagtcaagaactttttgcctctcttctaagaagtaatacaagtaaatggggagtaggctattaccactatgatggaactgaacctctataactctcggtgttctttttgcttaatttcatataattattattcataattatttatttttctaatcactttaattgattcagcatggttgattaaaaatgaggtcaatatttatttatatagcttacgttgcaatggtttattgggtggtaatctgagacgcgagtaggcttggcaaatcaaggtcttgttgatggtattacagtccatgtggtgcttaagattaagaacatgtatacagacctgagtaacatgatcatgaccgacggtatcctaatgatgctcatagaaaaagcgaggaaggttgtctatacccgggcgctcaattgcactaatttgagacaaaattcaaagaagtagacacatgcatcttgatcttgggctgtaaaatcttttaggagctgctcgttctgataacggctaagtctgaaggggacaaaatgctgggaggcagtggtgagcttggattgattgccattggatgagaaaaggatctgaagatgcttgccaatcagtttttcatgatctggtaatgctaccagatttaattgagtgtatgtatatatagtctatagatagagatgaataataaataaatgtaataatcacaaaatggaaagtggttctacacattacaatgacatgtgtatgatatatgatggatatatatatatatatttttatttatttaagaaaatgatggacatcttttcttttattatttgaagaaaatgatggatatgtacatacatttataaattaatttaaggattttatcctaagattatatgtggctaataaaaagttaataactttgtcaagtcaaaaaagcaaagattaatcaatcgtatcaaaagacctgcccaataaatattttatgccccgtgttggttacctttttgacaatgattaaccaaccggctgagacccaacaaatattggggataactatttaattaagtttcaactgttttatcttctttcctaaatgatattatcttctaacaaatgtaattaattaatataattaatatgaatatacagtt

SEQ ID NO: 30005 - DNA, 1591 bp, Cannabis sativa
taaaaagttcttgatttttttggaatgcttttatagagatttgagcagcttgagtgctccgctgaatgaataatttctcatacttgaatagtgaaatgactccactattatatgaaataattacattaatttagtttctcaaaacaagtcgaaaatagaaggagaaacaacatattttcccacaaaacaataatcatgtgtaaaaatctcataaaaatagggatttaattgataaacaaaagagaaaggtatttttaaggcatttactgtcgcattcatcctagacagcatatgcgaagtgcctgcgaggtggatactggttggacgttataacatacattgtctggatttttcagcctcttctttaaatcagttatttacgaatgacatattactttggacggtatgttatagagcgtacgatctatccaagtcatgaaatattctcctcgtgtcactcagatagatgccacgtcaccctgtacaatagttgagacaacaattataattaattattatcttcaaataattcatttttaatttaaatatttatcaagactcctttagtaattgatattcataaataattttatttttatctacaagtctctagtgtaatttgtttaacagttaaactttaattataatatttacaataaaacttaattttgtttacaaaaattagacttcgacatatatcttaatttaaaagtgaagatgaataacaaaaaaaaatacttttcatttaaactaaatccacatatatcttaactgagatgggcggagggaggagaactctaagaaatccatttctcattcaacccatttttttctgtaaaaaatgcgttgaactcatttcgcacttcatcacatgattctaaataaattttatttttttctaaatagaaaaactacataatttagtgtaataattttcaattaagattatatgtgcaataaaattttaaattatgaggttatatgtgataatttaaaattataagagattttgctataaatattttaaaaatttaagtgcaaaaaaattaattgctaaatgatgattgttttttagtaacaaattgtaaataattaattttattttaaaataaaattaatcttaattaaaattttataaagaaataaagtattaggttatgatcatgttataagttatttattatttatttttattgaatttctaaattaatcacaaccatttaaatgtgatctaatgactaagaataaatataagcatcatggttacaattcgatgtaaccattgaagcttcctctatatatataaatatagataaaaagtgtattcttaatgaatattacctattgctaggtattatttttcgatcggttgaagaaataaaaaaaaaaatagagtacttacatattttttatataaatatatttttgatacagtttaaaaaaagatattttttttatatatatatttgaattaactagttaaataaagtatagaaactaaaatttcaattttgttattcgtacatataaatctagtaatttaatatttttaaaattaatatttatagtattaaatttgacttatagatat

SEQ ID NO: 30006 - DNA, 2491 bp, Cannabis sativa
  modified_base (228)..(228): a, c, t, g, unknown or other
tttggatagtgatgccattgacattctctattgagttactctccacttgtgaaggcatagagtttgaacattgaatttcatactcactcatagatgtatccattgactccgtaagattctttgacttttgcagagattgttgaaggctctacatagtttcatgacaggtttgctgaaactgtaaggaattagctactaacatttcaatcagctcagcagtagttggcntttcactatatggtgcaacatgagtaggttgttgaaattgtgcacaactctgttgcatccgagtagtagaagactccaaagtgttgagcagatcaataagagaatgatcttgatcttgtggtgctacatgaggatagtaagaagttagttgaacatattgattgatcccactataggaagtgctagaataattttcccattgttgattgtatgtgtaagtgtcgtagtacatctgcaaattcatagccatcaaaagctacatcaacttctctttcgcttatgtctctactcatcttggtccttagtgcattacactcatccataaagtatccttccttgtggcaatagtagcatttctttctaatcttgaacttaaacttcgaagtaggcatgtgcccacctttgttctagtgatcttttgactctcttttatctgatcttcccctagtgaacaacccttcacaacttgattcaactctgccttcaaacttcttttgaatctctttgaaatttaaggtagactttccttatgacatggttaaagagtcattttcatacaatatagtgtcagtaaaatgctcaaatgattttagaaaagagctcaaaaggataattatttgatgttcctcatcaattttgacacttgtatgtttagctgtaggattatcttgttgaatttgtccatatgcctccttagttcttttgattcacccattctcatggtgtacaatttctttttccgatacagtttgttggccaaagatttctttagataaatatttgccaaattgtcccaaagtcctatgtcagtctcttcatctgaaacttcgcgcaagacttcatctcccaagcccaacaagattacactgagatctgatatgtatctctttttctttcttctaatctttaatttttcccaaggcgtttgcatcaatggcctccgagataccttggtggactaagagagctttcatcttgatcctcgatagcccaaaattattttcccttgtgagtttgtccacattgtatttagctagagccattcttgaatctttgagtcttttctcgaacagttattgaccacttaagctttaccaagctctgataccatttgttgcgaattaatacctcattaagaacaacataacaataaattcaatcaatagttgtacacagtgatgataactaattaattagaaattaaattcaccacactcaagagacttgctcttttacaaatcagcttacttgagagaagttatttcgagagtaaacaatctttttaacatccctcaaagaacctacaatctcaaatttgtaatctaataatgttgatcctaaaactatctctcttgaactctctaatttgtagttgttaatttaaaagaatgagaagagctttatttatacaactcggtttagggctttagttgtaacagaattaaggtgagttggtcgagcttagacaaaaaattgactattaaagtggtgaaagtaacaacatatattttattgaatgagttataataactcaaatttatctaatttgatgggagtgctcttatccttcaaacttatttgattaagtttcttattatttgctctgctgagaattatggggttccatctcaaaaccaattggtgatgagtggaatagctcatgttcttatatatggctcaatatttttacatttgatctatgtgggacaatattatccaatatgctcattctttatttctcttcctcttttatcttattttaattaaataaataattaaaatgtagtataaaagcatggctattaagcacttagtgcttgacaccactatgtaatgacactattgaactgcaccaataacaatattacacttcacaagtgtactaaataccatgagtactctttaacattttttttaaaattatatatgacctaatatttaatttcatttataacgatattatattttagagagtgttagacattattaatatttgtatgtaatatatgaggtaaaataaaatatatatatatatattttttaaaaaaaagtagagaatttgttgagtaggattttttttttttttggtaataacacaacatttatttaggtgtagtgtagggtataccttctccatattccactagttactttttcatgggagaagtcggatatgctattttactttctcttcaggtaaacggatatgctcctctcctctcctggaaaattcatacagtaattcttttggggtgaaaaaaaa

SEQ ID NO: 30007 - DNA, 1577 bp, Cannabis sativa
ctttgttaaacataaaaggtaatcaatccaggattaaaggatgtcgggcatctatatgtcttgacaaaaataaagtcaggattaaaagccacctggctagctatatgtctcaaatattgtgatctttttggtcgtttaaaaaataaagggatagaaaaaaaaataataagagctttaaagctctggcacatcaaaaagagtttgcatgttcatgttgtcactgacctagtcttgggcgacaggatcaaaaggtacctcgatagggggtccactagagtaatgggctgattagccgcattgataacttggccaatagcattagtaggctggctggtggtatcttaggtggaggtattctccccaagtggtttggatgcctccatttcctgaccttgggctatcatcccttcaagcaagccaggcttcatatagtagtaatcacccacagggttctgtttccagaactcatagaaagtttcgatggctaagttgtcatactcttccttttccgcagtccgggtcctctctaattttgccagctttgcctcagactcctccttgagtctggtgatctcctcatatcgaccagctaacattcgacccaaggcctccccctcgcctgtcaagtttctcactcgcctctcaccatcctccaagtcctcctccaacattgtagtagagagcatgccttcaattttccttttaagctcttttatctcattgttggcagtgaactactatttgttcaccttgccaagctgggcttccagctcgtcaatcttcttcttggtgacaataccaatcctcttgaggccaacataagtatgcctaaacttcaaagtcacctgaaacggtgaagaagtgaaagttagatagtgtactgcaatatacaaaaatgctcctggcagaaaaatatcaattaccaaggaaagctcctttagaatactagaggccaggattttaacggactcattgtttgactcttacagttgtttgttcgcctggaccaggcacctgtccaaatagttatggataacatcctttgccttttcagcttgggccggagtagcttcccaattgatttttttgatgctctttgctagacctcctgggagcaggaggatgtccatccaagctgaccaccatgggttggttggccggaggagcatagggaggtggaggaggaagacctaaggtagtagaactcgacccctcctttcaggcaactttggaaggggacttccacaggggcacctgtatgttttctttgatggactgccccaacttggatgcccacatgacagtcagcacctgtacaggtattaaaagtccccatttgtatggatacctttatagggacttggaggaaaatattatcccaaagtttgtacagctaacatggtccttccacgtggcatgatctagccaccttgttgacctggcagaaaactctcttggtagaaatatgcatggcagttctatataaggagtgagagccataagatgcagatgtcccatgaaacatatgattggatcatctacttgtcggccagataagatgggggcaacaccctaca

SEQ ID NO: 30008 - DNA, 1380 bp, Cannabis sativa
gttgataacaaagggtgcatcaaacttgcggattttggagcatccaagaaagttgttgagctggtatattttcattttaaagtttgattcacccaacactaattaaacatttcatatcctttaataagtttttccttttgatacaggctactattactggtgccaaatcaatgaagggtactccatattggatggctcctgaagttattctacaaacaggacatagtttgtaagttttttcatttttgagctaagataacatcgtttaatgaagtttataataggacatagtttgtaagttttttcatttttgagctaagataacattgtttgatgaagtttataactggcacttcaagctcaataaactccaaaataaggaaagaagatgaataaattttaagtctcaacgaaaaaattaattacgctcaagactactacttcaactatgttttttaaacttctcctacgtttatgctctaaataatgtgaaatttctctatgttttcttcttctccacatcgtatgattcttatctgagtatattagattctggatggagtcccttctagtctattgtattgaagcttcgtttgacagattttcattccactattcggaagatcaaatcaaagactgttgtgtgaggatatggttcctgctgagaattgagtccattcaatatgttaaactattgatttaaagtaccatcataaaagactaccatattgactagagtaacctaatactttctaaagccgttatgcctcattttcttttttgttaatgtaggtacacccaacaaagagtcattaaactaagcattataagaattaagcaatgttccatacaaatcatcgatagcaacataagtactcaacgttttaagtttgtaagcagtataaatctaatgtttattttagcggcataagtactcaatgtttgtaaaactgtaattttcctaaaatttcgtcagtatagattctgttttgaatttattaaacaatcatttgaaagtaactgatactacatgtttctgtctagatccaatgatctagacccaatagagtttgtactgacgaaattaaagaaaaattaagttttacaaacattgagtacttatgctgctaaaaataaacattgagtttattttatgtcacttacaaacttaaaattttgggtacttaagccgctatttacccttaatataataagtgtaaatactttttaaacttgctcttcacctttcaaatctgtcttctgaagtcatgaactctgaaaatgtttcagctcggccgatatttggagtgtggggtgtactatgattgagatggctacaggaaagcctccgtggagccagcagtatcaagaggtttgtat

SEQ ID NO: 30009 - DNA, 1899 bp, Cannabis sativa
gcataaaacccaacaattttgtgtatgaaattcccctgtgacaatgggagtgttgggatagttagaggtgtcacaaaagagtgcaaggagctattacaatgtctctgttcggataattttcatggtttgggaagagacacttgttgctcctagagtggaaactccagtagaagccgagactgtccaagaagattttgaagatgaactagacctaagcatggggatgaaaagagaaattgagccaatggaggacatggaagaagttggtatctgtgaaaaagaccctgccaaaactattagggtaggaagaaacctatctccggcggtgaaagaaatcattataaatactgtcaagagaaatcaagatgtgttggcatggagctattttgatatgacatgaattgacataacaccatttgccatgtcttgaacatcaacaaggatgcaatgctagttcgtcaaaagcgaagaccattaggcccggtgaaggtagaggctataaaagcataagtggataagttgacccataaacgacttcctccgggaagctctatatctcgtctggttggcaaaccctgttttggtccccaagcctaatggcacgtggtggatgtgcattgacttcacagaccccaacaaggcttgtcccaaagactgtctccctctcccgcggatagatcaaatggtacatgccacgtctggttatcaattactcaacttcatgcatgctaattctgggtacaatcagatcaagatgcacgttgccaatcaagaacacaccagcttccacacagataatggtgagtactactacaaggtgatgccattctgtctgaagaacgtcgaagcaacctataaaagaatggtcaataaaatgatcaagaaccaattagggagaaatatggaagtgtccattgatgacatgctagtgaaatctaagacacttggagaacactgtacagaccttgaggaagcctttttagttctccgaagatacaggatgaaactcaatcccaagaaatgtacattcgatgtctcctctaggaagttttgggtttcattgtcagctcccaagggattgaagcaaacccaaagaagatcaaagcattcttcaacatgccttctccccgaaagcacaaggaagtgtagagtgtcactggaaggatagctgccctcagtaggttcatatcaaagtcaacaaacaaatgcatcctattcttcaacgtgttgcaaggaaataagaggtttgaatggactgaagaatgcgaggaagccttctagaaattaaaggagcatttaactaatgcccctattttgtcaaaacttgtggaaggggatgacttgtatctttacttggcagtgttcgaacatgtcataagtgtcgtcctagtgcgagaagaaggaaaagtctaactaccagtgtactatgtcaacaaaacattattgagtgcagaatacaggtatcctttgatcgaaaaactgaccttttgcttactagtcgcctcgtgaaagctcagaccttactttgaagctcatgctataaaagtgaagaatcaccctctctgctaagtacgtcaaaagctggaggcttccgacagactgttaaaatgggcaatagagcttagccaatttgacatccaatatcagccgcgtgtatcaatcaaagggcaagccctagctgactacgtaatggaatgcgtcaggttgggtgacctcttggacaaaccagtctcagagctacccacttggaaagtgtatgttgacggagcatctaatgaaaatgggttatgggcgagaatagcaatgatctcacctgacaggttacgactctaggccgccctacgattcacatttctagcctccaacaacgaggccaaatatgaagccttgatcgctggc

SEQ ID NO: 30010 - DNA, 1292 bp, Cannabis sativa
tgatttctatgtgttgtttcaattatggaaattgcactgcttatataataagatagtaaataaattttgagtctcatataatttttaaagagtttcgctatttaattgcaaggtaacacgcttaaaatatactaaacaccactagtgtcaaataacaatgtttcttataataaaagtacatttatacacaaattaataagaaattttaacggatattaatagtgtttagaactattataaagtatcataatgttggtgtaattattatgaaaaattgttaatcatatacctttttgtaatgtgtattattattattagtgtaattgaatatattaagtccctcattttattttaataaagatgagaacaattaatcaattatataaaatatcactttatatattggtacaccatataaaaaacacttagcaattatgggcgacaactaaccttcaaattaattatattatttaatgagcgtagaaatttcacagcattgcaactaatattcttttcgatatgtgaattaatgcaaaatggccaatatttattaattaaagtaaccaaaaaataaaaacttgtccaatgaaatgaacactacaattaatactttacttataatcacacacgttaattttggaactcaatatttatgaatataatattaataaaagacgtgcaaactattatatacatgcaaaaatgtcaaatgtgcatgtgaagaaatggttacatgtaatttttcaaagagagtgtgacttttgaaaataataatatatatttttgaaaatggtaactttcattaagaataaaaccaaatagtacaagttaccatttaccatcttaaaaagtgtgaaatattatccttctaccttcctagcaacccgatcatgagcatccatatattcaacaccctaagagtatatctaatggttacattagaaaattttgataaaagaattacaaatttaatttcaaaaaccatatatgctaatatagagagagatccacactattacatatgattttgtaaagtaaatttgaatctgattcaacaattgaaatagaaaatctagtccaatctgattcaacaagtaccaggaagaaccttcttctaagcaatccagcaaccaattaatttatttttccaaaaagcttattatttctttttttcccaaacaagccacaataagccaaacaccaaaataagatcatctttatttagattctcaaaagcacaaagtataaagtctttaatatcatagtgcttattatccatatggaacttttta

SEQ ID NO: 30011 - DNA, 1324 bp, Cannabis sativa
tgagttcaacaaccgtgtgctgatcctgggagatttgagctgctggtgtgggtattgttggttcaacaacagtgtgctgatcctgggattgtgctactggtgaagtaggagaagtagtttggagggagggtggatttggggcatgatcgagtgttgcaggagcaacagattgctgtagtgagtttattatattggttttgggggctgttgctggtgtaacaagttgttggcagggaagaattacttgagaaaaaatatggtcaatctcagttaatggtatggtagagagtaatgggaatatattttcatgaaatgtaacatctctagatgtgtatatttgatgagattcaatatcaagtagaagataggctttcatgccggttggatagccaataaaaatagaggcacgactcctaggtgaaaatttgtggcgtttagaacttaaggttgaaccataagctagacatccgaatgatctaaggtgatcataaataggtggtttttgatataatgtttcaaaggatgtactgtgatgaagtaacacggaaggtgtacggttcattaagtaagtagccgtggcaattaggtaaggccaataaaccaatggaaggtgagattggaattctaatgcacgagcaacatttagaatatgctggtgttttcgctcaacaacggagttttgttgaggtctctcaacacatgagtgataatgtatgacacctttggaagcataaaaagaggaaaggtttaattctttggcattatccgaacagacaaccttgatattgagaccaaattgagtggaaatcatggaaaaaaaatctggaatgattttgtttacttcagatttcatttttagcatatatgtccatgtgtatcgggatttatcatcaacaatagtcaagaagtatttataaccttcagtactaatgattggaaatggaccccaaatgtccacatggactaaatcaaatatttgagaagcaaaattgttattggatacaaaagggagtttcttttgttttgcaatatgacaaacatgacaatgagtattgtgaacaatggaagaactaatttttttattgaacatgttagaaatgtacaaagaaggatgaccaaggcgattatgccattggtttacatttgttttattaaaggctaaactagtagctgctatgggagtgtcttgatgtatgagataaagcttgccgtggcgtttagctgtcccaatcaccacactccgagaaagatcctgtataacacaattcttggtgttaatgaacagatagtagtttgtttgatcaaccagggcagtgacagataa

SEQ ID NO: 30012 - DNA, 1916 bp, Cannabis sativa
agtcccttcagaatttgcttcagttcgttgccgggaagcgtatgtctcatccaggagcaccttgtcctgtgctgatgtgaagattatgttacgagaagcttgttaagtttgttacgtcataactaacttaacaacttagcatgtgcagccaccgactttaggatcgatgtagagagaggttcagagaaaagagagagattgggtttgggttttgtatgaagaattttctgtagttgaagaagattcttgggtaagagtgtgagagttgaaacattttgtgagaatccaacagagaatcctcttgactatattgtacatattcttgttcaattaataaagaagatttggtggtgttccagaaatagagtacagccataaatcacatcgatctatcgaacttgaaccaatatatatatatataccttggtgttgattttatcgttttactgcttgaatcattttttatttttaatactctgttcatctatatttttttcaattgctgttttgtatttgttatttttgtcattgctaactgtttagtgattataaattttagttaattttgattatgcactttagtgttaattttttccacaacaataaatatatattcgaattaggtggtgaatatgaacccacaaaatgaataaaaagttgaaataagcatttaatcagaaagattgaagaaaaataaataaaaaaagattggaggaaaccatattgaccaagattataatattcccggaatttggaaaagtaagatcaactataactgatttaatctaaacaagaatgatttttgagactgattaaaagccttaatttgcggtacacgcagtgaatggggcgctgggaagtggtggtagtgggtctatttaaagggtcttagaagttggttatgttagaccaaaactcataaactcataaaaagcacagtaggagcattggtactttcgttgctgcctacttgtctcgtaagaaaaggcaaataataatgggcaaggcaacattggtagtatggttctcaatattggttttggttggtatcagtagtaatagaactgtgaaagctgggcccataaattacaaagatgctttggcaaaatctatactgttttttcagggacagagatcaggaagcctctctgctgcttcccaacaaatccattggaggactagctctggcctttacgatggtcgccttgcccatgtacttactaccactcactttattcctctctcttaatttcttctacatatctttatcatattcaaactttctttttttttaaatggttatcatattcaaacttaataactaatattttttcatttccccttaataataaaaaaaataaattaactattatatatctatgtctaggtagctcactcaatttgtccctaactatttcttctttttttttttttctgaaggtatatagaaaagcattaggtaagaatatatgaaaattactttatatattatttttttaatttttttttttaaatttaacgttttttaaggtaaattctccggtaagtttttatgcgagttgctataatttttagttgcaatttaaattgttttgataattgtaataagaatttttaagtaaaattccgtaaaaataaaaaaataaaaaaaaaatactattttaaaccatttttttaaagcaaccattgtacttttaatcattctgtcaattatttattctcgtttttaatgttcgattaaatagtttttaacaaacaaacggttttcattatataagattattaaatgagtcaaattcaaaacttgtacaaaagaaggggtccgtaaattaaaaaaaatatatatattattttttctttaccatccgacaaagtcattatatcatgtatatgcattgtatctcaacataaacaaa

SEQ ID NO: 30013 - DNA, 2805 bp, Cannabis sativa
  modified_base (26)..(38): a, c, t, g, unknown or other
  modified_base (2761)..(2764): a, c, t, g, unknown or other
attttttcacttttagtcacaagttnnnnnnnnnnnnnaagtaagattttttgtagtatattcgttatagttacagtattatttttgtaattttttgaaaaattcgctcacaatattaaaatagagttcctaatattccaatttatacgtggtgttcaaaaaacttcaaacgtattttcgacattgtaaactattcaaaaattttaaaaatttataagaatggtgttgtaagcataatgaacacataaaaaaaaaaaaatctgagatatgttttcaggcataaaaattaactaagaggttgtaataaaagattgatggtagcactcctcttataattatatcgatttattttattcatttaaataatagactaaataaaaatatatgaagttacaaataaataatatatattaattaattaattattttattacaaattatcaatacattgcacaaaattctgaatattaaatataaattatttaatttatatttttctaagtaatttttttttctaatttatataatttttataaaaataaataataatttaataatatattaaatataatataaacgggtcaattattttatgttaaataggttaatcttaattcaacctaaataattatctcgtgtcatttgtgttcaattcaatttcgattcacatatatttttaatcttaatctataataattcatattaaatatcatcgtgttataaccacttgaagtagtctactgttgttaatttattttttaattaacatatttagataatatagaactttaatatagtagtgcaagaattgtgtaaaatatagtgataagtgatttcacacatcttgtgatatttttaatttgttatgaaaatattaagatcaaatataccataaaaaatttacccatcaattagagatgcagctctgttttttttttttttgttagtggattgaaaaagttaaaggaacaataccaaaaggaaaaagaatctttgattcatacaataaaactgaatacaaagatcaatcaaattttgaagtatgtagcttaaaaaattattgtaatttttttttacttttattgtgtctaaaagtaaaaattttgtgactaataataaattatcatttctagttatgattaaaaaatccgtaattaaatgtattagtcacaaaaattacaaattattttgactaaatgtattataatatttattgtaattaaaactaaattagtaatgatttgtatctaataactatatttaagttagtcactagtaatttttatattgtgattaaaagttatttttaattaaaaaaaaaattatactattgtgactatatactttaaaagtagattttagattttttccatcctaccaaaaaataaataattacaatttacaatggattagtaacaagtccttaaaatatgaaaattttataatggaaataactttcaaaatacatttaaaaatgtgtacatgcacgtgataatttatgattagttagctttttttaggctaacccaaaccaaacatatataactttgtgtaaaatatcaaccaattaaaaaaattacatgacactcattaatgttactcttaggacaaacaaccaaactctttgtcatttgtattttggttgctatataaatatatatatatattaattgaatgacagttatagtggtccatccatagctatatgcatgctttattattattattattattatttgaagaaaaaatttgaagagatatgcatgtggctaaggatgcttttttattttattttattattaataattatttgaaaatattaagagatatgcatggtttttacgcatgctaataatatgattgtcggtaccacatattaattaatacacgtacgtatatatgtttgttgtgcagtaactaaatttaatatacttcatattgaagagaagtatacaatactcaaactttcattaattaactaattttgttgacattaaaatgagaaatattgaaaggtaccaatagtgtttaatattattattattagtgtaatgagggccaatggcttaatttattgagtgagtattattaagccttttttatataacttcaaaaatattttttttttcaatacaaaaagtatactatataaaaattttgaatcttaagtttaagtgggtcttagacacgggcctaatctgtcttaatccaagccgagtctgaatgcaattagatttttaaaaaaatactataataattagtgttggctgaatataagataatgttctaccgatttattagacataatatttaattaattaaagtgactatagagtccctgctctcataccccattaatttgtgtgatttttaagctattatttattgtgttattttattttttaataatttttttagttaattattttaagctctttctatactcgtcttaattactatatatatagaatgtttgtactcataataattgttaatatatatgtataagattttgtttgaaattcgcttgtatatataaaataattttcaaccttaaaaaaataattaagttttttttttttttttggaaggaaacaagaattaagtttaaaccttataatagttagccaaaaaaaaagtttaaacctttataataagtgaattttcaaaaaaaaaaaaaaagaaaagaaattaacttataataagtgatatattttaataaagacttttataaacttaggtggcgtttgataacactttnnnnatcagttttctgtttttaaaagtggaaaagtgaaaatattt

SEQ ID NO: 30014 - DNA, 1759 bp, Cannabis sativa
  modified_base (27)..(27): a, c, t, g, unknown or other
aatattttggaaagaacataacacttntccaaggtgtaagtatactttatctctgattatcacatcagtgtaaatccagtgcactgatgagtcaaggacattatcttttttttgatgaatcagcaagattatcattactccaaacatccatttacaattttatagcatctcaagcaagacctgaaaataatctatacatcaacaaatatgcatatgtgtgtttctttctaacttttcaaaccatgacttgcttttggcactaactttcttaggccaaacacttttaattctatacaagatgtctatttttgttttattcactatttgagcactttgcacactctttccttcccaaagaactccatttcaggcttgccaaatatgttatactaaagctgccatagtagcagcatacactctcgtcttgaagctgtttgctttgtgtcgttgtagccatctcactatctgttgaagtgaacttgagcagatctgccattacagccattctttgagctgatgccaacaatctgctgcaatattgcagcagaaaaaaagatgctccatctcttctttgtcattcttgcataataaacaatcatcatctggtatgacattaatcttacatagtctttctcttatctttagcttattttggacagctatctagaagaaaaaactataccggggtatgttcaatctattccgcacaatccctgcccattgcattctttcacattcagttttgatcaaattgtaggcctttgatatttggaagctttgccctgtcattagctgctagaattcagccgagaccttcaacttttccttgggtgccactatctttttctagtaccaactatcctgaagtggagcttgatagctccaccaattctcttcttttaagtacactttgtgcacccatttaatccacatattgtcttctttgttcgctatcgcccaaatatattttgtcattgctgccaaattccattcttccacctttctaaacctgattcctcttgccgtcttggattggcaaaccgattcccaagctaccaaaccagcccccctgtgatgtactttgacccttccatagaaaagccctacatatggcctttatcttatttattattttcttaggcaaaatcatgatttggctccaatatgtgtgaatagctagtagaactaaattgattaaaacaactctaccggcatatgagaggttccttgaactccaaactctgattctagtagtcatcttttccaccaatatttcacactccttgcttgagatcctcttagcacatatagggatgctaagatactttaatggagcttcttgcttgcaaaagcctgaaatgtccaccactcgttgaatttccctatcttccatgccacaacaataggcagctgattttgaagggctaggctccaatccagaggagcaacagaacaatttcaaagcttgcaatagacagtatatgcttttgaaatctccatggcaaaataaaatcacatcatctgcaaaacagaggtggttaagtttaagatctttacatcgctcaaagtatttgaactcctccttttcccttgcttttcccagtattcgagataagtattccatgccaagaaaaaaaaagcaaaggcgacataggatctccttgccttaatcccctgctagcctcaaagtagccatgcatagtcccattaaacatcagggagtacctaggagtctgtacacaattcatgatcaacttta

SEQ ID NO: 30015 - DNA, 3251 bp, Cannabis sativa
  modified_base (1197)..(1203): a, c, t, g, unknown or other
  modified_base (1361)..(1367): a, c, t, g, unknown or other
tgatgtcatgaagttaagtagacccgggtcatagcagtcgacctggaggggtagccctgcgcctaggttgactccgggagctccgggatggaaatttagactttaataacttgaatccaactcactatctttaattattttgtattatggagacatggagcaatcaaatccaagcctcgagggctgaaattacatgaacatgcaattcaaaagccaacttgggcacctagggtttcacccagcgcccaagttgacattcacaactagggtttcagtttttgggactgtcctagtgcaaattggtcaaaacttgcattgggacataaactagacataccacgaacatatttgaggtatcaaaatcagattcagagcaagtttatttgtgagcacccggtgctttggcacccagcgcccaagttgacaatttgtcagtctagacgcattcaaagtatcagatccatcattcgacttttgcatcttgttcgtcttcatcaaaactggggaaataggtactttcagggaagaaacaacattttatgggtgccaaaagcaaggcccaacgcctaggttgacatttttttaacctggggcaatttcgatgatgttatctaagaactcttccaaccatcttctctgttttcaacaaagattaagattcaattatttccagggaccaaacggaacttccaaagggccaaaactgagacctagcacccaggttgacatattgtccttaggttgtttccaaccaagttcttgaaaaagttgttttgggcattttttttttgccatcagaaataataaagattcaagcaaacatggggagaaaaccacaatcttgagaccttagaaatagagcccagcacccaggttgacctagtgttaggcccagcgcccaggttgaccttgtactgggcctagcgctcaggttgacaatcaacctagtgtgcttgtttcgatcgctcaaatgcgaaatttgattcgaccattgaatccgaaacggttaaaatggggtaggagacctcgtcctcaagttcaagaaccttagaagttcaaaacgacaacccgagagctcaaaaatgagtacccagcacccaggttgaaaaatggcctggtgtgctggattctacttatccgattctaattctgtttcgaccgtccgtctagcttttcacaataactaagatccatgannnnnnngaagtcaaattcacaacttcgcatttctcattttcaacatgggaagctcactcaaaaatgaagagttttgagtctctcatttctacaaaatagcaacatctccgagaactggtgaccagcttcgctaagccatggaaacaaactaagtgatgtcaaannnnnnnttaggcatcttaaagtacatcccttggacgttttttcactttcacttacccaaccacttacccaacatcctacccaacatccaggttgacgtcatatgtcaacctaggcactgggatgtcaacctgggtgctggatgtcaatctgggagttgggtcatgaactgccttttagttaaaggaccatatctcacttaatattagtctgattggcgcgattcaacttgggtttcaaaattatttcaatgctctatcaagacatgtctcacacttcaatcgcaactctaaagctatcaccccgaatttcaccccaaggaagttacgaaaataagctccgacttccccagagcgggtcccaccatcacgacacggactccgaaaattgaggatcaactctagaattcaattttcaccgtcaggtaatcatctacagtcaaaaatagccaacttgtattttttttttcttatttttgtgggtctccttcacttataaaagaagagctcatctagctcattttacacattcaaacaaactacccacaaggtcagagcttctctctctagaaattggagctttgatacaacctttttatgaaatgacatcttgtaagaaataaaaactcgaagtagacgtagctccactgtcacgatacgggaagactactataaattttttgtgtctcccttatatttacttaacaactatttcattctcgccaatttagcaagttggcgtggcttagaagtcttagtccagatttctgagccaacacatacaaataaattaaaaagaagtgcattttttttttttgtttttttgcttgagaaaaccttggaaaatttagcgaataaaatagtggtgatcacatggggattcacctcccaaaaattaagaaaaccatcacaaaagtttgatagaccccatttggcaagagtatgggtaactacattcaaatctctaggagcccaatacacattacattctgtttcatctaaactacacaataacttagtgaaagagaaaatgatggaccagttggggacattttaattttcaactgaaaggatcaacccgcaatcacaaagaacaatactcagggtacattgcaactccctaatgaccttctaaccaagcaccattgactacaattcaccagacaacgcctctcaagcattgatcttatgatcataaattgcagtaatttggtcattagggtctttaagaaccactcccatccagtaacaggtctgagctaaagcgaactaggcccgcgcctaaggcctacctagctcagggcccaaaaatattttcttaatatatatattagtagtttttaaagatattacatatattttaactaaaaggtctaataatttttattttcctaaggttaactcaattttagagtcgaccttgctcccaccggagtcattgagttccttattatcacaacaacagtgctttgaaatagtcaaaagaggagaaatccacctctgtagaaccaatcccccactactatcacctaccttaagattacgagttttccaatgcccatggaactcagttttaatagctttaaagatcacttctagggtagcctttttatgataagttgaattcttaaaaaatagtgtatttatagtgatataaatcttgcaaaagttgctataggttaaatttgcataagcacattttttactaaataaggtatattttaatttgtatcacttatttacatcaataaaatgctctattgattgatgatttattctctccacgcataggccaatataattgatgactttgtacatctcagcacaatgcacgtctcgatttcacagttgtctcctcatcactcaatcaattagtgtgacatcttccaaaga

SEQ ID NO: 30016 - DNA, 2601 bp, Cannabis sativa
tattgagattattgaattcgaaattttttgtccaattttactaaagaaatctaatattttactaaagaaatttaggggcacaattttgtacttctaaaaaaacggaaacataatttaatagatatcaaagttcaagaggcaagatttaatatataggcaatagttatattagtaaaattgaataaaattggataaaatctaacaatttcaatagttcaaggaaatctaaaaaattaagaaatatgattaattacatgtcaaagttcaagttcaagacaaaaatcttaattggccattttgaaatagttaattttttttttcttcaatccatgctatatagaaatcattcaacaaaaccgacacaaaaacgacttatgccataagatttaggactttcttgggcagattgaaatacactgatcacatattgtcatcaactatagatagacaaatttctaaccataacactgatctaaataaactagaggaaaaacataaaagggcatcaaaattggaccatagaaatttagatgagaaaattactttacatgctgtagaaagataacttcatgaaaaggctgaaacgccaacaaagtaccaaaagtaaaattacaaaactacaaaagacattattataactgattggatcataagcaaaccgatataaacataatcatgtaagataattatcaaaaacaagagacacaacatacccaaagaataaccaacaaagcagaaaaatataagagaattaccccatatactgtttttttaattttttttaaaattacagtttgaatttcttaagtgattgcagcgctagttgcaatagggatttctatacgatttttttgttgcaatttaggttgaaatgctagttgcaataagagtttctatatagaattttgtaaaaatgtaaaaaaaactgttttgaaatgtaaaaatgaaaaagccccaaaaatatatgcaaacctaacattattgcagagctagagatagaaattccaatgaaatgaatcaaaaaacaaagtagttcatcacaaatcatcgaaagacatttggttaaaagcactaaaaaacaaagtagtttctatatagtcttatcacaaattgacactcactagtcactggggtactacttctaagttctaacagtagaaaacgaacacagtaacaatctcattcttttcagagcaacataattaaagatagtaataatccattgatcaagactatagagtctccatactcaaaattcagggcaaatgtgataaaaacagtcataacgatttcttaacactactgaaaccaacaaatcccaaaaacataaatattaccaaacaaaaagaagtaaaaaaaaaaagacctcttccatcttcgcattctgggttggcgaaaatcaacggtaagacttctggaacctggcacgagctccacgaccaccgaacttcttgggctcgcagcgtctgggatcagcaacgagaagggtcctgtcgtacctacctaggatatccttgatctccttcttgctctgctcgtccacgtacttctggtagtaagcaactagggctttggctatgctctgcctaatggcgtagatctgagaagtgtgaccacctcccttgacgcgaatacgcatgtcgactccggcgaaacggtgtcggcccaagaggaggatgggctcgatggccttgaatttaaggatctctggctcaaccagttcgattgggcatccattgatcttgattagaccacggccccgcttgcagtaggtgactgcgacggcggtcttcttgcggccgaaacactggacggactcgatcggaggagtggttgccatctttagggtttgaagaagatcttgaggcgcctaagctctactggaaaaccctaatattgagcgtgaggaaaggacagagagagtatttatattagggttttggattcaaattactccatttaatgggccagtatctgggcctagagagctttaaccgttcatgggctcaatagcagttttacgaaaatgacaaaggaattttttcacaaatacacaacaaaaaacaaattacaaaaatatacggaattatatatatatttttgctatttttattattctatttccagaaaataaagtattttgatatatttgtattttgtactcttattaatttgttatcaaatttttgttatttgtatatatttttttttatttctttgacgttgttttaatattatttttcggttacttttatataatattgttgctgtttttgtataatttttataaaatatcgtaaaaatataaaaaatatatctttgaacataaaagtaaatatttttacaaaaataatatcatatgtaattatttcaataacaaataaaattgtttgcatcctaggataaataataaaaaaattaaaatagaatctctaagaataatagttttttttttttgttataataataaatatattttatacatacacttacaattgttaaatgagtgcatttgttgtattaggtaatataaataatttttaaatatatatgtaataataaaaagaagttttttttacactttaaaaaagtttttttttt

SEQ ID NO: 30017 - DNA, 1167 bp, Cannabis sativa
caaaattcttgattctttttacttaatttttcttgaattttttctatttaacatatatgaattcttttttacttttgaaggcaatttctaagagaaacaaagtgacacagtccaaaatgcttacattaggggcgcacagttcgaagaccatcatgagatatatccatgataaagtaagaaaagtttcataaatcatcttacttttaatatgtatttcttttaattaattttttttttgtagattaacccaacaactggagcctatccaagtgttattgacactcttgaacaactctacaagaaaaagaatgacaagagccagtggttgagtgatgctgcaaaagaaaaatatgtaattacagttaaacctaattatgcgggcattggagcagaaatttgtgtgcgagtattccagaatttcagctagacctcccaccactgcagtttgatgatgttggatctagtcaggcagaggtgggagataatgatggccaaggcaatgatgatattgatgatgatgcaagtgatatgtagtagtattcattttattttaggtgagataattatacttatgttattattttatgtgtttgtatactaacttttagacaattataactataaacaaacatatatatatatataaataattaattagaacaatttaaaattatgttctaattaatttgtcatgttttattttttttaagttatttgaataaataattggtaaaattttttaaattaaataatattaattaaaaattaaattaaattacaaagttttatcgacatattaatgtgcatgtaaaagtaagtcttttaccagcgcatatttttgttggcaaaagttagactttgcccatcgcgttactacgttggtaaaagtaagacttttttgagcacacattagggctgtaaatgggttgggttgagtgggttgatgttattttaataggccagcccaataagatcggcctataaaatttcaacccattaacattattatttttgtacaacctaacccaacccaacccatatgttatgggttgggttgggttgtaacccttatttcacaataaaaaaaaaatcttcacataataaaattcacacttagaataaggaaaatataaatttcaaaattcaaacataagtaaaataatcgaa

SEQ ID NO: 30018 - DNA, 1372 bp, Cannabis sativa
  modified_base (349)..(362): a, c, t, g, unknown or other
atataataatatgaaatttcatgaactattgttggttgctattattatatgggtagtagtagaaggtgacaaattttttttgttggaaactagtactgtaactttaggccatacttatacactatattattattagccttataatatatacatatgtatattatatatacttttgaacacaacatgtgataaacacagtgtccttcgactctattatgcggcttattgtcaataaataaatatatatattttgtttatttaacgatttttgttagtttaacaaaatattttaaaaatataaaaatatttctttaaatttaaatattagtagagttagttttataaatannnnnnnnnnnnnntattatttattttaaattaatttagatatatattttttgagatataatttatatatatatatataaatattaatatgatgtgttttaagataattgaacatatattaattttaaataaatttaaatgtatatctattaatataatatttgtagtattattatttattgttattttaatatatataaatattaatattatttgttttaaaatataattgaacttatactaattttaaattaatataaatatacgaatatattatttataatattattattttattatcattttaatattaggactactatatataataagagtattaacgtcacgtcacgcctattatacatacatgcattttatatgtatgtatacatatacattttcaacaaacaaataatttttgtatacatacattcattttatacattattatatatgtatatataaatacacgtatgtaataattattctacatataatatatatagagtataaatttagtaaatgtttctcttttatatggtgaattattttaaacacacacgcaaatcaataattcaaaacaaattgacaaacatatatatagaatatttcgaagaaatcatatttaaaagataaagcatttgtataggtgtgtaaaaagttattcaatttaattataatcaattgattcaatcctaaccgatctaatataattagatatctgatcatatttggattggattagatgtaaattttgaaaatttaatgggatcagatcggctattagatgagacatctgatccaataaataaccgaaccaaaccgatccaatcatccaatagtcatctaattatatttatatatttttaaaacacatttataattttatatatttaatatattttattgaaaaaatatattaattaatttaatatatactattaacacatgagattaaagaaaaacaccttagatataaaatattaattcatatcttcctaaataccaataaaattatcaatgc

SEQ ID NO: 30019 - DNA, 3236 bp, Cannabis sativa
tatatatatatatataaatgaaacaaagtgatccctgcaaatcacgccatttgtgaagttctattttggaagttattcaagtcatcataactaaatattagtacaaatgtacaatgatcaggtaaattcaaagggcgggttatctaagaagttgtttgacttggcatattctcgtagactgtctgcagtaaacggaagttggcttggggcttggggtctagaaaggcttctatggaatttacttgtatttaaaaaggtccaggcgattctaggaggtcgtgtccgcttcgtactatctggtggtgctcctctttctggtgatactcaaagattcatcaacatatgtcttgggttagttctgctagcagtgcttgcttatttgacataaaagaggcttaggaacactgcattagttatgccaatctatatgaaaacctttttttcctctaagtgtaattaattagttttgtttcttttgtctttgatagaacttcttggttgatgtggttgaaaagccattgaattttgtctgaatctttattattcttattattatttaattcaatctgttgcagtgttccaattgggcaaggttacggtctcacagaaacatgtgctggtggtacattttctgaatttgatgatacatccgtcggtcgtgttggggctccgcttccttgctcctttgttaaggttaacaatatctttggaatatattcttattcttacaacttatgaacaaacttgctcaacactttgttggtctttttccttttaaataaaaatgcatacacaattttttgttttggctttcttaaacttaggcctcgaagtgcaagacaatcatttaatactctacataattattttgattttgagtttcatatattagtgatatacatggctggataaacatcagcccgttgtgggagccagtccttaaaaatatctacctggtgggtaaaccaagtaaattatttagtggaaataagcattaatgttcccaagatgagccatttcatttggatggtttggagtttcttatctctctcaacttgatactctctttaacttggttaattggttatcaaaatttgggatccactttactatttctaattcttttccttgtactacatttgcgagacctcctaacaacttgagattttgatgaaatggttttaggtggtctcgagttgaatagttgcaagtggcaattacgttcattgagtgtaaaggctgtttaaaatatttaaaaccaacttagacttaaactcttaatagtttctttctgctttttgtgataaatcattttgtaatggatgcatccctatatttttctgttgctttcatcatagtttggtttcttaattaagcatggtcagtagcaattgacaagaaggcaacttaaaggagctaattttagacatcttatcaagcatatatgactattgtccttgaaacagtatgaaagcttaccttatggatttatagtgtttatgaaaatgaacaaacagccttttaaggaagtctgagacttttaggcggtcttatcgtatttttgctgcaatatttatgcacatgaccagcctctacaccccgtagtccatccttccaagttcttacaaattgatttcatgctgtttaaagttaatgaaatttacttacattgcagggggtgtttctgtatccttattcctattcctcatcactatgttgagttggaacattttgactttaataatcctaactttttgccctcttttatttcttatccagttaattaattggtctgaaggtggttatcttgtaaatgattctccaatgcctcgtggggaaatagtgattggtggtccaaatgtgacacttgggtatttcaaaaatgaagaaaaaacaaacgaactatacaaggtagttgtcaatattttgattaatctttttttcttcctgggttacctgacattattattaactacaatggtactttggttttgaaaggttgatgagagaggggtgaggtggttctatacaggtgacattgggcggtttcatcctgatggttgccttgagataattgaccgtaaaaaagacatagtcaaacttcagcatggagagtatgtctccttaggaaaggtatgaacttgcaagaataaatggaatttttcattggataacctcgggactaatggtaccgtacaggttgaggctgctctctccgtgtgcccctatgtcgacaacattatgctgcatgctgatcctttctatagttactgtgttgctgttgtggtgccttctcaaagcaccttggaagagtgggccttgaaacaaggagtatgttttaccgactttgctgacctttgtgagaaaggagaaactattaaagaagtgcatgcatcacttgtaaaggtactgtttcacagattttattcccattattttagaattggaatgaaagtaatgaatccaaataacgagcctaaggaggaggcctcaggaatcgcttgtttgtatatcacgtgatcatgccagcttactaagaaatgattcatcatgagtaagaaatagtattgaatccatgaatggcgtccagaagttggttgtgtatatattacacatgattgtatgcagatcatacaaaggtcttagtacgtatcaacttatgtaatctagattgtttcttatgttgtcgcagtatgctaaacataatgatttagtctgccagccttaatacttatttttactttagccacatattataaccatttgaaagaatttggctcaccttccagtggattgacaattgtgttccttatggtttgtataatccacaggtaggaaagaaggcacgtctggagaaatttgagatccctgcaaagatcaagttattatcgaaccaatggacacctgagactggcctagttactgcagctctcaagatcaaaagagatgtcattaaaaaggctttctctgaagacctctccaggttatatgcatcctaaatgttgttccaaactccctccccacctcaaatttcacttttactatatttcataattcatacatttatcagtagcaaaaatcaaaatgacaaattctgagtttgtagagtattttttcttttaattttctttacttctctcatggaaagctacgactagtcttaagaggcaggagattctaacaaatcactaggtaaaggtccacatgaggaatagactctgatttttgaaacagag

SEQ ID NO: 30020 - DNA, 1629 bp, Cannabis sativa
aatttttctataatgtcatacatgcatgtgcataaattttagggacctaagtttggggctttagcatagatctaatttgccttaatttaggattgagtctgtatatatgtacaaatgaatttgagagagatcacatctaatatttttagatttattcagattcgagccacttatacatttacttgttagattttgccaatcgattccatttaattagtttgtctaccatctaaactaatccaatccattgtaatgatacattggattagtttcatcaagtagatatattttatgtgtatatacatatttattgaactaatttaaatttatttaatattttaaattatgtatttttttttttttttatcaaatctactccattcaatgttttaaatctaatacttttattggattggatccaatcataagtaaaattttaattctaatttttatatatacatatatattttaaatataacaatacatcaaatttaattaaaatattaattagtttaattaattattggattgtattggattgaatttttaaacacgtcatccaaaatctcatctgatcttatatattgaataaaaaataatatctgattcgatcataattgaatattcaatatttaatagtaagtttgtaattagatcgtttgattataattaaattaaatcaatttatgcatactcttaattcaaacttagctcgtttgtcttctttttctttattgatgttgtagtactatttattgtcgtatgttttactctaattaatttttgttttctttttgaaagaaaattcatcaatattataagacacatagttaaaaaaaaaaccactcaaacaaaaataaaccaaatatataaggtaagatatttatcaattatgataagagatattaatggttgatagaagtgtgtgtggtattcattacaatataagaattataattataattaatattagaaaatatatatatatataataaatttgtgcatagagaccaagtcaaattcctttctcacaacgtatataaaatagtgaaagtgatcgatcgataatgatagaataaataaaatgaaattaacagtaattacaatatccacttctaaatatttcagttttttttaattattcttttctatgtaattatagttattaataattgtgaagcaatagatcatgagacttttcaatgattgaattggcatgcatataagataagacaataagaataacttactacaaataatcatattttttattagtcacataaaaattataactaaaattaaaaaagttgtaattaattataaattatagtttctatattgtgactaaaagatctgtgataaaaaatatattaatcacaaaaatcataattttattgtaactaaatgtattttcagtcacaatatatatcttgttgtgtatttaaaactaaattagtgacaacttatatctaaatattataattatattttggtcggctacgagtaactttttatggtgactatttaataaaaaaaattaagttataactaaaaatttctctgtaaaaatagattttttaagtgactagagagtagattaaccaagtttattatcactaacaatgatac

SEQ ID NO: 30021 - DNA, 2064 bp, Cannabis sativa
tgttatcatcataagccaacttttgattctaagcctaaaaatttacaaacacaaagctaagcctaaaagttaaactgaccctataacacacaaaaacaaaatcaataaaccatttttttttatttttataaaatttgaggaatgtagaaaaagagagaatagaatatgctcagacagccaagggtttgtaatcagattctgagtatttcccagatcagaaactctagtccacaaaattgtatcatcaccacactcttgtcttccaaagaagatgtaaaaataatttttgcaatcatataagacgaatgaaattgaaaaaacaaaaataaataaataaataaataaaaaagagagacttcaaacaacagcagcataagcggcgaatgctgtagatgagtccctgatttaataaacagacgcatgttcgtttgtatatatagaaagacaaaatggagaaaagaggcgtaagaaactcactaggtttttattgcgattgctgattgcctggtttgggcttgggccttaattgacatttgcgttagtacacaccaaaaatttgaagggaaatttttacaattgtacaaaaataagaaaaatttaacaaaaatacggtgagacgtaaaaacaacatacatatatatatggaaactgtcaccaacctttctttgagttttaaaatgaattggagctttattctttgttcagtgaaatacataatcattgtttctagtcactttttgttgtgattaaagacaaatcacaccgattaatgaatcaaacaagattcaaaattaaaatctgatgctaaaatgaacaaaagttagaatagtattgttagatgaaactacgaattccacatacggaactagaaacaaaaaactcaaattatgtggttcgaactcaaatgagtgtactctatgggtgaataagtactaaactttcttctttattgctttcaagaatagagttataaataatcaggattactcaaagagttctaaaaaactcaactcataacagcacatcgaaatcctctcaaatcctttaaagaaaacctaaaactcacatggagaaagacacaaacactcgtagagaaactcacatggaaaaaacactaacctctcttggaaaggcttacatagagaaacactttaattcttttagagaaaaaactcaactcatatgaagatcacaaagtactgaaacactcaaaacttggtttttctctcatttcttcacatttcatctcacacttgaatgttggggtattaacttaagttccacatcaaatgaatagataggaattgccttcaatataaatgttccactgactaaattagtatgaggtcgtttggggaggtacccaaaaacaaatccatgtagaataggctcaaagcggacaatagtatactaatgtgggagttaaggtgaacttgtgacccaacaagatggatgaacggagcccaacaagtggtatgaaggctaaaggttcagaagttgggataatgggctgcatttgcttttgtgtgaaagaagccctcaatgtgatcttgtgattgaagaattgtatggtactttatatccaaactttacatgatattgtagtggtcaggtggtgtgtcttgttggtgattagaatagtatgagatggagatctgtgtttagtacctagtatcgaaagtctctttgacaatgttgatggtcaggcagtgagtttcgttggtagtagtggtagtacaagatagtttcactcaagggcagaccacgagtagtggtcctaggtttgatgggggattgttgggatataaacccaaatcccatattggaagaatatgcaagaatttgtcttgaatataagtgtttcacctactccattagtccattgtaatgaggtcttttgagaatgtacccaaaatcaaatcaacggaggctaagtctaaagcgaacaatatatcatactaatgtgagaattaaggtgagcttgcagtcctcggtggtcctcggaggtggtggaggtgagccgtggaggtgagtcgtgcgtttgggcgagagagagagagagag

SEQ ID NO: 30022 - DNA, 1894 bp, Cannabis sativa
tccttgatatctcgtcttaaacacttctattatatcctctatctatccgagatggacatattgtctcgtcagttacatctgtttatagttattattcttatctcgcatatgcttatgtggcagtaagtttggatattttatcaaatataatttagttgtaacggagtttatttaagccgcatttaataatgtaatttaatattataatcattgagcttattcatattccttttgtagtacacgtgtcagcttttggttgatagtcaaattttgggtataataatagttatgcaaagtctcaccttgctcctgtttgatattggctagtgtcgtgtaaggcggtttgtatgtctttgctgcctaaaagtgcgtaagaaacaggtctataaatgtctcccacgtcgagatcaatacctttggaaattggttgaaacaaccgtgtgtgtcatcttccaaatttgcagcgaggattcagaactttgccaattgtagtacctggtcaacttccatgatagtattaaacttatccaagtaatctatggggttagtcaaacccttgtatttcagcaacttaaagagtcagaagcctttccagagtcgggcttgtctcacttcttctgtggaaggtaatgtcacatacaacttgtaaattggcttcctctattgctcgatcattcgaagagctcgcaaaagattctcctaatcaattcctccctataagatgttggcattattgataggtgtgatctgattgctaggtgcagcaaccacgactgctatgtttgcaggtaccaccacgttgtttgtggttgcgactagggctggtgttgctgttgggttttggctgtattaatcacattattgatagcttcaggggttgtttagcaagagggatactttgatcggccacatggggatcatggggttcctcctcgattctgcgacctcttagagtcagggatcaggtgagaaatgcctcatttggatggtctcgtagatcgcccatattaacatgataccttccttctagtcttgtcaagactgaacctgacctagtatagaaattatgagagaggctgtcagatcttgaggaagtggaaaaggtatcagggggatttacctcatctcgttgttatgcatgactgcgaggatggcatcgttcattgtcgtcttcttgtgatctttcttctctatgactacatcactggcttgagtttagaatatcgaatccttttccttgtgcagggtttgtgaggaagctggttcaaatcgggcctgtatggattgatctcatctaagcactcccttttgtaatacttgtgaccatcaaaaatattggtacggttaccatgatgtctagtagtgttatttacctggttattcgtgtgtcgttggctaggaggttctcacagtagacgaataacttagtttcgattccttcctacaatttcagcatacatagcatgtacttattccggtcatacaagacggttgtcaactgcactatacccttaacgacggagataggttttattggcagaaagtggccaataatggctattggcgtcgaggcttctccagctaagcctagaaattacaggaaaagattcaggggagtcatagtggtatgccccactcctccaaaagtgaactcaataagggcagttccaccgttgacaatcgaagcaccagacgtgcctctattgttggcctgttgttctcattggtgttcatctggtttgtagtcatttcgattctcctctaaaatctcagatatatcagaaatctgcttctcacagatagtgccaaatgttgttggagaaaattagacaatactaaaaatagcgagtattcgagcaaagtaagaacactcactagaagatatgcaattatt

SEQ ID NO: 30023 - DNA, 1392 bp, Cannabis sativa
  modified_base (39)..(56): a, c, t, g, unknown or other
tagtgggatatatattggagaaaataaaatatcgaggtnnnnnnnnnnnnnnnnnnttgaccattttacccctagtctttaaaataccttacttttaagttaaagggcattttaatcaattgataaaatggagagtgaggtggcagcctaggttagtgacaccttgcaacttatttttcagcaaaggattagtgattatcattgattcttttttcttagagaaaatcgaaaaaagagacaaaaagctaagagaaactctttctctttctctctttctcttcgagcagcaccaaaccaaggaggcaccaactgattagttgatgtttttttttctggaaattcaatagcgattcaagggttcttcaagccaaggtaagccctagtaacacgcttcattagttcttgaattttatggttagttgagtaactgattttgtttatttggggctattagggttagtagtatttgatgttcaacttttaggttcattttaggttaatattgagttctggttattaattttgagctatggtgatagaagggagtaagcttgagcgttaaaactcaagtttaggtatttaatggcatgttgaatttcattggggttttttgtgaatttttggttggattatgttgtttatacattgtttaggtactctagaaggcttggtggcatttggatgagttttgagcaagaatttgatggttgggggaaacctggtgcaaatcagctagccggtttgccaggcttgtaaaactagctagccggttttggcaggatccccgaacatgccatttctcaattctcgtccattttagtaccgtagtagggtgtttgcctgtctcctgagttagtgtaatccctagtgagaataacagagcctagatttataggtttgggattcccagattagggtttcgatcatgtgatttacccagttttgttatgtgattagggcatccatccagcacaagactttccgttcaggtcggcgagcacacttgaatctggaaagaaggtaagaaccgtatataatgtgtgatatgaatatctgagtgtatatatatgttaagtcaatactacaacgtctatttttagccctttcagcgtcggttttggtgaaattcgctaccgatgttgatcaggacgattctgtagggttataaacaaccgacgccatatatacccctttggcgtggattattagcttggaaccgatgccataggagtatatatggcgtcgattcctagctaataatcgacgccatatatggcataggaactgacgccatatgtacccgaatttcaattttttttattttatttaaatatacatttattaatttatatattattttatttaatttaaatttaaattacatatttattt

SEQ ID NO: 30024 - DNA, 7573 bp, Cannabis sativa
  modified_base (1162)..(1170): a, c, t, g, unknown or other
  modified_base (2697)..(2697): a, c, t, g, unknown or other
  modified_base (7545)..(7547): a, c, t, g, unknown or other
acaagcagattttcctctggagttattccttctattaggaaatctaccaaaaattggcccttgatggatgttcgagcgtgataagttatgtcaaactgtcccagttcaattgaccatttatcaatcttccaaaagtgtctgcttttgataaaacttgtcttaagggttgatcagttaacactttaattcggtgtgcctggaagtaaggtcgtaacatgcgagacgcgtggattaggaataaggcaagttttctaagagggggatacctcgattctgccccgagtaacattttactgacataataaataggttgctggtgctttcccttttctcgaactattgctgcactaatcgcgtcttccgagacagctaaatagaggagaaatgtctctctagttactagtttttccaaaaccggaggtgtcgccaaatgccttttaatgctcttaaaggcctccttgcattcctctgtccattcgaatttcttgttgcctcgtaatacattgaaaaatgatagacacttatcagttgacttcgaaatgaatctgttaagtgcaaccattcttcctgttaaggcctggacttccttaggcttggttggtgatggcatatctatcaaagccttgattttctcagggttttcttcaatgctcatcgcgttaactatgaatcccataaactttcctgaggaaactcgaaaggaacacttttttgggttaagcttcatattgtacttctttgatatttcgaagtacttcacgaggtctgtagtatgacttccactttctaccaattttgccaacatataatcgacgtaaacatccatgtttcatccaatttgattcacaaacatttcattcactagtcgttgatatgtttccccagcgttcttcaaccaaaatgacatgaccttataacaataaagtcccatgttggttacgaagcttgtatgttcctgatctgggacatgcatttttatctgtttatatccagagtaggcatccatgaatgacataagcttttgcccagcagttgcattcaccagctagtcaatccttgtagtaggaagcaatcctttaggcacatcttactcaaattagagaaatcaatacaagctctcctagttccgttcggttctgggacgagaacaggattggctatnnnnnnnnnataaaacacctcgcgtataaagtcgttgacaaacaacttatccactttctgtttgagtgccctttgtctctcagaatctaagggcctcctcttctgtctctttgctgggtagtttggatcgacatttaagtgatggcagataatattagggtcaatccctatcatatctccatggctctaggcgaactaatcctgtttttccctaaaaaacttattagctattatttcaattgttcatccaagttcttcccaatgtaaacacactttgtgggatttcctgggtctagaacgacctcttccaactctttgattggtttaaataaatttctttcgtcttgaatccgaggattaagatcttcatcctttgtctcgccttcttcaggcaagactgccattagatggtgaccagcttttctgtgctacagctctatgcgatagcattcgcgagccaacatttgatcacctcgcactactcccacacccactggtgtttaaaacatcagggataagtgcttaatcaaactaagtgcccctagtcagattaaagttggtcaacccagtagtatattataagccgacggtaggtcgacaaccaaaaagtcttgcattattgtggtggataaagctgcctcacccaaagttaatgggagctcgattattccttgattgacaacattgtcaccagtaaatccacaaatatttaccatgcaaggtcttaatttagctttttcaagccccatcttcttcagtgtttccatgtaaatgatgttcactgaactttcgttgtccacaagcaccctttttatcctcttgttagcgaccaggatggtgattactaatgggtcgacgtgagggtacttttcatcttcctctgaaaatataatcggaggttcttcaatttttactttcttggaaagttatggagcaaaggcagactgctgattcttcacttccttcacataccttttttgggcattattactctctcttgcaatatgtggccctcctgagataaccatgatatcctcgccttcaacgagaggaggttgtaatctttggttgcctaggttgttgggcagattgggctggttatgtccattgccctatcttttcacatattgcttgaagtggcctcacgcgatgagactctctatctcatccttcaactgacgacactcatctatcgtgtgcctaatgtctttgggatacttgcagtatctggttggatctcttttatgcctcgcgtgcctgatgggctcaggtttactaaatgcaaccttgtgctcatgcgcgagatagatgttttcctgagtttcattaagctcgatgtaaacagtgtaaatcggcacattcttgtcgtgcttcttttgcttcttcttgtctttagctgaccccttagagtcatctttcctcattgaacaagaggcccctaggttatcacctttagttgagacagtacttattgaaacggtgttgggtttgcttctcgaactggtttttaacaaattcatctcttttcgagcttcnttctttcgaacaaacacctgagccctctcgttgaacttagtgatgtttttcatgggacaaccctgtaggtcgtcccatagtccgcctccagtggtggaaagattagtagcgatccctgcttgaagggccgtaagttgggtactatcatccaaatttctcactctcgcggcagctatgctaaaacgacttaagtatgccttaagtgtcttgctaggctgttgctttatgttggcgagtgaggacgctttgggtcgcctatcccttgcagcctggaactgctttttgaagtccttagacaactgttcccaggaagggatggaatgatgagtaaattgattgaactagctgcttgctgctccaactagtgaagtgggaaacaaaatacaatgtagattgtttgtaacattgctagctcacattatagtattgaaattatttaaatgcgagaccggattagtggtcccatcgtatgatgagacgtggggttttttgaatccctagggaaaaaggagtattcatgatgtctagatggaatggctcgagttcctcatctgagtcatatccagattattttccttgctccctaacttgatacctcctgaacttatcctccaactcatctatttgcaattagattggatccccttcctttggaccgagttgttggcgaagatcaggttttttctggttcaagagttctcacatacccggttggttataattgctaacagaccttgtcctactcacggacttggtcctactcatggatctcgtcctgatcatggaccttgtccttgagtaactttcattttcactcatgcctctagtttctcgatcattattgtgatgagtactttctcctccttgcgttgatcgactgtgggttcttgtacaccctgaggtatcactcgcttcttcacgtcccgtccttatgtggttcattgtgtgccccctgttggggtttgtacatgtcccttccctgttggtttgagaaggacgttggcgatgcctcgttggtgaccttcgtgtcccaagttgagtgccaggatttctctcgtttccacgagggatttcatgttccctggtttttggtcgccttctattctcatttctatgagaaggctctggctgatcatttggttgttcattttcagggggaccctcagtttccccaggttgttattcctgagcgttctgagggttctcctaagttgtctcctgcctcttggttcgtgagctgcgaggtcatcctcatggtcttctcactccaggatcaggttaattttgtatattattctcatgtgccgccttggccgcgattgcctcacgttccaactcagtgttccgtcaattttcctcctccaggcagtgtctgagttggcagttttccaactcgacaagtggcacgtaccttgtaggattgtaggcaccatcctcaccagtctgcctgggttgggcaccaccaacattcatttcaagttcttcatactctgttcttggattctgggccctccttgaacgtgtggtccgtgtacttaggccaccctcaggttgggtcctcctggaacgagtggtccgtgtagatcgggagttgggaggcctccgggagcccattggctcttttccaagacggtgagtggtttcttcatgaggagtataaatgttttctccattgttagccatagagaaattatttttatatgtatcaggagggttttttctgagctttttaacgcagattttcgttaactatattaaagcctaaattgcgatggatttgcacagaaaataatagcagtaaggaaaaaataaagaacacgaagcctttttacgtggtttttcagttaaaattctgcatagtccacgagtctatcttattagatatttctgatacaattctagggcttaatctcttaaggattttttttcgtctctttttcaatgtaacgtatccctatttatagttacataggagggcacttaattactaatcggactgatatcttacaacattaatcccttgaaattgtgggattttattacgtctcacgtaaaataaatgcggttattatttcaaaatcacacagctgtgatggtctgcttttgccgggtcaatgcatatgtatattaaatacgttgcaaagcatatcattccgggacatctcactgggaacatagcaacaataatcgtgatagcgagctagagcttttgccatgtctttttgaggtttataatgtaaatcttgtcgtttctgtgcttaaagacataacgctccaactgacaatcgcaattcttggtgacaaggtgaacttcagtagtcaacatcatttgaatgtcaggttctatctgagagagctgactcgacggagcagtggatcttattgaatgatgtccggagttgattagtatagataccatgagtatgtttccttatagcgagatggatgcctcgctattcgttgttcaagttcattcaactattatgcttagtttgtataatgtacattatacactaagtgttctaacagttaacaagtctcgcttacttttcttcatacgtagcgaggttggtgcctcgctttgtattaatgatgttgtccttgcgatcatatcttcatatacgaaatggttttcttgtcaatacgtgaattaatagtttgcatatttgtgtctcgctcaagactttacagtcaaggatttatagatatactctaccagttctgcatttaatgattattccattttaatgttcccaaatataattttcattatatttattgattcgtattctcccaagttgacacgtgtgctcctatgaagtaacagccaaattttggatataacacaacccataaaaataaatgtccaagatattcctctaagtaaagtcccactatgcgagaagaagctcctgaccataacaagttcgcttttagtgtgctgcaataaattaaagaagggactcatgtgggcatccgagtcaaagtgaatgacgctacacatttggggggcacataaaaaaaagagagatggaaatttttcaaatcgacaaggactagctaccattagtcgataagagaaatgcacctatctctccctacaaaagttacttagccaaaagaggtcttgaaagatactcatggcctaatgctgaaatgagagggacgcctctcaggagtaagaaaacgcttgcaagtcaagagggtagcatagtcaagtataataagcttccttcgatctggtaaaatgatgaagaaataagtagaaggatgagactgcttaaagagccatactccttcaaaatgaaaacctacttaccatagcagagaaagtcacttggccaaagagtaaccctcaaagtcacttggtcaacactagttacgaaagttatttagccaaagagtaatcctcagagtcactcagccaacgttagtttaaaatttcactcagccccaagagagactcaaagtcactcgaccttgcagcgtctagagtcactcagccctaagaacggctcaaagtcactcgacctcccagcgaccaaagtcacttggtctcgtagtgaacgaattccctcgaccccaagagcgactcaaagtcactcaacctcgcggtgactagagtaactcggtcccaagagcaacttaaagttactcagcctcgcggtgaccaaaaattactcggtcaaagagcgaataaagtcactcggccttgcagcgaccagagccactcgaccaaagagtaaaaaaattcaattttcctcgagagcaactcaaagttactcgtcctcatgatgaccaaggttatttgaccccatgatgacttaggtcacttggctaccaacaagtgaaaagagaaaaaaggggttagatgacgttcaaacctgagacctcttaaacaaggtgagaagaatttgctgatgctccaaggtgcagattgtgaagtgaaactcaagcgagggagaccccgctatgtatattgggcacatccttgaaaaacatggagaaggtaagactcacacagcaatcaagaaaaaccccaattcacttagtcaaccaagaacacttaaaagaatccttgtagactggggggtaagtcgttaaccccaaaaattgatagagtagattttcgagattagttaataattagtctcggcggtcgagatacattgcttgtaagagtcagtcgaggaatgactaaatcaacatgagtgtcccagttcctgttaatataaaggatcaatgcttgcaagtcttgtggtatatccacacaactcagaggtcaactcggtaacaactcattactagagctagtaagatcaacttactaagttacaattgttggagaattctcataatgatgcgcttggaattgtatcttgtcataacataaaatccatagatctctttctcatattgccaatgcattttgaatcgtcgattccgacatagatcgagagagttatggccaaaatactacgaccgctgaattgtgacaactgggtatgcgagcccatgagccattatgccaacccatgagctgttgtgagaacccatcggccgttggacaattaagggagaatttgggtgagtcgtggagcatttgtgtgaaccgtggagcctttatgtaagtggtagagcattcgtgcgagccacaataatgaggggcacgtatgcgaggctacgaggctacaagacggtgagacggaggctcgcatgcgagcccatgggggctcgcatgtgagctgtgtgtgtcaagtggaagtgtacacaggttcatgtgtgttcgagtgggggctcgtatgggagccatgggtatgtgtgtgttgttgtaaagcccgcttagtnnntttggaaattagcagttatttatgtt

SEQ ID NO: 30025 - DNA, 4522 bp, Cannabis sativa
  modified_base (179)..(184): a, c, t, g, unknown or other
attctttatgttacagaaccggttatatttcaattttaactagtttgagttattttgtgttatttattttcattcattatgttatagaaccggttgtaagttaattatgattagtttgagttattttttttaattgtttttattctttatgttacagaactagttatatttcaattatnnnnnntttgagttattttgtgttatttactttcattcattatgttatagaaccggttctatttttgtttatatttgagacaactacttctcatgacttttttcagtaactttttcaaacgacggtgactttttcggtgaaagtgacttttccgacgagtttttcggtgacttttccgacgacttttcggtactggtgacttttcttgcgctggcaaatttttcccgcaaaagttattattgtttacaaacatggaatttccatatttttgtaaaaaaatatggcataaaaaaactcataaatgtaaaaaaacaaaaaaaaaaaacccatagcccttagcattatttatttatgccataaaaagtaaactcttataatcttcccatatatagtataatttctactaatagaaaacataatatactgtattaagagaaatttaattttctatacttacacatacctaatatctttcccttaaatccataataccccatattccccataatacccctctcatttgaaatcccaaacccaaatcgcctcctctctcttcctcttgccaaaccgcctcctctctcttcatctcgcccaaacccacggtgaaccgatcccaaatccatagaattaaacccacagtgatggcgccccctgctatcgacggtggaggcaatctcaaacccaccgtgacgtgacggcccccccttgctctcgacacaatgtttaaggtgtgtcccttttattctcttttttttttgtgagaaagtgttaaagattgtgtttttgtttgtgaaacctacattttgttcgatgtagggaaattttgttaaacaattatgtcggatctatgggggaaatcgcaatgcagtctgatgcaggaccgatggtcacgcgaatggggtggggaagaagaagacccgatgggtctaataggggacccgatggggggtccgatgcttgtgctgaagtaaaattttcatttgggtcctatgggcccgatgctgggcccgatgggggcctaatggtgttgagtgttttttttcaaaatggtgttgggtccgatgggcccgattcctatgtgttgttctcattttttggggtgttgggtccgatgacgctcgattccttttatacaggtttaattttttttttgttgggcccgataggacctgattactttgtgcagttcttaatttttttatgttgggtccgatggacatgattgtgggcccgatggccttgtaaaaattttaattttcaaatttttttaatttttattttttttcaaagacctacacatctaataattctagtgtcggagcattacacaggtcgtgtcacttggcgcgatggtagttattactactcaaagattaaggccaaatttgaagaattcagactatgggatagggtgagggaatccccttttaaaaaattcttcgagagagagcctttacaatttttaggagcattgattcatcagttgatgtaaaatcaaatctgacaagctggacgaggtacatttttacgtggggaagaaaagatgtagatttggtagggtgaactttggtttggtgaccaggttaaacttgttgcccgaacctactgaggaagaaattaaagagaaaggaagttcagaccgattgattatggaatatttcaacgataatccttccatcggctttggccaactgcgtagagtttttgagagctgcgcaaaagttgatgatgtctacaagttggggatggccttgtttgttatgggcgtcctcactggtaaggaggagaagactgttgttcctccttttgtcataagaatagttgacaaccttccactcttctacgattactcgtggggaaagatttcgtacaacaagctgatggaaacttgtaataaagactacttagatgtgaagaataagatgcttaagaagattgaaaagggagttcatgagaaggaggctaaatactcatcttacggctatactgcagcgttgcagtattgggcatacgaggccatcctggagctgggaaacgagtatgcagtgaagaagtcacatcgcttttcgagaatggtgaattgggagagtaagccgaaaatgacactcgggaaggacgaagtgatatgattatttgctagaaatgtatgtttcttacgctttatgattaattcatattaatttccatcaattaataagtttgttttattttttagttgacagtttactctatgttatgtccccgagcgaatgagattgagtttgtgagttacatcactggcagtcaggcgcctttatttgttgacttggaggaacttgtgttgggtgacaatgggcaaccaacacaggatgctttgcgaagccaggccaaaaagcttgcctcgacattggaagaacgagcggatgcagcccgaatatttagagactgtacaccatgtgcaccgtctccaccacgtggaccgttttcactaccagatgagtctgctgttgccccatctgcggcatcacaggatcctcgtcttcgcccatcagcatttattcccagcaccttagaggctcgcgaaccagtataccttgccattttggcaaggttggagactgtggagagggagcaaattgctttgagggaagggcagaccactctgctaagaatacagacagcgattatggatcagttgaagaccataatgagactcttgcaagatcctggaaggccgacaccaaatacacagtcacaaccacagccacaaccacaaccgaaagaagaggctcattcaccggaaaataaattattctcccaaatgattatagacccgatgatgatgatatgttgtgtacacctgagaagacgaatatcaccagcatcggggatacttaggattctgaggtacaggtgttagagacagctccagaactagtggagaactggaggaagagaaagcggcctaggtggtttgatgagtacaatgaaatgaaaaagaagtccagagaatcgaagacacttgtgaatgtggacccacttagagtcgttgatcaaaagctgctcacttttcacagttgggctcggccagattgggaacaagtactcgagagagtgtttctttgatagacacgatttagcttggttcctcgaactacatactccaaagacatggcttggagacaatgtaagtttttaagacttttttacgtctttggtttttaaagactttatctaaccttcttttttatttaatctctgacatatttaattttcataatttagctttgtgatgcagcatttcatttgatgaggaggcgacaacacttttatccggaggtgtacccaaatagatgtgtcatcatgccgcatattttcgcatcaagagttattggtgttggcaagctgcgggtgataaccacactaactttcagtggggtgacgacatattggatttgattcgaggggataatggccaatacttggacagttgaaagaataaggaaagaatatatatggtcctcttctttgattgtgcaaggcattgggtgacattagaggtagactttgatcattggttgttgaacatatttgactcgagcctcagatcgatttccctggatgaattgaagagtcacttggcattgtgggaaaagatattcccaagtttgatgttgcagttcggcctattcgagagtcatgaaatgatcgtcatgcctcaactaaccgtctcagagagctaggttagaacttttacttcaaagtcatcgacgggagcattgtcgatagatcgaatcaaggtaacttaattacaattgactttttattatttaacttgaatttaatttgcatacttttatttatttactttttattgtctcatacagcagtgattgcgggatgtgtgtgatagagcacatcgagcatagtatgctggatcttacgtttgataatgtgaacaatgacaatatgaaaaattttagggagcggtggtgtttagatttgttttacttgaatttagcatgaacaattatgtttttttttttaatttctatttattaagataacaatgtaactagtttttttattggtatgtttatgttcttttattacttcataacaattttaggcctttctttcatgcaacaaattataataattatctaaacataaaatatcacaaattctaatgttttaaaaattccaacatgaattcaataacaatacataacagtacaacacataacattatgactaaattaaaaattgatttttaaactcgataggtgcaagtgcttctgttgtgccccttggcaccgcacttgccacaattttgtggtatgataatcctttcaccattacaag

SEQ ID NO: 30026 - DNA, 3646 bp, Cannabis sativa
  modified_base (2062)..(2068): a, c, t, g, unknown or other
ttattcataattatctaattagggttttgctaatctatttcttaattctagggtattacatccatactagggtcattttggtatttgcccaatatagtcattgcgtactccaaaactggatgtgtgcattaggggtgttcatcaaactgtccataccgcataaaaaatgcgatttgaaattttttgcggtgcggttgtagtttgcatttttaccaaaccgcacggtgcggtggagtttgtagtgtcaaatttaataattgcggtttaaacagcattgcactatatattacaaagttactaattttttcaataggatttttattctttctttaatataagaataaatatatgtaatgtatgtgtatattacattaattcttagagacaagcaaatataatgatttgatgattaatatatatgttatgatgttaagactttaataatttcttttttttttttttgaaaaagagaaactttattcaagaaaaccaatgaaagcaacctacaagaatctaatacaaacaaccgcttctcaacccaacaggggcttagaaactctactacctagatatacattacaaatttgagtctcaagattgttcttactaacacccatacaacccatgattatatacttcacaccatttttaatattttttactgatataacatgctgttttacaattacaatcaaagacacaataatttctattcatccagatgctataaatagttgtcgagactactgcattcttgactttatcttgtattgatctgagggggtttgaaaacaagtcaatccaatctttgtaactcttcggctactcaaaaacttctagccatttgctgatttcaacaaagacttgctttgtaaaaggacagtccacaaaaagatagccatgcgattcttgatcactgtcacaaactgggcagttgacagaagagagaggaaacaccttactgagatggtctttggttagcaattgtctattaattacttatcaacaaatgaatctatgcttcgggatgaccattttatgccacactctagcatcatactccactttctgcgcagtaacaagatgagaatagaagcttttagccttgaacttatcctttttagttgtagtgtgcaacccttctttgtcaatggtgcttctaagtcttaaaagctttttgaagtaccaactagcattgttcttaaaagcaaccaactaaaaatcctacctcttcaagtaagtagtattaacccatcttatccgcagagtgtcttgtttttttgatatggcccaaatgaatttggccattagagtaatgttccatatcttaccatcttgaaagcctaaaccacctagattcttaggaagacacactttctttcaagaagagaggtgaaatttgctttgattactcttcattccccaaataaaatccctacaacatttatcaatagctatagttattttttgaggaagaataaacacattcattgagaagtttcttatccctaacaatatagagtggattaattgcgctcttccaacaaaagataagttcctactagtctagttatggaggttcttatagattttatcaagaataatgccacaatctgaggcttgccatttggttgatcttagatggactcccaaatagttgagagaaaaagagccctccttcatttgtatcagccccaaaatgaattctttataagagttattcacaccacaaagtaggctaaagatttatctttattagccgtgagccccgtagagtcactaaaatttatgaaaataaattaaaataagtatcaaaattaacaaaaaataataaaaagatatttttaagtgatttttaaaaattatcttaagtttaatgtttttaaatattagagtgtattaattattttgtagggtgtaaatacaattttcctaactatgaaaaaaactctcattaattaaattgctaatggtaattcaatctagcttttccatggatgtatatatttatgttatgagaaaattacacttactatgatattttaaaagttcttatgataannnnnnnacatttaagtttgaccaatttataaggtattctttttttgcttttaagtctttttatggtatttgatatgccatatatatgtaaattaggtttttaaatctcatatttgatgttttcatttgtttaggtagttttatttgtcactgataccgaaaaagtcgctggagtttgttgtcaatgccgaaaaaataactagagtagcggtcggtgctggaaaaatcgtcggagttgctgccggcgccggaaaattcatcgaaattggcattgtcgccgaaaaaatcactaaaaaaataccaagaaactaagaagaaaccactggtttcttgattaagaaaccactttcttggtgatttttccgatgacaatgccaattctgacgacttttctgacactggcagctactccgacgacttttttagcactgacagcaaactttgaaaaagtcgtcagaattggcatagtcgccgaaaaattaccaagatacttgtttcttgatgaagaaaccaattacttgatgaagaaaccagtttcttgatgattttttcggtgatttttctgatgataataccaattctgatgactttttcgacgccggtagcaacttcgatgactttctcgatgtcaacaacaaatccgacaactatatcaataccgatgacttatttcagttaactttattgtttagcatttatatttcgttatgatttttcatagtgtcgaatctggtttcacaggattcataagcttgaagctggttttacaacttttaagggttctgtaatgaggttgctctattttataatgttgttgtatattttttattttaagtttctttttattattttgtttctaggtttgaaactcattttcacacttatattttgttttagattattgttgtgcattgtgtgttgttttgtttatatttatgagtatttttttgtgttttttttctcaatttggttgattgatgaaactggtttcaattattttcattgtatatcatttttgatttgttttcataatctttattattgttgtgtgacgaaactagtttcttgatgaagaaaccactttcttggtgaagaaactagtttcttgatgaagaaaccactttcttggtgttttttttggtaattttgctggcgacaatgccaattatgacgattttttgacgtcggcagtaactccgacgacttttccgacactgacagctactctgacgatttttttgacacagacaccaaactccgaaatagtcattggaattagcattgttgccagaaaaatcactgagaaactggtttcttcattaagaaacaagtttcttggtgatttttcctacgatttttccaacacaatgctaattccaatgattttttcggtgtcaacggcaacttcggtgacttttccagcaccggtagctactcctacgacttttctggtgtaggcagcaaacttcggtgtcttctccgatacgagtgacaacttcggcgatcactgtagtttcatttgttttatttttttttttaaaaaataaatatgaagagaattttaatattttttatggtaattcaa

SEQ ID NO: 30027 - DNA, 2226 bp, Cannabis sativa
gatctcgaattggccaagctaaatggcccatttaagtagttggcctgatgcttcaagtttttacaaaaccttccgcagtggttgatcggtgtacacctttatggggtgtgcctggaagtagtggctcagctttctggaagccaagagcaagttgtatgtcagcttttccatgagtgggtatcgactttctacgtcgactagccttttgctgatgtagtatacagggtgttgtacactgccttcttctcttctgaggacatcactcacagcgcgctctgtgactgctacgtacacgcctagctcttcattgtctaggggtttagacaacattaatggttaggccaatttcttcttcagctcttggaatgcgttttcacattcctctgtccactcgaattttttgtttcctctgagaatgttgaagaagggtatgcatttgtctgtagacttacacacaaatctgcttagtgccatttaggctttatacttccttgatagttgtggctcttgtttggatttgcttttattcccctagcattgactatgaagccaaggaattttccctagcttatgctaaaagagcatttaagggggttgagcttcatgttgtagctgcgaaggatttcgaaagcaccaaactattgacctcaaaaaagtgatcaaccgatagcggggtcatacagatctaatgcttgccacatgtttacacaaataagaatgaaaatcaatagaaaataagatttattatagaggttcaacccccttgtgatagcgagtaatgacctactccccttttagttgtattatatcgagggaaacactatccaaatcactataggtgggatttgctatagcaccgttaggattacaaggtatgaatcagtattggcaaaactcaagtgttgagatgtgctagggtaggcgtgtgaaagagaagaagtgaggaagagatagtttatcagacacttaggtttagaagtaggtttctagcttagaggcaacttaggtttttagcttgaggataaggcctttataagggaggcctaaaaccctaggtttagagttcaaatccctcagtattcgtataatttgttagatatttacaaaagatcgaagtgccctcattctagatattattcagccattttgttgggctttaggggccaattcccagcccatagctgttatccacgtgtagaagtgtccaggaaagcctgtagtgcactccttggctagccaggcccctatggaggccagactggctgaccatggttatgtcctaaggctggccgactagctcccgagagggagctggagctggtctatcacttgatgcccgtttgagtgttgagatcttcgtttattcggatgctgacttggccttacttttagcaagatgtactgacatgttgcactggttctatctacgtaagcatgtcacgtaatgaggataaaagttgggataatacttatcttttctcaataataccatttttctgttctaagtctttaaatgttattttttctatttaataattataaataattatcaaataaaattaccaattaatttatttattacttagacttagcaaagtctcttaattaataaataaactctttgtttcttttttcttctcaaattcacttttgcttagtaaaattcacaaataagatttagtctcatttagaattctaattgattatctaattctaattaattgcactcttgattacatagaacattttattctccgagaatagtttggtattaattatcaattatttcaatctaaataatcaatgatccttttagattgtctacattgatactgtgttacctaataccctttaatatattttattcttaaacacttgacttcctataaataatattttgggaaactaatattacaataagagctctttcatttatgtctattacacaagctctaaggaaacatcatttcacttatatctagttatggaagctatagattccatgtctatgatagcactcccactcaaatgtattgccctactctcaagatgtaagtattgagccaaacctactggtaggcttcgaacgaacaagttaaagaacaagaataacacagttaagccagaagctaatcatctcaagattaagatcattgattgattaagactcatattggtacattttaagccttatttatacatgtataattaatataaattaaatat

SEQ ID NO: 30028 - DNA, 3669 bp, Cannabis sativa
tagcaaagagtgtgtgcagtcctgacccaagcacaagctataaagacccaaaagagcttagatactgaaaccacgtgacctcgaacagcttttgtcttcaatctatgatagagaagagaaccatgccagaagaagacaaattacattcgggtcagaacatgatgctgggtcggttgcccgcataagaaataaacgagggttattttcgtaattgagtgaaaaccccccatgttgagctacatagtaatagtagactagactagatactagatagatagatgaaatccaaaatggcaaaattgaggattttttaaatcaaagggctttattgtaagttggtatgcatataagcccatgctcttctttgctcttcttcattttactctacgcaactctacgcattccatttcattccatttccatctctttccatctctctctctctcacacacacacacactctctcttccttactcactttcactttcattctcattatctctctctaaaagttgcagctgatcagtgagttagtttgtttccacaatgagagggattgttttactgtcggtgctattgttggccactttccaactgaccttgtctatcacagatggtaagcaacttagttcacttcaaaataatgttttcattttcccatgctcaaaatatgtgctttatgtatatatatgtatagacactacacacacacacactttgctcaaaggaaattctgattagaaaaattagaggatggccaaaataatctcatagttataaactgaggagttggagagttcatattgtatgatttgaatttcacaacggtagatttgtcatttttgaatattggtctatcatttattggcttaactttgctgcaaagtagttaaatacactttgcttttttggcatagccaactatacaggagagggttttttatggttttctattcggtatagccaactagtccgtctgtgtgtacttgtacttaatttgttggcctttaattggctctttgcttttcgctcactgcacataaaaagctcacgtgggttggtttgtgaattgtcacaaatggtccagtcagtcaatactacaaaagctagctgactgggtccttttccacccatcaacaccaaatatacatacaagaaaatagaaataaaacctttgatacttaaacttttaaaaaaatcaaccgtcacaaagagaaaaagaaaagttcagcaaaatgttacataattatgctcaaccacatacatcattaaattagtaaataattaaatcattaagtgtgactccttatggatatgttatgaatgattgtgtaataattagttgtaaggtgttgctttctgagctatgtaatgtgttacattttgtttgcattgtcaaaggatctgcaaacaaaatggctcattcttgccagagcctcttgttgttttggtgttgatcttacttttactggaagttttgttcctactaatttgtctctctttgattttggataacttaaatgtttgtgttaacaggattattggataatgggaatttcgagctgtccccaaaggcaacagaaatgaatgggacagttgttaaggggcgttacgccatacccaaatgggaaatatcagggttcgtggagtacatcaagtctggccaaaagcaaggtgacatgttgctggtggttccggagggtgcgtgtgcagtgaggctgggcaacgaagcctcaatcaagcaaagagtgaaggtcagcaaaggccagtactactccatcaccttctgtgccgcgcgcacctgtgcccaggaggagcgcctcaacgtgtctgtccctccggactttgggattctccccatacagaccttgtatggcagcaatggttgggattgttactcttgggcttttcttgctcctcttaatgaggttgacattattgtccataaccctggtgtcgaggaagatccagcttgtggtccacttattgactctattgctcttaaggctcttgtttctcctaaacccactagtggtaagttttttacttggtgatacaattattgggtttttttctgttcatataacacatactattactcactttgtcttgattaattattgtttattttttgtccatctaaacttctctaatgagatggggatggatgaatcttcactaaatacatgacattgcttttggttttttggtcttttaccacttaactagatgtactttcgctatcaactgattcgacaattttgtgtatttttcttgaaccacaactttttttttggtatgctgtgagtgtacccatattcccaatgaatatttcagttctttcaccaatacattaatacgattgtctcaaaaatggtcccaataagttattgtacctatccttttgtcctagctctacttggataattgaatctcaaactaaaagttcttttttttttttggtgaaatttcccaacatgatttcaaatttctgaaggttcagctcaattccatggttgttggctcaagaaataattcattgaattcattcaaatccgtaaccaattaatttttaacatgttgtgcatatgtaatgtacacatattgccaaagcttatgcccccattgtccccaatcacatgcacaggttctctttttatcattttcaaaattataataaagtgggccacttttagtgagacatcaaacacttcatatcatttctatatctatatttattataaaaaatcttgaattacaccatttttgtttaattttgtttttcttaatgcagcaaacttgataaggaatcccagcttcgaaacagggccattcatgttcaacacaaccactggtgtcctagtcccaccaaacatagaagatgaccactccccacttccatactggatggttgagtccctcaaggccgttaagtacatagactccgaccacttctcagtcccacacggcaagcgagccgtggagctcgtggccgggaaagaaagcgccatcgctcaagttgtgcggacaattcccaaaaagacttacgtgctgaccttcttagtgggagatgcaaacaacgcttgtgaagggtcaatggtgattgaggcctttgctgggagagacactgtgaaagtgccttatcagtccaaagggaaaggaggttccaagcctggcttgctcaaattcgtggccactcagagtaggactcgaattatgttccttagcacttattactccatgagaactgatgacttttcttcactttgtggccctgttcttgacaatgtcagattggttagcctacgtaaacctacttaaacatgatcatcatgagtgagtttaatggctttggggagttatatataaatttaaatatatcaatatgtatggtgaatcttgattttgggttatgattgagtggatacttttctcttttgtgtttcgcaagagaaatctgcagagggaaattagtgtgagttttagcataatctgaaaaataaaaataaggggtaatgtgttacgtatttatatatattttatattgtgcatcatgtatactaaaggcgaaggatatcagaatagtgttatgatagtttcattttgttgagtgttttttatgtaatcctgcaaaatttaagtcataaactcgatatttattaatgattt

SEQ ID NO: 30029 - DNA, 1476 bp, Cannabis sativa
  modified_base (988)..(1011): a, c, t, g, unknown or other
aaggcatttagccactattttatagatcacgttacataggcttattggtcgaaattctgacattcgggttggctttgagatcttaggaatgaggaaaatgagagtgtcattaatgtcctttacttgcatcccatcattaagtattccaaggcacacttttgtcacttcagccgcaatcaaatgccaatacttcctataaaagagcccaggcatcccgtcactgcctggagccttttgtgggtgaatatcgcacatagccttgaagacctcctccttggtgaaaggttccagcaaataatcatttgtagctcgggaaatacggttaggaataattctttggaaatcttctaacgcctccttattagccggatgagaggtgattaattgcttgaaataatcacatgccacccgacctatgtttctatttcccgtgacccattgaagctgatcatctagtaagccatggatagtattttttgctttcctattactagccttcctatggaaaaactttgtgttctccttcttttagccataacgctctactccgttgtttccgaaatttctcctccttgtcaagccaaacgttttgttttctttccaattcctgcatttttttccaatctattgcattagtgcttcgggacagtagagctattttatcttcatattcctttaagtgacgtgacatttctagctttttttatcttattccattgttgaagggccaccccacacctacttagccgatcctttagatccctagtgttcaaaatctgcttgtcttgttgccacatcgaattcacaatgttcaaacactcttcatcttcagcccaagcactctcaaagtgaaaacgagttcgccatctagtcgcattattgatctttagattgggatcataacccataaggaggagagggcaatgatccgagttagtacgatccaaatgacaaactttcattgaagggaacatgtcaaaccattctnnnnnnnnnnnnnnnnnnnnnnnnctttcaaagataagatcatttttcctaccgttgcaccaagtaaaatcacttccatcataacccacctccctcaaatgacaactatccaaagccttcctgaaattgtgaataagataacttggtttaggtaggcctccttttttctctctttggctcacaatttcattaaaatctcctccaacaacccaagggccagagtacattcgactaagtcttttcaaaagcttccaagaatgacagcgttgacttggatcggggtctccataaaagccagtaaaacgccaccattgaccatcctcaattctaacgaaagaatcgatatggacaggagagaaggactgcacatatgtttctacatccccagcccaaatcaaaatgagacccccacttttcccccgagcttcaaccgtaaagtaaccaacaaaccccaacttgactctcaaagattctacccgaacattacca

SEQ ID NO: 30030 - DNA, 1352 bp, Cannabis sativa
ctcacaaaatcgtataacacaagttgtgtttttagcaacatatctcctactatgagacaagtaggtactacaataacaatacaataatccttaattacagactaaagtggttcaaaaaccaaattcaatttatatatgtatacatcttgacctggtggacacactattattagccatatatcaataattaacttaattgtaatactagatcgatcgatccatatgatttaattaaaatctgaaaattaagggtttttatatattcagaaacattcaacaagccacgtagaaattatgaatattataatggtatacgtacctacgtaaatgtagatataataccacacatatatgatttatgcagaaggtttcattgagctactccacgtttgtagatataaagaacggttatattatattaatttgttctgattagcatgcatatatttgatattatatgaattcataattagaattaattaattaattaatgtatatcaattatcatgaagagagatgattaagagttttaacctacatattcatacatttatttacatgatagtactattgtaatttatataatggtaccagcggatacacatgggcacacacacaattttggctcatgaaaaatgacaattaatggagactcatcacaatcacagttttgttgttttccgtttccttttctataaaaccatagtactctatcaaaaattgtacaaaggaaacaatgacctataattgggctagcttgagagaaaagaaataaaacaattacttataattaaaagcttcatgtgaggaattagcagcagcattgaatcaattggagttaattattgtctttgaataaggcggcgccggctttaacctttctgatatataaaaataaaatctctgttacaaacagagaagaaaaaaaaaattgtaagttgaagtggcagaggcggcgaccctcctttttatttttttaagttgattttctttcgtcgtgaatcggtggtgacgtatagttaagtcaaaagccctgtgttaaagtaattgaccacagcaaataaaattgctattaagcccctaatcctattgttataatattggaatctttccttcccttgatttgttcacaaacaaaccaaactcagtttgactataaccaattaagaattttgtgtactaacaaatctactaactatctataattaataatcatgtttgcatgtacaattttcaaaaagtgtccacatatatactcttaatggtattaactatgaagttaatattagaaaataaaattccttattttaatattcccagtttgattatttaattaaatgattaattaaatg

SEQ ID NO: 30031 - DNA, 5141 bp, Cannabis sativa
agaggaaataagaaaaagaaaaggatgcttatgcattaaagaatagtcatggaaaaattccaatacaaatacaacacacaatggaagtgtgtgtttctcccaccaatctttcaatctgaaatgattaagaatagaaggaaacatgccaattccccaaagctagtatggcaagttgtggggggtaaactctcgtttattaagggttctctattagttttaaaattatgaaatctgtttgatgtatgcaaaatacccatttcccccttcttctttattcggatttttggttatatctttgattttggattaattaacttaaatgttgattagaagttcagatggctataatgtgtctgcatatggttgtaaggttttcaaaggttcaaaattaatttgagagtgctataccaaagcttcgtgctaattaatggagaaggaaatcagaacagttatgtataattttgatacgttcttgatcactgattgtacaattctttttgaatggtgtttctgtataatggaatagtttgaaaaacatttttgtacctctgcattttgtgtgtttagagtgtttgtgctgagaaaatttagtaatttgtgtggaggaaaatgggttatagcctttttattttattttaaagtttcccttgtcccattaaagaatatattcctctctgttttatatgttttcttttccactttttctatgtgtgtatggattacaaattggtgcttctagttctagtaatactatgatatgaactaatcaaagtctactaatttaggtctcatcccaccaacaaaaatcttagttcttagaccataacttatattagttagtagtttcagaactatatagcaggtagtactaaacaaaagttgttttcatcagttcttgcataatgaaaactttataatcattttgaaaattaaaaaaacttcagttgctcagtcttcctccctctctctgcctttcttttaattgtgaaggagtggattccagattttattccttattcattagaaaatacatgctttcaaattagagacggatacacggctgtattctctatcaatcttaaatatgttttctccttttcagatacccaaataaaataataattgtcctctttacatctttgctagtatacccttcactaattgacatatgtgatgcatggtcttttgttaggatgtcggctgtcaaccctttaaagaaactagcaaaatgtgttctccttgatttggatggtacacttctaaatacaggtcaactttctgctctaaaaattgttttcatctcgtttgttatgaagacttaattgcataataatttaattaatgcttgttatttattacttgaatgtgttgttttccttttcttacattaaaatgcagacggcattgtgagtgaggttttgagaatttttctggttaagtatggaaagcaatgggatggtagggaggctaagaaaatagttggaaagacaccttttgaatctgctgttgccattgttgaagattatgagcttccttgttcagcaactgaattaatttctgatatcacacccatgttctccaatcagtaaaacttatttcaacttattctccattcatttgtctgtgccttctgcatacatatatttgtgctcaaggaaatctattagcacttcctattaccaacgtttgaccttgcatatatatatatattttgatttaagcgtttatatattacaactatgcataacctgagactcgaacccaggacctccaatacagacgcaccctcctatggccacttgagctagcctcaagtggttgaccttgcatatttgttttattgttaatttgttatctaatgactctgaaacaatgagggcactttcgtacccgttgttgtattatgttgtattatatagtattatatttgttattgacttgtgatgatataaaaatgtgttacacaatacaactcaatataatgcggtgtaacaaatgcacatttagtgataaattacagcaacgacttacttttatgtatgctgaaattggtggtgtatgtgatgtttatgactgtgattgcagctggtgcaatattaaagctcttcctggtgcggataggttgattaaacatctgagaagtcatgaagtgccattggcattggcttcaaactctccaagagagagcatagaaactaaaatttcgtttcatcatggtattcgttctcaaaaaccttagtataagtttgtttcttttgcctctggtggaaaggtattttgtttgatatcttcaacttacatgtaggttggaaggaatccttttctgtcatcattggtggtgatgaagtgagtgcagggaagccttcccctgaaatgttagttgcagcaatattcttttcatagcttttgacttttctttaatggttatatagcactgaagattttttttttttggaagcttcaatatcaaagtgtatggaagtttaatttgtagttttgctattgaaggtatcttgaagcagctaaacggctaaatgctgaacctttcggctgccttgtcattgaagattctctgtatgtcaattgacttatagttctgtcaaattttgaattcattttatctttttctacataatatttaagaataaccatgtgcctcgtcacaagccttctctatctcgactgttcaacttttgcaattttggctgtaatcagtcagaagtttaattcctctatgaccaatatggtgcttttcttttgttgcataatcttcaattttcacaacatgaaggtccaaattgtttctattttcctgtttttgttagttttgggttgttcgtttttgtactcaagattggagtagattgttctctatattaataacagggccggtctttaaaaacacgtgtagcatttttcaatatagttctatatgctatatttttgcaaattaattttaaagtatgggtgggggttttaggcatgggcctaggccaacctcacctaagtctaggtcggccctgattaataatagactagtgttttttagtttgtagagaagaaaaataagaggtccaaacaaacttatctgttatagcaagacagctttgtgggagaaacttaagttctgggttgctacatcaattaattaaacaaaagattttgaagatctgtgtagtgaatgggaaagcctactgtactagtcttcatgtgtgctgctttgtggaagttagtaacttaggagacccatgcttttagcttttgagtcagtagagtgttttgttttcacttctaacaggttttctctagatcttttgaaacaatggttttcctccaccataagcaaggactcatgtgtatgtaccttttgttatctcagaccaggtgtcacagctggtaaggctgctggaatggaagtggtggttgtaccctcccttccaaagcaatccaactcttttactgcagcggatgaggtgatcaattccttacttgattttcgacctgaaaagtggggcctccctccattccaagattgtaaaatctttatcttatatcaactctgattgctcattttctctgtaaaaactatttctcattaattgcctttttccttttctgcaggggtagaagatactttgccgttgacaccttggcacattggtggtcctgtaatcaagggtttcgggcgtggctcaaaagtgcttggaatccctactggtaaaggctcgctacatttcttttgtctaaaaatttcgtgctaccaaatacttgcttaaatatttttatctgtcattctgatcagtgcagttccatgttttttctttttcagctaatttatccacagatggatgtgcagctctcgtatcagaacatcctgcaggggtatattttggttgggctggattatcagatcgtcgtatggtttacaaaatggtcatgagtattggttggaatccatatttcaacaacactgaaaagactattgtgagtctaattctgtagccccgcttgaactttttcttttcctccattaattaattatattttcaatgcaggagccatggttgctacatgactttgatgaagatttttacggcgaggatttgcgacttgttatagttggctacattcgtcccgaggtacgagtctgtaagaagtttattttattccctgcttaatattgattgtaaacttgaaaaaaaaaaggaccaaatgtttgatggtgatatgaaacaggcaaacttttcaaccctcgacagcttgatagcaaagattcacgaggacaggaaaattgcagaaagagctcttgatcttccattgtactcaaaattcaaggatgacccatacttgataagttcagaggcctgaactacatactcatcaatttagaacttaaaaggtctcatcacccaaataatagttgatctagtctcatctcaatttccatccccactcaccattggttgttaaaagcaaactatttattctacaatgatatgcatttttctttattttcagaaatataattcttctcttggaaaataacattctatacgaaacatccttataagaataataagatttattttagcggaaaagaataaaaagaatcagctccaacatcgtaaagtaaaaaattgtaatgaatttgaagttgtaattagttataattttgtatgagccgtattaaaacaacgaaaatagggccgtattaaaaaaaacattacacatgttaacgtaaattgcaaattatttatgaaattatcttaaactatatattatttcaaatactactaaacgcgcattgaaattaaaattgatcagatttttttctttctctgctctcttgttttttcttttacattttcttttctctcctacctgatataatcaactgctttgattttttttatgtgaataaaggtggcatattgtactgcttgtttctctttctttattttttattttaagtttaaaaaaattttcaaccacatatttatcatttgaactcagaaattgcaacattgcaatttatttttttaaggtaattatttaaacatgtgagaaggttatatttttttgccaccaacaaaaaaaataggtaagaaaactattaaattgaaattaagagtaacaccaaa

SEQ ID NO: 30032 - DNA, 1543 bp, Cannabis sativa
gtggttccttcataacagtcctgccagtgagatatagtcaaaatagcgtaacatttccacaaagatatcaaaagcaactcttttttttttttttgtgacaatatttcttctaacttcatttctatttataaatttgataaaccagttaagatctcaccattatatgccaatttgattgccattattaacacatttgtatacgtaacatgttttcattagcttcgagattttggtgtacgcagcaacaattctaattgacacttaataataaaatttaactagtgcctcaaatttacgaacaaaagtaaaattaagagtccattgttaagagaataattagagaattaagtatgtaaaaattaaaacataaagggctcgtttgatacaccgtgatttattgtattgtattgtattacatagtattatgttggattgtattatattagtattatttaatacaataatatgtttgatattgacctgtactaataagtaaaattataaattattttcaataaactcaaccccaacgtaccccgacccgaatttggacccagaccacacacccagaacatgccacgaactctggactcgacccaaacttggaccttagactcaaaccccaaaccctagccccagacctggaccccagccccgaccccgaacctagacctagacctaaacccgggcccaaaacccaaacctggacccaggtcctaaacctagatactagatccaaacgggtcccggttcaagtgcgagtctagggttcaggctaggtcatagtttgggtctggggtccggttcgtggtttgagtccagtgtttgggtctcgattcaggtccggggtccaagtttgggtttgggtctgaggttcgggcttgggtctgggtctgggtttggagtccggtccaagttctcggtatagaacttgagttcgggtcccattctcgatccgcgttcaggttgggttcaagggctagggtttggaccggggtcgaggtccgagtctaggtccatgtcaaggtaaaggtctaggtccaaggtccgtgactagcgttggagtcgggaccggagttgaccccagatcctttgtaaacattatgatacaagctaatacgagtcatttgttatgtattaaataatacgactcacattgtattaaaatttatagccgtaataattaatacaatacaatattctattcaactatagtattatttgttctttaatacaatacgactcgtatacagtctactaaacgagctcatagaattttcactgctaattaattacctaattaaaaataaaagcatccacacacatcccatatcctaatgctatcaatttagttataatattatctaccaataagataattacttttatataaatagaagataattattctcattattattatttgtatgggcataaatttcacaatggaataggcatcgaaaatgtgcctaaattgtcgatttctgaaattattataccctatactaataataataagaagaagggaatggttagtcattca

SEQ ID NO: 30033 - DNA, 1267 bp, Cannabis sativa
cacagcttcaaatactcagtcttttccagccgattcaagtttccaagctactgctttcaattgtaacacttctagtaatcctgttagggataaatctcagtttgcctctatttggcattgtcgtcttggccatcctgcaaagcaggtgttgcacaaggttctaaattctgtatgtcctgaaataaagtgtaaagatcacagcttttgtgatgcctgtcaattaggcaagatgcaccagtttacattcaaatccacttccaataaaactgtttctccatttgaaattgtgcatacggatgtttggggtccatccttttattcctcaagagatggctataaatattaccttagttgtgtggatgattacactcgttttgtttggatataccctatgcaatccaaatctgaagttactatcctgtttactcacttccaaaatttagttgaaagaaggttcaacaccaaaatcaaaagtgttcaaaccgatcttggcaaagaatacttgcctctttacacacattttcaaaatcttggcattacccttaggcaatcctgtgcccatacgcaccagcagcgacgtgtcgaacgaaaacacagacacgtcgtcgatatggggctcacattgttggctcaggccaaaatgcctctcaccttttggtgggaagcatatgctgctgcagcttacctcattaacagattgcccaccccaattctacaacatatgacaccatttgaaaagctatataaccacaagcctgactataatctcctaaaggtcttcgggtgtacttgttttccccttctcactccttacaatcaacacaaagtagcctttagatcaagtaaatgtcttttcttaggttacaataacactcaaaaaggttataggtgtctccaccctagtggtaaaatatatgttgctagaagtgttacatttaatgaagctgagtttccttaccatgagttgttttcctctaatattacctctgttccaactcccagtattactcccatacacggctttcccatacctcaacataatcctcataccaataattacagagtcaacattccaacaacttcatcacatgagtcaaatgactctgttccaacatctcactcccctaacctcagtaccccaaacactgccatcagctctaaccagtatacatccacagactcctccttaccatatcctttcccttctcagtcaccctctctcacaccacctgttccagatcacccaccaatttctacccgtgacaat

SEQ ID NO: 30034 - DNA, 1297 bp, Cannabis sativa
gctgatgaacgaagttaggtaggtagactgttgaggattgaggcaggtaaggtacttgaatggaagagaaaaaatagcttttagattttttatttttttgaaatttatctaaacatcaaatatggactttaaaaattcagtttacacatacatgacatagaaaataccataaaataatttaaaaactaaaatataccataaaaagtagtcaaatctaaaagtatcatatttttgtattaaagttttaaaaaactatattaagtgtaatttcctcttttatttgccacaaaatattgtggtagttttaaaagttttcttctctcaaaaagaaaaaaaaattattttctttttccaaagaaaaaatcatggacttttttttttccttataattacccaaaaaagataaaagtaaaataaaataaaataacgtttctacagtatttttaatatttttccgaatttaaagatttttttaaatatgaataattattttgatgttattttagcaaatttgtgcattgtttttatgttgctactatattatgttgttttttatgttattttttcattaaaatttaaataaagaaaaaaatttgtgaaaatgtaaattattgtccataagaacttctggaggctggtgaagactacattactgaagagtacactaaggccattcatttgaggaggtaaggcgcactaggaaatcgataggtctctccaccatctgtggtggccatggccaatatgaagaatttactcaaccgtggttacttaaggagtgtcgaatgcttccttcctgggtcatactttgcttaatcgaccttttgatagcattgtttggcttcttatatggtccaatttcaaactaaagctgttatatcttgaaatttgggataatttcaaaacaaaaaaaataccgtttgtagtttgtacagaatttttaataattttatgattttaaattttatttacataaaatataatctttttttatgttgtattcttgttattttgttattaattttttttattaattgtgttactttgttgttattttgttattgttttcttattgttttatgtgatcttattattttattgtgtttttataaaatacggtaaaaatatttattaaaaagaaatttgaatgtaaaaatataatttttttacaaaaattaatatttcatgtaattatctcttaaaattttgccatgaattattatgagttgtattttagttttatttttttcaaatgagaaaatcatgaaatagatataaatatatagatttaatggaa

SEQ ID NO: 30035 - DNA, 1340 bp, Cannabis sativa
cggccaaataggcccacatagtttcaggatcggccttaggctaagacgggctaagcacacgctaagtacatataatttctttttaataaaggtccaaaaaatttgttttcctaagacctattaaagttcaggaccggccctgcatagtttacattggtttaaattcattattcaaccgttttaatgacactcacgagtgtttgttatgggagtttaaatttttgggaatggaaatgtaaaaataaacttgtctaatgtgtttgatatgattttagtggaggatttatatatgtgtaggtcttattattaaatttaattttggggtaatctcaaagagaccatcaacaatgattctccctcttgatcaatttgaaatattgcttgatgtagttgaattagctattataagttatcttttttaacttaaattaatcttactttacaattacttggcacacagggtaacttaggttgggcctatatgcaacaaggaaactatcaagcagccgaagtagtttaccataaagctcaaacaatcgatcccgacgcaaacaaagcttgcaacatgtgcatgtgcctcatcaagcaagcacgctacactgaggcacaagccgttgttgatctagtcctgcagcgcaagctgttaggatcagatgaaccgaaatcaataaaacgagccaaggaacttgtcaaggaacttgaaaaatgcaagtcatcaagtacaatactcatatcctcatcaaattctttagggttgaaaattgaggatgcttttcttgaagggcttgatcaatggatgaatcatcaatggacaccctctagatctagaagactacctatctttgaagagatctcaccatttagagatcaattggcttgttgattgagtttatttatagatatagtttgagatttaaaatgtaattaggccttaattatatatgccttgtagtgttcatggtgttgtttgatatttagcctaggctaggaaaatgtgtacctagtttttgatgtattccttatgagcttgtaaaaatggttgaataaactacaaatatatagttatggaatttttatttgttgaaaaaaaaaatatatgaagtaatttacaacatgatgttgtattttattttctacttaagataacaaaataatagtataatatatattttaggtacttttgcagataaactttgtatgaaaatatgtgttagtttttatagaaaaagcataccaggtgttaagttgaacactaaacaagtataattttaacacaattttttttttctataccaaaagttaattctttattttttatatatttaaataatacatatata

SEQ ID NO: 30036 - DNA, 1688 bp, Cannabis sativa
  modified_base (1484)..(1513): a, c, t, g, unknown or other
tctgaaaagagctaggttaatttgaataatctgtcattcacaacaagaactagaatagtaattaggcattaataattgggttaatctatcaacatgattctctccctatcttctcatcttgattaatttttattgtctctttaatcttcctgaatttttattcaattattaaactcaagaaatattgatttgccaaatagacacatagatttagtctagtggtactcaatccaattccctgtagttcgacctcatctgtgtgagcttactacttgattacatgcacttgcgtactatttacaatttttgtaacacctcgcgggagcaaacagtcttggcttctagaatggaatgagactccagctcacgataccctctgtatggccaacaatcggggagacttctttcacggagaccttttccacgaggttaaatgcctttatcttctcgagactctcaatgaagcacttgggtggcctaatgactccttgaccttctttgattactatccacgtgtcgtgtttacaaaaatatggataacaatatatatatatatggtagtctttaaacgtccattagacaaaaaggtcaagaagcacacatcacttcaactttagagtaacctgcaagctaggtgatgtcagctaaaaaaaggagaagctgaactagacagacaagcagaagcctcatttataatatttatatggtatgttctatgcatatcatttgtgtttgtatgtctacctacttattacatttataaatatactatgtctgcctatctccttccattatttacatacatgtctatctccactaatcataaacatgtactatgtctgtttatctcctcccattatttacatacatgtttatctccactaattataaacatactatgtttgtctatctcttcccattatttaaatatatatctatctcctctcattattcatagacaaatatttatttcctctcaatatttatctacacgtccatctccttacaccacatatatatatatgtatgtctgtcttcttacacaatatatatataaatgggtgcactcttaatgggtattctccattcatgggtaatattatgaaaatttgagtttttatgcttactttttcaatcgaattaaaacatctcatttttatattaaacgaattaggattgttccatcggctgaagaaaaaaaattaagaaaaaaagttttttgacaaaaaaaaaagttgaatttggcttaagtatttatataaaaacatatttttgatatagtgtaaaaagtgatattttttttaattaagtataaaaatcaaatttctcttttattattcgtcattagatcaaaatctaataatttaatatttttaaaattaatatttattgttaaattgtttagtaaccatcaatgggtaatacccattgagaagtgttctatttatgcttatctccttacaaacatatatatatatatatannnnnnnnnnnnnnnnnnnnnnnnnnnnnnattacccatgaatgggtaaaattagaaaattgtttatgcttaattttttttatctaattaaaaaaaatttatatcatatgggctgagattattccatcggtaaaaaaagaattttaaaaaaagtttttaagcaagaaaaaataagagaagaaaaagttgagtttgagttaaatat

SEQ ID NO: 30037 - DNA, 2468 bp, Cannabis sativa
cggctgccgcagctgctgctgcaattcatgttcagcaagctcaagaatcgtcttctgaatcgtcggaatcagaatcagatgactccagccttcacaataatgataatagtaataataataatagttcaaatgtattccaaggagtattttgccgagacctggctgctgttggtagtttgttgtctcaggtggggtttaatcgtccaattcaagtcaagtatgaagctttgagctgctgaggtccgatttagtttctggggttgggtttagccattaagcattaccggcaatggggattctctttctctctctctctctctcactctgtacaaaagaaaagaaaaaccaagctctaaaaaaaaaataggaaataccttgccgggaaattttgtcaccctattctcttttcttatttctggtatcaattgttactgctactactactactacatcatctacatgtacagatttcagaccgaattctcttcctttgaatttttactttagcgtacatgttttcttcttttttaatttttattatactttaattatgttataattagatttgattttacttatttgcaaatcagtcaaatcgattattgagtgtgtaatgaaatatgatcaaattcaaattctaattttttttattaaaaaaagatgtatttttaaaatggattataataacttgcatctttggaaatcataatggcttgtggtaaaatgaaacggtacagtattactcagtattaaatggcagagagggcagatggaaaaagtggaaaaaagagtgatgataaatgggagagatattaatggctaaagcctttggattcttttccatgtctttatccggtagtattttagttctcctttctctcactctataaatatacatgtacaaatatttctatctatatatctctgcttagtctatccacgcagctgaatactttctgacattccactagatttcattacccttaccctatagtgccacaccccaaatcttgtttggtacacacatgtatgtaatgtacacaatacacaatgtgtttgtgttgaaagctatatggccttgaatcttgatatatattataataaaaaattatgtgagcactttcacttggcttggggcacttggccatattgatatggttgggaaaatgtgaagtgataatgtaaggtcactcacaggggaaaaagtttgtcagttcattattattattatttttctttctttatttctttcttgaaagcaaattttagcaaaagatgagtacagaacagagtagtactactagtaagtaatagtacttagctaaagacccagatggaaacaaaagaaaaggtatattaatattagacacttaatacaagaaataaaagggtttggttattaggaaagttcatttcagccttaagccactttgtgattatgatcattgtttttgggcattagtcccgtactacaatgcatacttttgtctctttgttcttgcttatttgtacaaatataaagaagggaccatagtccataaccctagaagtattagatttagtagtacccatctcgataatggagatgcctgtttggtgtccaagaaaattgattagaaaaagaaaaaaaatgaaaaacacagtttaagtaaatgggggttggaagatctatttaatgtgtttatatctgtttaagtgaaatgacttttaagaaagttgttggggaatcaatgaggtttccaaccttccaagcctaataagatgagagagaaagagagaaagggggtagcttttatttatcttaggatttatttatagcgcaatggcttctattataaggcaaaaagggtatgtgttttgccccataaaaagttaacatcattatgttttattttatatttttgttctaacaattaatgttgccaaaacgaattttgtttttgctttaactatctatcaagtaaactctctgccacttaattcattgtggtaaataaatggaagttgctaggtatttaatgcttcttttttctttttaaattttcttttctttatcaatgatcagatcagatgagcgaattttcattcatttattgtgatataaattatgataagaaactcataaagaatcccaactgaatagaaagcgattcaagaaaacttctgtctcaccaatttctcacaactaagagagctttttccacattgagaaaaaccatataattttaaagcaatttcaccattagttgtttaattattgtttaaagtaaattaaatgaaaaaagactaaagggttactaaagaacaccataatttgtgtattaaatttccttccttttgcttgaagatttccagtgatttgagtctctttttatctcaaagaatcatctttttttttttttttggcttttgtccttttaagcaactcaacaattattcactcactatattaactcccccaacccacc

SEQ ID NO: 30038 - DNA, 2238 bp, Cannabis sativa
taaggacttgttttacttaaaattgttaaataagctatagtaaattagcagaaaatttattcttaaaaaaaatctgggacatcatcgaatatttttagtgtatattggacattggtgctatagccgtataatttagtaattatattggcctattcgttacttttttatttaggaagtattctatgtcaaatattatgtcctcaacagtcaacatgcacattatgaaaagaactaagtattgatcagcatatgaactatatatataagtttcggttttgacattttcctcttgctattttatttatttgtcttcttcacatttgtgtgtcaggtacacaatatttgcttttatattttgtcactcacaacatgaatcaaataacacaactcaaaacctacgtacctatttattaaacaacttatttttgagttgacacgcttaatttaaaaatgacacgacaatgatctatgtaaaaatatacactcttaaatttattatatttattacatgtaaactatttttttagataaataagacgtaaacatgttaaatagtttatacatgtatcatagaaaaattgttataaacatattaataagtttaatactagaattaatcatgattatctatatgaacgtgttaaacgggtcgggtcaagtcacttgtttataaacagagtgaatttgtattttaattttcaacacgactaataaatagatcaagtttgagtttaacatttacttgtaatacataaccttcaacacgacactgaaacgaacatgacccaataccaagaatttccacccctactttcactcttctgtctcttctctttttcttttttttgtctaaatcctatctctttcttttactttctcagtattatttgtaaagtccgaaacctttcttttacgtttaggagtgttcatttaattcaatttgtactgttttgttcataatacattcgatttgcactaactgccaattttatattttggataatctaattcgtacaagagctcaaatccaatctaatcctcaatagtgtagattggatcaattattctgaatttgttacttttttaatattaaactatttaatatttattaaaatttaaattatttttacataaccaacaacaaaataaaacaagttattattattttatttatctaacaacaaattaaattggtaaacaaaaataacaaattagaaaaaaaattgcatgaacaaattaatatatatttgatatattaaatttttaaacatatgtacatatgtattaattttaagttactatgtttttctttaaaatattattaatatatttataaatctttaaatataagatgaattagttttatatgttaatcaacatataattcttacaattgcattttttttgctgaatagattattaaattggattaaatagtttataaaaactatagaattagtcatttagttactcaaactttttcctcaagtaaccaaaatcttatttttgttatgttaaaaatgaaattagttataaattgtaacattttcatgaagcccaaattttaaatagcattatatatgattatattggttgaaaataagtatactcaaataattgactgaagttggtattcttgtaacctgatagtaacaaattgaagctgaaatctaaatttttttaccaaagtagaaatcgtattaccttgaatcggttgacggcttgaaataacactcctaacttcgggaagtgtgtcttcaacgactgtaaacacttttatttcgaatttccctctaaatagaaaattttgtaagcttagtacacatccaatctcggctgtatatcatatcattaagctattacaaatgttctaagatcttataatcatcatatctttcaaaatactttccaaatacactagagccaaattagtgattattcatttgtaagtgtgtacattttatatctaggtttgtaaattattcatttttaagtgtatacattttatatcaccaaaagtccgtattggtgacattggcaattcacgagaataagaaattgagactacaacaatttaggattgaaaggaacaatatgtttgtgataggtttaggtaaaaccttagtgaaaactacctcaactgtaaaaggattagtcaagtccttaatttggttggcttgttagttgcactcaaagcttacaactttgaagatcaggtggctgaaattccaccaaact

SEQ ID NO: 30039 - DNA, 3222 bp, Cannabis sativa
  modified_base (673)..(674): a, c, t, g, unknown or other
  modified_base (1365)..(1366): a, c, t, g, unknown or other
ttaatggtattagtagtgaatgtaatattgtatgatctttttgatcacattgccttgtgctttgtgctttgatcacaaacttaaaacattgccttgtgctttgtaaatggtattagtagttgaatgttttgttgtatgatgtttttgattacaggtttatatacttgtgaaacactatatgttatctttttgcattgttttgtgatctagtattaccaaaaatagaattacaggttttgtttcaaatgacacagttttaattgtaccaaaaatacaatttcagtatatcctgcagttgacaatacaattatctcaaaaattgtaagtaattataccaaagttggcagtaccatattgcattaagaatttcagttttgacacacaaattgcattaacaacttatgttatacaaacaccaaaaccagtaccacatacattacaaactcaataacaatgacaatacaagtgccatgtccattacataataccattacataatattgaaagttggcattacatagagattacactacttcaccagataaaatacaaaaacaaatacacaagtaatcatcagaatttttctccaatttctcagtacccatatgtgaccacaatcacaaccatgaatcttgatttactttcaaatgttcatttgcttcatacaacatcnnttgatcttcaagtttggttatctttctcaaaagacctgaaattatttctctgcgccttccacaagattcaacatccatccattcaaagaacttacatcctccataagcctgaataaattttgaaacataactactgagtgaatagaaataataaaaaaaaaattaatataaggagaaaaatgtaatccttacacttgaaaatctgcacctcctgaaacgacgacctgggtttgcctatgtgttcgatgttcttgcaattcacgggataccatagtagcaattttgaggttccctttcatggattgaaccaccagctactctcaaccttctattattgacaccaaaactactgtacgaaccttccccatccattcttctcaaccttcgtccaagcttcgttgttcttaagcttcgtccatcatcgtcgttctcaaggcttcgtgctacgatttagattcttaaacattcgacctagggatttaggttgatttagggctttgggttttgagtgtcgataatggttctgaaatgagctaagattttatttttttgaaatgttgaaaggtttaagattaattttagatttgttttattaatttgttttatttatgttttttaaggttttattaatttattttacttattagttttatatttaagggaaaattaaaaagaaaaaggggattaaatnnggtgcgtccacgtgtcacgttagttatactaacgaactgagtatgcatgaacggacaaacaactttgtcgaccttaggtattttcaacgtcaatttttgaagttgaggactaatcggtatcaaccacaagtttttgaaacttttaccgcaattatccctaaataatataatgaaattatataacatataagtttctttgatatacttcaataatatctaagactaatatgtaattgtactaacaaccatttagcaatatcgataaaatggagcgaaagtacaaagctaatcacatatgtactacactagtcaactgtgtactttgatccctctaaaaaagtcaactatatatacatgcaattatgagtaacttttacttctaatgcaaatccttcctcgatatctatacccaaaaaaaataaaaataaataaataaataaacacacactggctatattatattagaaaattcttttattagtattttttttattactatcatttagtttttttaattactcatataatcctatatgttgcagtagttatatagaatcatctttcaattttattttttagaaaattttaaataatttactaaaaataagttcaaatattttgtttagatccttatttttcttatatgtatcatcattataaattatttaaaaaaatttaactaaaaaactcttttaaatatacaaaaacggataatatatcaaaattattactattttaaaaggtttactatagaattactagataataatacatgagtctccacattttacttcaatttttaagtaagggacagctggacaggtacgtttgaaatgtatgtctgtgtaaaatagatttacagttttttttttattttaatctatataagataaaattatcacaaaatcatttatatacagtagaacctctatctaagcatataatataacaaaccaaaaatcaaaaaatatcaatgtaacaataataataataaataatcattaatactatatcataatagaaatattttagagtaagtataattttacacatgtattatataatttaaaataaaattattaattttacataaataaatttacaaaatacatatatagatgtaactatttttatatagaggtatactttgttaatacgacacttagaaaatgtataactaattataatttagaggttatttatatttataattggcccaaatcggaacttgattttttttataacaaattagaaattatttttaaataaaatattcttaaatagaggttcttgtgtatatagcatgtattgttgtatttagtttttgtagggtatagttatttcatgttcttacactgcatcagttcccaatgattttaaaagaatatccattcattaaaataatatatatatttttaaatgacgatgataattaatgcttacacatttcattatcagaataataaattgtcttcatcacgagaatgtcaattatattctttttggtagaaaatcagtataaaggttactaatgggacaataatattacatattaatcataggaagccaactctaattctcaatatatataatcaagagggcaatataatttgtaaagtaataatatatatgctcaattttttggtcttctaagttctgaattatttatttactaattttaatctgtaagtagccataattataaaagaagtgtcaataaataaaatccatttttgtattttaagcatgaatcatgctctttcctcatgacacatgcaagtatatatatgtatatgacatgtcatataattatgcctcctaataaggtgtagatacaatatatacatctatatata

SEQ ID NO: 30040 - DNA, 1595 bp, Cannabis sativa
aaaaattgcatgtgtgggttagtttgaaaaaatggttaaaaaccgcattacctgtaatttttgagatattaatcatgactaatttaaaatattgaaaataaagtttaaatatttgtttttttttccttattataagaacaggtgagtgttcacacaacacgtgtctctcgaaatctttcttttctccattgatgttgtgagttgcatgtattgtcaaatgaaactattttaatttaaagtgggtagttttgaaaatttgatgactttacatgaccctagtaataataatcgaatcctagctaggaagatgtatataatagcgttttgtagaaagatagatatataaaaaagttataaaacaataatgattggaagagttcatgaaaaaatggaaaaagaaaaatgcacacacttgtctccttttctagttttgtaattaattgttggctttcctactacttttttatatttcttatctttaatatttgccaaaactcaaaagtgtacacaccattatttgctggctttgcctcttctttattttttgtataatcatatatatgtatatttgtgtcaaattcttaatttagcatgcatgatcaaaatgtgctaataattttaattacatgcataatacattataaaaactacccaaacaaaaataaaagggtatgtaactaataattaataagtagctatatttttatggtgtatatgattttattctaggtatgtaaattaattataatctcaaatcaatactttttcttatgacggtgtcaatttaagatcattcataatatacttcctgcaaaagttaattaaaacttattcattcatgtttataactaaaattaatataaaaccttaaactgtgaaactaattaatacgtgtttttggggttaggttgttgggtggtgtgaaaagaaaagaagaaaacatttgaggaaaagggtcaagtactgaagtgattagctaatagctactttttacctttgtcattaaggaaaggaggtggcattgatatcttctttctataacttcaaatattcaaattaattttattattgatttgatgtcactctttcgttttgtttacgttgtactactactactacgtaccacttctacgtcacaactaagaaaacaaactcttttataaatttattttgaaggttaattaggattattataggttaaattttcacatgtattaaattatgcccataaatttttaaggtcgttaaaaatacttcttgaactattgagattgttgaatttaaggacttctgcctaattttaataaaaaaagtctaatacggatgaaagttcagggagacatgatttagtatatgttaaaattcgaggagcataatttggtagatattaaaatttggggagcatgatttagtacataaagaattattgaaatagcaaaattgaataaaattaaacaaaagtcattaaatctaacaatctcatggctcaagtgaaatttttaatagccataaaagtttaaggagcatgatttagtatatgataaagattaggggtaaaaatcttaattagtttattttcaataataatattaata

SEQ ID NO: 30041 - DNA, 1542 bp, Cannabis sativa
  modified_base (206)..(225): a, c, t, g, unknown or other
cccattcatcaaccagtccgacaatttctctgattggaatttaacactttttaatttctccaattagaatttcgttgctagaggtgatgaaaaggtatattaatcgattgggattgggttcagatattaattaattattttttttttattttattattttattaaataaaaataaaagtcacaatgaatttctcataaaccaagannnnnnnnnnnnnnnnnnnntttatatagaatagatatataagagaagtataaaacggtgatgtggctgtctaaaaataccttaaaatactcattctttttcctccatttttctacttttctattaatttttttaataattattgtatagctaataatataaattaaattaaaatatcataactattttctgtacaattacatcgctattttctacgtgattgttccacaatttaatcattccttgcatactaaatcaagtataccaagcttgctgtagctgctgccattactttcttcttaaacttgctagtttttgctttatgtatccatttgagcagctgtgataaatttgtagtccgagccccccatgtcagtcattccttgattttctccacacaaactagtgagtaagaggagcggaaaaacaggttctttattgtctcatcatgctgtaaacatcagctgcaaaaaggatctgtaacaatttgaaatttctacaatctatccttggttttcaacctattttaaatggctaaccataataaaaagctatgtttaggtgtgttaaacctattccaaacttcattgctccaagacaccctcttttgaatggggcaaagcaagtcatatccatgggagattctgtacctggtttgtgagaactgttgtgtgtccaccagagttctgatttggttctttgctgccactattggtttccagtactagctcccattgctaggagcatggtattcccaccagtcttcttctttaagatacacattgtgtagtatacatttaacccacccaaagattatcctctttattagaatatactcattattatataactaataatataaattaaacaaaaatatcataactatagattttttttttaagaatcacgttagtgtttctatatagtcaaaaaaaaaattacatcacattatcataagaatattttaaatatatttaaacaataaaatgatatcactattcactaacacgtgatatctattttttttttatatgagtgtatatacaaatatcttgttttattattattattcaatgtatctatatataagtataactcatcgtgtatataagggtaatagaaaaaattgaattacatatactttggtgcttcacattatggttatgattgcataagagaaaagaatagaaacagaaattaagcaaataataagaatcaaaaagaagtaaattaaattatttcatttttcttttttatacatatttatattcatgcattcttctctttttttttacacatattttcttgctagaaaatatgttctcagttctcaccca

SEQ ID NO: 30042 - DNA, 1135 bp, Cannabis sativa
ggtaaaataaattccaacacaaatcccccatatcagaaggagacttctttttcggaataagcaccagattagtagcattaagatcatgtggcatcactttattccgaaaaaaaccttggacaagattaatcacatcccgaccaactatatgccaacacttctgaaaaaataccggagtcataccatcagggccaggaggcttatctggatgcatctggaaaacagccgctcgaacttcttcctcaaccactggcttaagtaacccaacattgtcctcatgacaaatagaaggctgaattttatcaagaatatcatcaccatgagaccccaaggaatggaaaatatcagtaaaataattaaccattacttgaggtaagccagaatcccaattgacccaatcaccctcctcatttttcaattgatgaatgtaattgttttttcgacgagaactagctgcaacatgaaaatatttggtgttgcgatccccttctcttagccaaaattgcttagaccgttgcctctagaagatttctttttggtgatagatctcagccagtaatttctttgcttcatgatattgggtcaccgaatcagcatcagtgttacctttgagcatcctaatacgtcttttgcacctttgaattctctccttgaaatttcctgttagatcatttccccacacctgaagaggctcctgtaaagccttcaattttgcagaaatgttactagacccgtacccttcccactgatcttggataatagaaaaacaagcctcttcacggagccaagcattctcaaaacgaaaagctttaacagaaccagactgaacccaaaaactagggtctaaaagcaagggacaatggtcagaaggggcaaacagaagattgctcaacctggaattagggaataaatccacccacccagaactagcaagagccctatccaacccgacttcaatcaaattaccagaacctcttcctttttcccaagtaaactggtgcccaaagagatccaaatcaaccaagtcacattcagaaaccacctgttgaaagccttctatcaaccaggaaggataaggattacctcctcttttatcaacttgactcataacattgtttaaatctccaatgataca

SEQ ID NO: 30043 - DNA, 4160 bp, Cannabis sativa
  modified_base (3167)..(3176): a, c, t, g, unknown or other
  modified_base (4033)..(4037): a, c, t, g, unknown or other
ttaattcacttataataaattatataataatataattccataataatacacatttaactagttagggtttgctaatctattttcttaattctagggtattacaactatgggttataaatggcactctatcttggtcatagtagttttgataagatcaaatagtatctccacttgtttgctactttggatttcagattacatctatgtattcattttttacatatgaatatacattccagggttggttaggagtaactcatcaaatcattagacgattactatagatatttaccttatgccaaaaatttgaaatatttgaaaattttcatgaatttctaggaaagatagttaacaaagttgttaaagatcttgcaaatttgtaggggcggagaaatatttgatatgcagttcaaagatcatttaaataaactttgaattgtttatcaaacttacttcctcagaatattagaatcgcaaaattgatggaaatgataagatttatgattagttactagcagctacaaaagtccttatagggatatgccttagagacaacaagcgatattttaaaatggcatcccatctaagaataggtaccaaaacaaccttaaaataatataatagtcaagtacttagtgtccaccattgttaaatctagggatgccctgatcatgtccttaagaaaagccaaaaatgataattgaggtttgcatgtttgttggctattctaaagtgactaggggtggactacattatggtcatctagactagtaagtatttattttcactaatactacttctctagacgatgactacaaagatgtaatctcaaatccaaaatagcaaacaagtggagatactatttgatttaaatccaaaagtgttccattatcttacattatataaggtctataccactgaagttcctagatacataatcacggtaccttgtcgtagtgggagggtttttagggacccaccttgttatgacttggatgacactggtgatgatgattcattatttgctcaagcaagcaatggatagtcctaataggttcctatcttatccttattaggactatccattgcttgctataccataactcgaagcgtagagaactatggttagccattcccatggagcaacctaaagtttttagaatgcaaggataagataggaaaccatgatcattctattcaatggacttaagaaaacttcccattcctaatatcaagggtttgatgagaacattaaaacctatgatttgtggtatacctagtaatttacttgctctgtcacaagcaacttacattagtaaggtgctagagcattttttttcaaatggctaattctaatggaggtcacttgacttccagagatggagttcatttatctaaggagttattttcaacaattttaggaaagataaaggccaagaaaagaattccctaagtatcaatagtaggaggccttatatatgctcttgtatgcactaggccagatatctagtgttgagtgggagctgtgagtaagtatcaatcaaaactagaaaaggaacattggaagataatcaaacatatcctaaaatacaagaagatgaactatatgttagttataagggtgatattttaaaatccttaggctacatcaaatcagatttcaggacttgcatcaatgctagaaagtcaacatatgagatggtgattactctaggagtagagcagtgatttctagagaagtgtaaaagcctatctggaatcactaactctaccagtaagagtaaataataaggctaacctaaaggaaattagggaattgttcaaactcaagaaattttgatacagactttggcataatttcagacatggaatgattgtttagtgtaactccgtgataacacaaatgcaattgccaaacaataaagaatcgtgtagtctaagaggaataaaatatatagaagaggaattcacaaattcataagttttgtgactaaggaaaatgtgatgatagagaaggttgatattgagtacaacctatcagatcctattacatagtttatgccaaatactacatttgatcaagacatcaagtatatgagattaaattgaaatacacttatagttttatattagtacaagtgggaattcgttaggattttatgccctaaataaaaccaaattttattgtaatcttatttacttttaataaagatcataaatcatagcttgactttgtcatatgctttgttcacatgttttatacataattataggtttaatatataagttctattaaattccaaacatatagttattcacaattatagtgatgtcatcaccatggaaagtaattatgattatatgcttcaaattatttagtcccacaattcatcaatgtactgaatttacactgacacgataatcaacgatgagatttacttacacttagctaagtagaatatcttttccacgacattagtaaagtaaactagcatcagatgtatcagctatacattagaatgaaccgatattgatagtagaaaagatatcataaacttaccggtatatcttttctaagtcaatgtcacttagttgatcatagatcgtttgatctcaatcctgagatagttaagttctaacttaatttattatgcgagttctttgacttgtttgttaaaatattacccataggactagcccatatttacatcttgggaatttgatagtacaattgagtgggagcgttaatcatagatatggaatctatagcttctattactattagaagtgaaacgatggtttctttagagcttggcttaacgcgataaatgatagagcgctcattttaataattatattagtttactgaaatattatttacaagtagctacgtattttaaaaataaaatacattgaagggtaaaacaataaatttgtccctacttaatgtaaactgtctttagaggatcattgattatttagattgtaatattgtataatttatagtgtatctatatttggtatatagagagttctatgtaatcaagagtgtgattctaattctataatagagtcaggagaaactaataagctaggaaatttacttagtaaatttcggatcaacttattaggagcttaattacataggcccatggtccccacactannnnnnnnnntattgttttgtagtctcaattaattcatttatttaatcaattagaattctaactaatgactttgtcttatttatgaactggggaacaaagccgcgcttcgagcgggttcgaccttagttttgtaaattttattttacgaatgaagtgatttgatgtaaaatataatattttgatatttatattataattaaagaaaaatttaaaattataaatgtaatttgttattttaaatatgtagaacggtggtaaaattaacatatgaaataaaattacatgtgtctttacaataaaataaatgaaaaaaaaaatataagtttaataaacattgcgtgtaaacaaaagatgtatgtcttctccatagagttgaatgtaggataaaagttgcgaaatggaccacgcaatattttttgtttctgtaattgatagattatgtaaaatgttagtgattgaagttttttatctaaaaaattagataaaatgattaatttgaacaaattatgtagagataaaatttgtaccttaaattgtaatgttggaaaagaaggtggtgatccataatactaatcttttccatactgaaatatttacttgtgttactatctttcttgattattaagtaaaataaataatgtgcatattaaaaataaaattgtgaaaatgtgatacctttttttggtggatgatgagtgagttttttgaaatacttctttctagacgacattcttgattaaaattgggtcttccacttcatcatcggcgtttattataatcaatccttctcttaaagttactcgagagactgcaacatataattgaccatgagtgaatacttgcttagggagatacaatccgacatnnnnnagcgattgtccttgacttttattgattatcatggcaaagcatggtgctaaaagaagttgccttctattgagcttgaatggttacttggattcatttggagacatgattattcttggaatagtt

SEQ ID NO: 30044 - DNA, 1965 bp, Cannabis sativa
gagattgctctttgacaagaaaacggggatgacgaaatgcgctaggattccccaagccacgcgcattccaacttaggattttcatggctgattgcggggctgagaatcagccaccgctgcagtgtcaagtgaaccagaaagatccaaattttcagtggaaacttgctggttatgttcccttccaattgacaaagttggattggagtttggttgttgaagacccctacatctcttgagtgtgtcccgcaatgagcttttatcatgctgccttttgtaacatctattgggagaacaattttctttgccaaaagacactttctgtgttgacaaaatggtggatgaagagggtggaggagtgaccataggagtgtttatggtgttgctactgtggctatgaacagagtatggatatggtggataagttgcaaccacatttggggcattggaaaaaccagtaggcggtataaagatgtttgataaatcagcatatgaatctggtttgggaagggaagaggcagtatgtgtggcatttgtggattttatagcgacagtatctatgaggttatcatccaaaggcattgtcgatatgtgtggtgtaaaggttgctggtgcaaaatgtatgggatcatttgtgcgatgtatagccttagtggaatttgcagagtcagtatgatgagatgaagcacctggtgcactggaaaccggttgtgttggctggtgcgagacaaaaccaggaggagataaatgtgtaggccttgagtgatgcactgatgtcctttgccaagattgatccccttgcctggaagattcaccttcaaacagtagagaaggttgtggtggtggtcggctgttaagagttggaattgctgcagacaatgatgttctagccaaacgagtaagcaatggccaagcatttcccttcccaaaatcagtgcgatatcggtcataacccgaagtaggcaatggagatcctttaatagttggacgatactcgagttcaggctcaattccattgtcaagcttttcaaggaaactcatacacttgttgtaagggtgtccgattctgccacattccatgcaatactcaggtaacctttcatatcgaaattcaacccagaatttatccttgacttgtgtaagagcaatcatacgacctcgcaacagcggcttggtaacatcaattttcacacgaatgcgtaaaaatggaccccatccttcgaagagagagtcttcgaagacatcgaggaattctccaattaagttcccaagtgccacagccaatccctttgttttactcatgaagggaagtcgatatacttgcacccaaaatggtgtgtgggtaagcatagatgaggaaatattctgaccaatggttggagatagtaaaatgatgtgatgattttgaaagtggaaaggctctttgtcaaggaccctttgtcgatctcctgcacaaccaaatgacagcataaacaattcatcatcttcagtaatcttaacagtaaatcgtccatcccagtgctctgccatttgcctttgcaaagtagatagccaaacttttttagtagtgagaattttagcatatagcacatggttgtcgcccaaaccagtagagataggttccccaaaatcaaactcaaagactgactgttcctcatctgtaagagtaattactgacttcattttgtccctatgaggatccatattttgcagatggagtgttgaaagcccaggagaaacaattgaaatatgtagtatacttgcagaaggctgaagaaaggaagaacaaactgccaaaaagagcagaaaactgctaaaaaaaactgctaagtaatgcagaaattgtttgaaaaaccgttaaaaaaccataagttacttataactgccacagagcataaatgggcagacgctctttttttgatctaataataatataatttaaacatattaaatgcaatattatgaaat

SEQ ID NO: 30045 - DNA, 1129 bp, Cannabis sativa
atggggaccacccaatggcccatgtggagaaaaaccctagagatgatggggtgatattatctcttatgcccaatgttgggccatcatcggcccaaatgcttgaacatcctcaccaaaaaatttgcaaatgaagaacaccacaccaatatccagagcccattcccgtggaagtggaattgaatgtgggtattgaaacaacagtggcccatatgctgggtaacgaagtggacctgaagaaaggagaaacaattgctataattaatgagggagatgggctccaagcccatatcacttctgggccaggacaaaagaagagaaaggcctccataccaattatccctgttgattcatcaggaaaggtgatccatgaagatggctcgacaaatcaaagtaacattactcttcctttctcccctgccagttcaccgtcttttgcagtgggaaagcatgacgaagacttatcttcggggaaaaggacgaatgttggaggttctcatggcaagaagaagggtaggccaaggaaggatagtaaaacaaaggagaacccaacgaaaggtggaaccaggaagggagacattaatcaaatggctcaagtggaagatggaaagggacgtactctggtggatgttgaaattcagcaggattttcatgtgggcgaggaggcggcccttaccatgtcccccaacctcaatgattatcctatcgtggaattgccgaggtctggccagggccgaggcaacagaagccttaagggcttggacaagtaagtataatgttgactgtatctttttgatggaaactaagattggtagagaacaaatggataatgtgagagaagaattgggatatgataacggggattatatccctgctgatggtctggcggggggtttatgtttgatatggaagaatgaggtcaatgtaagtattgagcgaatccataactctgcttttgaatgtcgagttttggaaccacaaagtcaagagttttggaggatgttcgctgtttatggaactccctatgaagaagaaaaaagatggttttagaggaactcacgagctatatgatagcgtgtgatgatccgtgggcgataataggggatcttaatgtgattcgttgttcagaaga

SEQ ID NO: 30046 - DNA, 1928 bp, Cannabis sativa
aagttacagaatctcaagttagaagttttgtgttatttagaacaatttttctcgccttcctttttcgacataatggttcacctaacagtgcatttggtgagagaggtgaagttatctggacctgagtacttgagatggatgtacccatttgaacagtacatgaaaatcttgcaatgttatgtcaaaaatggaattaggcctgagggttgtattgttgaatcatacattgttgaaaagacgattgaattctactcagactacttgttagaggttaccactattggttcttgccctactcaggtcgatagggaaataagcagggggtaggggtttttctctttatggtgtaagccaagctgatcgtgaagaagcgcaccagcttgtgttgcaaaatactgacgtggtccaaccgtacattgagtaagtttaagttaacttttcatagttaaaacaaattaataatatccaattgaaacgcaaatttatccatcgaatacttgaagggaacaatttaattggatcaagattactaatccgactaaggcacagaatcaaaaatgggtacaagattaacattattaaaatttcagtacatggttaaaaaataaggtactattaacattactgttttgttacgcatcatatactgatttaccttggctcactaatcaacttgtatgttcataggtatatgcagaaatgtgtgaatctccgggtaatgtatccaacacactactttccatatcacgaggtccttcgtgtgatgtactcaagtacccattgtaatatataaataacactcaattttacactcaagcccatgataaagctagaaaaacacagaatagtggtgttaaggtagttgttaagactttccaaatatctactttaaatgtctttttacggtgtaattcaagaaatttggtaattagattacaatagttttcgaatcccaattttctttgtgattggattaggaatgataatggggttaaatattatgaatttgagttcaagttagtagacttgaatggaattggacacaagtctgataggtttataatggtgtcccaagccagtcaagtgttttacatgagcgatccattagatgcatgctagtcagttgtcttaacgatgcaaccaaaagattatgataatcaagagtctaatggagatgatctcatgcttattagttaccaaattcatcaaatcactccaccaccagttgatgtaatcgttggagacgatatcatatcatctcgtgatgatggtgaaggattatagttgaacgaatctatcaatacatgattcatatatcaaacacgtattggtatttagtctttttgatatatctacatttatctattaatttgcatatttttgtatattctaatgtatgattttaaatttgtatggggacgatgagtggagtgcttagttagattatgatggtgatgatggtccatccgtgccaaaaggatctagtcttgatcctaaacaacaatccatggatgaagaaggtagcggtgatcctgaccgaccaacacagaaaaatacaagcaggagaagcaaacgaagtgatataaaaaaaatggttagtgagggaaaaaagttagaggttgagtacaacaactacagacaaaactggggaaagagagcgacgacaaaagttacccaaatgaagcatgggtgcgaattaatgttccacttcgagacatatcgtgggttagaatgagtgaggacattaaatctaattgtgggattacataaaggaaaaaataattctgttattcaagttttttattgattataatttgtacttataattaggattatcaatttgacaggccgcgtttgatgtaccgaacacaaataggaaattaaccatatcaaaaggtggagaaaggtggaaagattggaaaaatacc

SEQ ID NO: 30047 - DNA, 1682 bp, Cannabis sativa
ctaacattttgcttgaatgtttgtattaatttttaaatttttgacctgaaaatatcatgttgacattatttttctttttcgcttgaattgatagagattagcaatacgttagttagttgggagttgtgataatggctcaaattgatacattatacacttatttatgctcatataattaatataaattaaatattccttatttttaatattaaatttgttcaagtgaaaatatttaatttattttactttttgtgttatttttcaaattgaggcgaagtggtaaaaaaaaatagaaaaagccaaattatttatttttcatttttcttcatttgtttctttgtctctttcttccttttttttttctactggcgggccccaccattagctgatgcttgtcagctttgtctcccagtcgccatgctagtcgtcagctgctgtcccctaaccaccaatcgcctttcatgaggcatgtagacgttccaatattggcatgatttcacagtatctcaactcaaatgaattcactcaaggagtcatctaaattttaagttgaaaaagaaaagacaaatgacaagaaaagatgatcatctttccttttatacttaaaatttccaaattccactattcaatagtgaatgggaactcgaactcttactctcaatggaaatgcttgaagaacaaaaataattgtctaggattgtaaaaattgatgcccatttggtaatttcgagaaaaacaggcttaattcacgtcattaagtcaacctcacacaagtgtaaagttgacttgggggacaaatgtttacactaaaagtagctctgatgacgtgcacatcaatatttgacacgtgacaagaaagataacatctcagagttgagtagtcttgagtcataggaagtcggcctgggaggggtccctagccatgtacctaagttgacttcgagaactccagaatggaagttcagacttcgataactcatttccaactcactatccctcaatattctgtactaggaagacatggagcaattaaatacaggcttcgagagctgaaattacataaaacttcaccttgaaagttaacttaggcacctaggattttacctagcgcccaagttgacatccttgactagggtttcagtttctaggaccatcttagtgcaaatgagtcaaactttgcaatgagacatcaactagacataccacaaacatatttgacgcatcaaaattagattcggggctcgtttggcacaacttttgaaaaagcgaaagctgcttttcaaaaaagctgtgacaaaaaggtgtttggtaagcagttaaaaaatagcttattaaagaaattatggaaaagctacagctaaaagctaaagctactacaatccaacttttaaaaaaaatctattttaattaaaagactacaataaattatttttactaaaattttatttaattatttattatatattataaaaaaataatatcaacccgagttttttataaactacaattttttcttttacaagtgataaaaatataatttaaaagtattaaaaattatttttatcaaatgtatataaatttacactatggaaaaaaaataattaaaaatatgtagaaaataaaaaattttatgtaacatattttttatatatatatttgtgattataatgaactagattaaa

SEQ ID NO: 30048 - DNA, 1316 bp, Cannabis sativa
tgtgcttaatagattactagggcaatttatccttccatgaacatttttcttttgtacttgagcatcatgcctatcgttcacgcaactctggctcgcggatcaattgggtggtcttgtcctggagccttaaccaccttctttttccacaaaggttggttggaagtattcatgctccatggtgcagtgggagcagtcttttttgttggttctcccataacaccttttccttcgttccttgcaagatcagaagttctagggtcttttgagttgtttttcttcgtagctttactttttggaggagtagggtcatctagaatattatcatcatgagcaacttcccttgatttaattctggcctctagtcttgctagagtatcttacatttgacaggagcattcctcctgattcgccaacttcctcttagttttaacgagttcttcactcatttgagcgactatagtgtttggctgataataatattcctcttctttatcttttttatcatcttcaagatcatcatccttaggatcatcttttcgatcttttgagtcatcttcaatgatgggacacttatcaacatatttttcaatatgttgagtcttattggcaggaagattgtcgcttctgatggatatccatcaactcctgcttttgcctgagtagtaggattcacatcatccatgggagtatccccatcacgaataccagatttatcgacggtgattcgggtggctaccatggttgtagtataaaactttattggcgtcacttatttcttcagctctcaatgaaagcaccaaaatttttatagaaatattaagaaaccataaaatataataaagcttaaagaaatatattatacacgaagaataagaccaaagtttttacatgggtatatgattaatgatctctagtctacgagtccatattattatgataggattggtgattaatgcttaaatttgtataatttaaggctttaattgtatacataaaattattttgagtaagatattttcataattttatttgtaaaattatttcaattgaaaatatttagtttactttaattttatgttaagaattgaataaattggtataaaggaaaataaaatctcaaaccccaataaattttacaaaatttatatcatacattaattaactatatgtgtatgttgaatttcttgcatttgggcatggactcttcagcagagatgtcactatgtatttacatgcttaattggtgcacacatataataccctaacaagcgtaggcgtgttagcgtaattttaaatgtactgtgcagctcgttgct

SEQ ID NO: 30049 - DNA, 2594 bp, Cannabis sativa
gagtctggttcgacaagcttcaggcacagaggagattccacgagaaagaggagaatgcatgacaccaaccctcaacaagccaacaatccagcaacatttgatttgtcaccctctattccacaactacaccagtaataccaatggcaacacccacaatcgcagcagcttccacaccaattgtttcaactgctgtgccaatgacctacctctctttctgagattcctttggtaggcttcaaattccccacaatgattattcttgtggaatttgttgctatgcagaggccaaaggaggccgaacatgctctgagaaggcgggacgagaaagaatggaagattttgagaatgagagaaaacaagcttttgttgtgaagagggttgaaacctctgaaggtctttttgctaatactcctcttgggccaatggtgaacatcgaagccctagaaaagcatatggcgcctaaggtagggagggaagtcgcacccttcgtagccgagcttctcgaccagggatctagcagcacgtttgagttgcccctggagacttgggcaacgtgcagtagcactgatgcgttcaccctttcccatgccgtcaaacaacaagtagtaggggtaagctttgacctttatgttcttgttcttactgctatgtattgtcttctccatgtgttaggcggccttaatgatggagagagtcgttaaagaagtaggcacccttgtcacagaacttgagtaggtaaaatccaagaaccaacagctgcatgttgccaacctgggcctgctaggtgaaaataaagctctaaggagagatctcaaagacttgaagaaggagaaagagttgtctgaggtcaaatatggccaataagctcttctcatacaagttgttcacgtaatcagtgatcatcaatgggagaccattgagggattgcacgaggggacctcccatcagccattgagagattttggttttcgatcaagcgttacttattattttatatttgaatctttttcctagttggatggcctactaggttataataattttttttaagtttaaacactgatgcatgtatttatatttcattactcgcatatgttgtttaaacatatttctcactttacttgtgaaaaatctaagtgagtttgtctatttagaatgatacaagactcatcatttttatagaacatctcaattatagtactcattccccatcaagtaataaaaagttatgcattagatttaactagtttgagacttagctattttaatgcttttgtttattgtatgtgagcagttaatatatatgcccatacttagtttctcgtactattttcaaaattaatctttaaaattttgttgtagcattcactgttattttgctttataagtagaatatcccttaatttttactgttctagaccagcttgaccgagattattttatctatttttattgcaataaattttgttagcattgtatattaatatctaactgtttgtccatgtttctcatgcttattaatgtttgatgagttactaatagtacgccccctaagtaatttaaagtaaaaaaactttatgttactagaagaaataaatatttcattaacataatccaaatattggataataataagtgttttaaattacactttatttgaaatatagtattgaaaatatggccttaaatgctcaatgtttcaagtattttttaccggtgatctatttggtcaaactaatgtataaacaattggtctttctaccgtctcaatcacataaggaccctcccaatttgggttaaacacgcctgccgcgagatctcagatattgaagaagactctttggaggactaaattaccaactttaaatgcttgtcttacggagtatgacccctacaatgtccgtttccttgaatagtgatgaatttttcttctttgctttaggggttggacctgattgtgactattttcaaaaatttagaatttttctagagccattactatgcgtcgtgaatagtgtgaggaaaaaaaatttcatggggcatcatcttctatttttggccaaatttctagtgaaatagtctgatttttctaaaaaataaccttatggagatccatgtactctgaactttctctgaaaggtgctttttgagagtcgtatagttcaaatgtatgattgcaaactattttcttgttctaatccaattttgcattaagactgataaggaagacaatgcagcaatctatcatgttggctacatgtggtcctgatggataaacaaagacgtgtctattgttgcgaactttttcccattcatcccaagtattttttttccactcctctagaggagcgtaccaagaaaaaatatctatttcggtttggtagattagcttaattttttcttgttcaaggaaagactatgtagcagtgtgaaggccatagtttggacttcgacaacaatcatacagatgcatgttaggtaccagaaaagatgagctagggattttggagtgaaaagtgcggtctagatgggggtcatattggcaaaaggatactttgggtgaattacataatcatgttgaacataaggtccaa

SEQ ID NO: 30050 - DNA, 1794 bp, Cannabis sativa
  modified_base (1763)..(1768): a, c, t, g, unknown or other
aaaattgtttttaaaaattgaaaaacaacactttgatgttttctgttttctagttttttaaaactcaatttttaaaaaacagtttttaaaaatttttgacaaacagttttttaaaagatgaatttgtggcgaaaactctatatgttttaatttttatacacttaattcttttaattttttttgtggcaaaactcccttgaaagtttatttttctttataaatttgacacgctagttaaatattgtcgtcaaatatcaattgaatgatcactctatgcacttatgtatatgtaacagtaaaacttcgaagtcgatacagtagtaatccagttagtattgaacggtaatatctaactgacataccttaaatttgcaaggaaaagtaaacttaaggggattttgccacaaaaaaaatcaaaagaattaagtgtataaaaattaaaacataaggagattttgccaaaattcatcctctttttttttcttaatcagttatctttgtgaatgaagtatctagtaagtacttactagtaaacgtttttcttcattgagcaattgaatagggttctttgtatgggtaataaaaaaaaatacaaattacaatattttgaaatctattacttggcttaactcaattgtaatattatctacctgttaatgattcaaaaccaaaacttttatacttaaaaaaaaacatttaaaatttaatatttgatatgcataaaagctactttttttatattcatgtcataggaaataggaaaattaattataatctaatcacctaatgaacaattctaatgcggaataaattgattgttataaaacttaagttgaatgaattgtctccggttatatgcaaatctccactaacatgatttttagatttgcaaaataaaaggagaaataagaaagtcaaaaaaaaaaaaattacaaaattatagttgtacaaaattttaaaatatttttacgatttttaaaatttcatttacagaaaatatagtcttttgatatttttatattatttttatgttattttttttattttgttgttagttttttgttttttatgtacgtttttttttttcttgttatttttataaaacactttaaaaatataaatataaaatatttgaacataaaaatataaaaaaattaccaaaaatagtattttgggtaaatttttgaagaaaaaattatttacttattttatttccatcaatagatattttattatagaaaggtaatatagccgcttctaaagatggcatataaaaagagcgcctcctgcatgatagataaatatctttcaagctttcactaactcttttgatggtgatttaatagaatgaaagagtagtgagcttggggagaaatcacctgtatatcacaattaattaattatcaaaatattttaataattaaaaatttccattaaaaatatatgcaatttacacaactaaattaaataaaattaataactaaataataatttattttttagaatataactaaataatgttgatgataattaaaatatcataattaaataataatgactttaacaaaataaaataaaataaaataatttataattttaatattataataatattctacatactgttcgtttgagtaattgagtgtaataaaaataaaaaccattgtataatttgtattcgcacccataaatgagttaggccatcaaagtcgattgattattttttatgtttctatctctactgttttttttttaaaaaaaannnnnnaaagaaaagaaaagaaaaagaaataa

SEQ ID NO: 30051 - DNA, 3282 bp, Cannabis sativa
cttgtagttaatcacaatatacaattatattttaaaatttaactgcaatttcaaagctcaatctccttaattatatatatacaatttgttatctatagcatcttttaagagatgacatcgtttttgtatggtaatcaaacttcactttaactatattattatatctttgtttattttccccctttctttattattgtaagctttatatatatattatatataccgtgacatagatatatataatatttatataaaagaaacatatattattaatatacataatagaagcctttaattatattttaattttcttctcaaaaaaaaaattatatgttaacttatctttcgagagtatatgcgcttgcattgcatatgcacatatatataaacataacttttaatattattttaatgatatttattttcatgatgaagtgattaatcaatttataaaagagaattattaaaaaatattttgatgtttagtactttcgttatatctttattagtgtaattaagagaattgttaaaaagcaccctagtatctaatattctcttactattactataattaaatatcgagtcttaccagggccggtcctgaaacaaagtgggccataaggaataaaaaaattttggacccttatgttagaaaaaatatggtattttttaaaatcgataaaaaaatatataattttaaaagagaaaaaaaaaattggaccctgggctgggtgggccctaggcacaggcctagaccgcctatgcccaaggccaggcctagaccgcctatgcccagggccaggcctgagtcttacataactttatgaaaatagtctttaaaagaatattattaattaattataaaacatcacgtataaaaaatgataggtattattagtatccaataactctacaattaattatcaaattttatataatataaaaaataatttttaaaaagtttttctctctagtgagagtgttgggagtccaacttgaccttgtgtccttccagtgaacccttcactgatcaccaactctatcccccagctctcttcttcgaaagtgaattcctcctttttctttccactccatcgacacacaaccctcccctgttttcctttctcacaacttaaagtactcttagagctctttgttacaaaatagtgatattcagcactatactgttactgtgctatactgttactgttccattgccaaagtcttttcttttcttgtcttgtctttcctactggtgtcatgggggacattggtagtagttctggggtcaataatggcaccccacgtgaggccattattcaggaaaccgctccaaataatggggcccctgaagtaatggcggctgcagattctttccaaccacctcaaccacctgatattactatggttgagcctattactgtcgatacagaagatgtggtggtatctcctagtaccatcaatgcaaacagggcagaaacagatattgaagtcctccgcaacaacttcttggagtccatgaccctcgaactagaacctgacttcgaactcacagctgaagtggttagtactggtgtattagtaagctttttgggaggtaacggagtgtccagaactcgcctgaaagacatcctaaaccagatttggaaactaaaagggaattggaaatttaaaactatgaaaccaggtgtgtggggcattttctttgataaatctgaggattgtacgaccattcttcgaaaccgaccatggaccatcaatgggaagctccttatcattcgagaatggcctgaagatgggaactggtataacttgaatatggggatatcagtcttttgggtaatggctgcaggattacccacgccctatctcaatgctgttaacactcgtacaatcgcatccaaagcaggacgttttgttgggagcgatcgtgcaaatcaacgcaccatcacaagaaggggattccttaagttccaagtggagatagacacctcccaccaattaatttctggttttttcctggacattaagagagggagaaaagagtggatacaattcagatatttcaagttaccaaagctatgctttaattgtggttttcttggacatgacaagaaaacttgtttccgttccacagcatacgcatatcctcctcagggcgatgcagtaccagcgtatgggccttggatgaaggccgaaacagcaatctttagttgcttcaacacccgaaatcagctagagttctttagagaagaagctcaccggactgtctctccggcgaaacctccaacagcggtggatgctcttcccaaagctatgggaaaacgacctgtcgtggacagcaaaagaaatcagacccaacaccaatcagctagcaagaagcctgctaggaaagtgatcagagtcatttcaaacgccccagatgctgttttgggaaagaacttgaaagttgttgagagggaaagtattaatcctttggacaaaggcaagaatctcatgtatgaaagggttcataactcttcatatccagggaaggaaagaaagacaaggtcagtttctcctagagcaatgcgaagacataatcaaggtaatcaaaaccctctgtctgatgttgaaatattaaacaaatactcctcaaggccccctccaaacccagctgataatggcatccttactaccatcatggccaacattgggcccacctatgatcaaatggtggacaaggcccatgttgagttatgtcaatctagacaaccccacaaacaccctgagcccacccactttccttggcccatttatgctgaggagattgggctggctgaagaattgatgggcccagcaccagttgataaatttgaaccaatacccacattattccatgacccagttgatgtcactgatctagttcatccatgtcctcaacctcgtaaaaggaaggcaagcctcactttggttccttacgttcaacatactgaggagaatacgattgaattttcaacagaggttcctgatcttcccagcttctcccctgctccaaacactccattcaagataggctctggtgcttcttcttcttcttctgttaaaaacgataaaaggagaaaaaagggatctcgtgggaaaaaaatgggagtgagggatactagtaatcttggaaattcttcatctggtgtagaagaacaaaaccgcagtgaccgtgtaagttctcctagaaatatcattgataatcttaatttatttgaagttcatgtcgaaagttctcaaaattttcttacgggcgag

SEQ ID NO: 30052 - DNA, 2675 bp, Cannabis sativa
ttttttttttttttaaatttgtttttttgaaaattgtatttccttactactatttattatgattttttaatctcaaataattaaaatagaagataaagcctttgattataattactgccatgcataagatttttcaatgtacgacagtatgaatattgatcttatggcctgttaattaataaataattgggaatcaattatatcatagttgataaaagaaagtgaataatatattttatttattttcatttttaaacattaataataattttgtcatttaaaatatatttttataaaattattataatatattatagtttaatttaaaaaggtaatatagtgaatttaggtgtttcgattatgttttctaataaaatgaacaagataaattattattattttattttcaaacaatttttataaataatatattagaaattacaatccaattagggattaaaaagtttggtgcataagtaaagaccaattatcatgtaaacccttcactaattatatacgacttctttgtatttgtactcatgatcaaaattataatttctccctataattatttttattttttgattgtgattcattcaattcaatccacactagtttgtttatagtacattcaatttgcattaagtgtaaattttatattttgaattcaatttaatccacacaataagtcaaatccaaaaaagactcgctgtagaagattggtaatgagaataatgttcgcactataccactagattcctcacactagatttttgaattataaaaacagatcaatacctccttgtgagtttgtcttttttcatcagttcttccgggcattgagacttacaaattcttcttactttgatgatgattgatcatgtttcggcttattagttgttcttttaactaatgtctattgatctcacactcaaatttgggtttttactttttctggccagtaaaatcgacttatcatcttgcatcctcttccattgatgtcccttcaccttcaaacaaaactacttccaaaaaatggtagtttttcccatggcattcaaatttatcaccaaaaatcaagcactttgtctggagaaccttttattacattcttcccactgccttaaatgtgttttcaacaaaagttaatatttgtaaaagatactcgaaatcaggatcccatgctattgttccaaagtaaaaaaagtgctgaaatactctctttactatcagtttttccttaataatcaatatggatattttaagatttattctaacatattttgattataattctgctgatgattgtaaaatgatttttggattgctttgggcaagttggaatcatagaaatggtatcttacttggttaaactaacatgtttgctaaagatgttttcagttggttagtggcctatttgcatgaataccaggaagtgcaatcaaaaggtaatcagaatagaaacttgggctcctcctcctgttgggggttataaactcaacacaggattaagccttacacaagtggaatctgattgtaaaattttagtggatagagttgctaaaaaaatagtgatctttcagctctataagatgttgtttgtgatattaatcactctttatcgttcgtcatttgttcctaggcaggctaatgttatggcacaggctaaaattgctctatggttggataaggagaaggtatggaatggtactgtaccaaacttataaagttgtaaatttgctctgtttaattttttaatgaatttacaactttttttaaaaaaagtatagggatatttttaaacaatctaataattcaatggcataatcatataagtaaaaaagtttatgattaaaaataattatttattctaaattttaatttgggcatgtctatatgaacttcaacggtcgggttttttcaaaatatatcaacaattttcgttatgatcatctttgccatatatattttttttaatttttatttagtctcttttaagtaatattatcgatgaacattcattcatattatgtactgaaatagtgatatatatacacgagtacgattaggcacgaaaaaatataagtttgggcacgacacaacacgatgctacaaattgacatgatacgacacgaaaaatatatccttaagcatgacatggcacgagaagaacaacacgtaagcacgaatagcctaacccaaaaaagtacaacacacgacaagtccaaaaaacacgacccgacaaattaaaaaaccttataatataataataataactttgggtaattcatctagtggggtgcctatacatataaatttactaatgataaataaattaaaataataataaaatttaaatgtaatattgaatatataattttataattaaaacaataaaaatataaaaaactaaaattatatattaattttcttaaaaaaaaaagattatgcattaatttattgtttgatataaaaatttaaatatttatacgtaaatatttaagttctaatggtactaaattattgaaagtttattttttatttagaaaaaaaaatattattgaaagttatataaatatgagtaaaattataaaatatacatatactttagtaatacttgagcttgtttaagaaatattagctgtcacgagcaaaaaactacataaaaatattgg

SEQ ID NO: 30053 - DNA, 2767 bp, Cannabis sativa
  modified_base (857)..(864): a, c, t, g, unknown or other
taataatgacaatgacaagaaggttttaacgtagttttaaatttaaatcttcatagcccacgagtccatcttattatgggttgataaattgtatacaaaatacaattaattatttttcaaaaatgaataatagaattctctattttccaataaagaatggtcgtcctttgttccctaagttctgtccatatttataggagtctaggatgatagttattctcttgggatctaattatttgtaattgttcataaaaagtaaacatttcccacattccatatttatgtaaatgagataattataaataattgcataaccgctttttatctttatccatagacgattatgctgactgtgcttcatagttctcacaattcaaccaatacttttcttaaacatctccgtggaacaacgtctaagtgtattgttgtagtacatctcacactcttctataaatgttgagggaggtatatgcaagacgcttagtgtgacaaaggcgagatgaatcatgttgaagttgtttgtctttattcttttaacatacttaggagtatgtgggtcaatgagctacaaaactcattatctacccattcgaaataattttataatgtattttgtttttcttgagatggatttgttcatctcggtagtctcatcagtcagtaattattattcgtgtctcgccattgcctaaataatagtgagttcgagtatttctattagttgtattttctgatacaagtcatctgaatgtatttattgatgcataatttgagctggttcatattctagctatgttacacgtgttagcatcatattgttgctcgaaatataaatataataaatatttattattatnnnnnnnnttattattattattatgttttttgttaatgtggttttattaattaaatatgaaggtttcctcaataataataataataataataataataataaaaaaagaagaagaagaagagagactaatatatgttcatagaaatatttgtagtttttttttaataagttaaaattatttgtagttaagatgtcaaattttgatgtttatggctacgccaacacatcatgtgcaactccaactcctattctatcttctattctattatattagtataattcctctatgcacacaaacacaaattaaatcacagattctataatgtctattttcttcatgcatatcaataatgcacgtatatacaattgagtgtaaaaccactatataattttggtattttaaatacattgttaaattctaattatatatttcagccaaaaaaaaaaaaaaaatctaattatatatgtgaatagaaaattattttacccccgatttttcttactaaaaaatatgactatgtacttatgttggtgttaaatatatattttaaactttagacagttatcaaaaattaatattatgctatattttgttaattttcttaattatcttgttgatgtggcataaaaatatttaatttagtttcctacttgagcaacctaaaataaaaataaactttataaaattttattttaatttaatctattctatgtattatctttttattatttgtaatcaatttagtttcaaatttcaagtttaactttttttttagattagtctaaaattgagttttgattataaattagttttaatgtattttttattaagttttttcttttttttttaaaaaaaaatttaattattttttaatttttcagttgcataaataattaaatttttttaatataaatatttttttattattaattgataaagttaaaaggacatttttaaccaccctaatattacaaaggcgtacaagtacaagtataagtgacaaagtttaaggagaaaataattttatttttaacaaaaaaattatattttagttaaatagaacaattggttaagatactttaaatttacatgggagaccatgttttgaattttcttgcctttttttctttctacgtgtatttatattttatttattaaaaaataaatgaagtataatgttcaaattaaaaacaaacttatgaccactagaataggaagatgatgctaaaccatcactctactcaaagttagctaattatttattgttttggattatattaaatgtataactaagcccaccctaaaatttaatcctgggtcgccactgtgtttgaaccttgtgttttacaaaaattactgattggaccctgtattttgttaaatgacaaaatgaaaccttatattttacaaaataataaaaataggaccctgagcttaatttttgaccttttttttaatataaccacttgaagacaatacctaataccaacatatttagaaaatataaatagtttagtcataacatttttagatcggattataattaaattttattttgataaaaaattgattcagagttctatttataccattttagaaaatacagagtttattttgttatttaacaaaacaaatagtccaattgatactttttacaaaacacaaaacacaaaatttaaaatgatatttatctttttagataacacaaatattacagggcaaactagttttttatattatattttcttaacatgtgagagtgtatagtgtaataataatataatagtgatatatacaacttaaataggggcagacgtaggtgtgtagttggggtggccttggccccctcaaaatttctaaaaatcaatgtatatgtcttcttaatgaacaaaaaccatatatatatatat

SEQ ID NO: 30054 - DNA, 1920 bp, Cannabis sativa
tgcataattatttgacactaataacatacacacaactgtaattcttattatcaccttcattatttaatctccttcctctaattaataaccaaaaactatatatatatatatattatatacttcttcacttctttagtgatgtttgtacatatagagaatattttgagttttgatctatatactatatatatagcttaagtagcgagctcaacaataccattattattattattaccactatttgtgattgtgactatattttttttatatatatatacatattttggttcatccacttgtttatttatttatttatttgtttcactatttgtagtatattattattgtaatgatgaagaggcattaattttgtttgtttgtgtgtgtaatgcaccgtcaataataattctcacacacataaaaactacaaaatatttacatattataatatatttaatataataattacagaaaaggttaaattaattaatttattaatttagtaaataatagtagctacaaacaaagaataatgtaagaaccaaaaccaacacgtgatcagtcaaatcaaatgcatgacttgcaagtttcaaatataatcacttaatattattagagctaattaattaattaagaaaaattactttattaattctttgatatataagaattagtgtattggtcatttaatataaccgtgtcacgtatataagattgtatatataaatagtttatgttgacagttaattgtaaaaaataaataaaattttaaatttactattaaaatttgagcttagataggattaagtgtaagtaaaataatagttattaagaaagtttagccgtaaaaaactcaaataaaaatagtattatttgtaccataccatcagatctgatattaaaatatagcaataataaaatgtctaatgttggatataaggacaaaagtgagaagaaagaaaatggaaagaaagtcaaaagaaaaatatttgtttggttgaaaataaaaatgagtgaagtagaaaatgacaacaaaaaattgggtgtattactccaaaatatttacttaaccaatacactaatatcaaaagaaatagaaaagaatgatagattaagatagtgcaattcgataagggaatccccaaatagttaagtcaagtgtgtttattggatcacatttaatatttttaagtttatttaaattcgattcaattatatattagatattaaattttattatctaattcaatccaattaatttcagtcatataattgataatgaatgttagattggatcgattctattcattagatgtattttatatgtatttattggtttaatttagattttatctaatattttagatattttggaccagatcagatccatctaatattttaggtctagtatatattggattgaacttgatctatccaatctaaaaaaaaagtaaaattttaatgttaattttcatatatatatatatacatatatattttacgtataacaatataaaatttaattacttatccaaactaaatgaaaatattaattactttgactggatgtttgatatatttaattttttatacaccacatccaatatccgattcgatccaatcgaatatttaaaaataatccaatccgattcgattataattgaatatctaatgtttgtcggtccattgtaattggatcgatcgattttcattggattggatcaattttgtacacactcctaaatacagacaaatcaaatcaatatctaaaatcgtaaaactactaaaaagagttttaaattttatgaaagtactattttttaggaataattacataaaagtaccattttttgtaaaataattatatttttacgttcgaagaatatttttttacataaaatcaacaagaaaacaacataa

SEQ ID NO: 30055 - DNA, 1555 bp, Cannabis sativa
gcctgaatgattatcttccgaccacctaccatgaagcacctagagaagcttgtaagcactcttcaccgaataaatccctgaagtctctttaaaccaataccactgatccatagtattggataccttagagcatctccaatagagagctataaatgtggcatattattattttttagaatattttgctgaaacttaatcttaatggtgataccaaatgtgtgccaaatttaactaaaattaaaaattgtgctaattaaattaacactatactattttttgtgccaaattttaacataaaataactactatattttaattatcttgttactcattaatattatttattaatgaaaaatgtttttatatttataaattaaaatatttttctcaaacaaaattaattattttatatattttcaatgagcaccaataatagtattaaattttaagttaattaggattttttccttctgatctttgacgtgtactaaatcatgcccctgaacttttaaggttgttaaaaatgtctccggaactattaagattgttagatttaaagacttttgtctaatttcatccaattttactatttcaatgattgttatatactaaatcatgcttcccagactttgatatctaccaaatcatgtccatcgaactttgatatgtactaaatcatggaccttggactttcatccatgttagacttttttatttaaattggaaaaaaaaatccttaaatttaacaatcttaatagttcagggggcatttttaacaattttaaaagttcaaagggcataatttagtatatgtcaaaatttaggggacacaaatcttaattttgtatagctagaggacaaatataaaaattgaataaaatataaatggatgatatattattattgatggggaccttacaaaacgtgcaagatattatcaatgacttaattaagtaacaaatttcattattattatttagtgctttttgttttatttactcgatttcttatatagttgagcttctttagaaaatttataaggttgagttaagctatagtgatagagactaacaacaaaaccaaaataacacttgtgtttataaattgatttaattagaatggatccttaaatattagatatttaattatgatcaaattagattagatgttatttttgaataattaattggatgagattagatattagatgaaatgcgtaaaaatttaatatatccaacatctaatcaaactaattaatatttttatttagtttgaataattaattagattttatattaaaaaaatatagagttttttacactttaaaatatctttttttttttttgcatttttataaaactctacatagaaacacacatagtaactaacgaaacaactatcgaaacaatcaaaactgtaaatttaaaaatataatatatgggataattctcaaaaaatataagcctttttcatttttacacgctgcaacctaaattgcaacaaaaaatcgtacataaattcctattgcaaccgcaaccactttagaaacccaaac

SEQ ID NO: 30056 - DNA, 1653 bp, Cannabis sativa
atgatgcacttttcatttgtacttggggagaattttagccgagacaatagaagttcgtgaggctttgagttggattatatagaaataatggtaacaagtaactgcagagattgattgacttttggtgttctgcaagcttcacatagttctattcgtatgatatctttgttcggtttgtagaaatttgcttactgaattatgtaatgtttcaattatttttattaagcggtctatagtggctcattattttattcgagtctctattttgtaccataatcctatctttagtttgaaatctattctaactaagttattactttgtcccgttatagttatagttatagagtttaatgattaataaaagtatttttacattagaaaaaaaagaaatagatgcaactaatgaatactaaagctttgagtgaattttttcaaaaaagaaaagatgtaaaattctaaaagttgatagttcaaacttcaaagtaaaaaatatatttaatttctactaaataacggtaaacgacttaaaatatgatgtcgttggttagtgtcatcaaaacgaaaactacataactgtcaacaacacaaaaacgacatccaaattctaaccaaaccggtagccattctctcctttcctccccaacctctattccggctcatagtgccagcctcgccggcggtgatggaccccacgccttccggcaacaagaagaggcatctttacactcatggaagctcaagagctcgtacaacaggtggctgccttgaccacaacgtcctctgcatcattttctccttccttgacctcttcgacctcgctcactgctccgttgtctgcaaatcttggtacccttttgtctatatgaaaaacccatttgaaaaagtatctaaagttttaatttttaattttttgtgttttgatgaaggcatgtggttatcaacaagtctaagctgcttcaagtcttttacatgaagcagcagaaattggatggttctacgagtttggagaagcctttgaatgtgtatttggaggagctggctatggagcgccatagattggctttggctaaaggatcggttgttgttaatcagtggagaggccattcaattgggtaatgtttactgacatagtatttcttcaagtttgaaactttgtttttggttactttggaagatgttaattcacttatgaaattatatgttgtttcatctatggttagctattggaatttaagtgtttaccaatgacaatgcttaaaaaatgagcataacgatcaaaatggttgttttaaacttgaaatgtaatcaatgggttcaaagagtgtatatcatgttttctaacttttgttgttgttgctaattttctaagttaacttctttagggcgaatcaatgtcgaatgaagaggggattgcttcttactggtggaggtgataaggtattttctacctctcaccaagataatggtagagtttttttcacttatgattacttagttagaacgtgaaaatgagggattctgtgctgattttgacatatgttcttgcttagtagactgtgattatgtgttggttttttctcatcatagataagtttcctttgcagaagttctgtttagatcttacatagactttaagaagttcacaagtagatt

SEQ ID NO: 30057 - DNA, 3644 bp, Cannabis sativa
  modified_base (40)..(67): a, c, t, g, unknown or other
aataattatttaaagagctataaataattttcataattannnnnnnnnnnnnnnnnnnnnnnnnnnnaaactaagcggtctttacagaactgactgtctctagtccaatcaatacagggcgacccatcaatatgttctaaattgagggtagattaacaactaagaactcctgcatcaatgatgtagataatggtggctctcccacagttaatgagagtccaatgatgccttggctggcgacactatcactagtgaatccacataagctcaccatacaaggttctaactttgcatcttattgtcccattttctacaatgtatccttataaaggatatttactgagctcccattatccaccaacactctttttattctcttattggcgagctgaactataatgacgagaggatcgacatgtggatacctcacgtgctttgtatcttcctctgagaatacaatcagaggttctttcatttttgtttttttagtggttcttgagaaaataccaattgctcattctttatttcattgacatatcttttctgggcattattactctctccattgagatgcgatcctcttgagataaccaatatatcctcgccctcaacaggggaggttgcaatcttggtatttgggttgttgggctgattgggatggtttggctcgttctcttgacgcttcacatactgtctgaaatatccatacgagattaggctctctatctcatcttgtaattgtcgacactcttcggttgtgtgccctatgtctttaggaaattgacaaaattttgttaaatcttgtttatatctcacatctctcattggttcaggcttgtggaatgcaaccctgtgctcatttgtgagaaagatgttttcacgagtttcattcaactcggtgtacacagtgttaatcggaacatatttgtcgtgcttttttatttcttcttatttttagatgattctttcgagtcatcctttcttttggtgtttgaaccacttagattatctacttttgtcgagacggtacttgttgtgatagtacttgtgctaggtttgtttccccagctagttttcagcaacttcatctcattctttacttcctctttccacacaaacacttgcgctccttcgttgaattcattaatgtttcttactggaccaccctgtaagtcatcccacaactcgccctagcttttaaaaggttagttgtgatccctgcttgaagagcactaagctgaatagtgtcattcaaagttctaacctttataatggctgtgctaaagcggctcaggtaagccttaaatgacttgcttgattgctgctttatgttagttagggatgatgcttcaagtcgtctatctctgaaagcttgaaattgtttcttaaaatctttagacagttgttcccaagatgttatcgaatagcgagtaaacttgtcaaagtagctactcgccaccacagtcaaggatgttggaaataaaatacatcgccaattattttagatgttgttggctcacattatggtattaaagttattcaagttagtgaattggtccgtagtcccatcatactgcgagacatgtggatttttgaatcccggagggaattcagaattcgttatattgggatgaaatggcttgatttcctcatctgagtcatagccagttaatttcccatgttccccatccagatattttctaaacttatgctccaactcaatgattcgcaacaagatgggatccacttgatgttggttggcattaagttgatggagtaagttaggtgcattctgatttcctcactcgcgaagattgggttgtctttgattcaaatgctcacaaagatccagttgtgttcgctcataatttctcacatatcttgtctctgagtcactctcagattgatagctttgcttattgctcatgcttttttgatcaccataacgtcgaggtctgcttccttctcgcatttacctttctgatttattgtgcctttgagacctcgagtgtcctgagctagaacttgcttcatcttgtaccgcccttctccttcggaagaggttagatatacgtccttcatttaggtacgtgtatacaccttccctctctgatcgagaaggacgttgagggtgtctcggtggtagcccacttgttctaggtagagtcccaagatttctctcgttattacaagggatttcctgttccctagatcggggctatctcgcgtcctcattctagcgagaagcctctggtatatcattacattaattccattggttcataaatccttgcgatctttaaggaacttttggatgttgttctcgattattttgttgttcttccactggaacatactcagtaaccccaggttgttcctcctgggtggtttggagacttccttgatttactccctgtcttctgattcttgaaccttgaggtctgcctcgtggtctctttaccccatgatcaagttaattttgagtattagttccttgagtcgccctaaccgctgcaacttctttttcgaactcaacattttgtcggttagatttggttaagtgttgccggagctatctagttttccaatactaatggtacatacctagttggatcatacgcatcctcacttctaggtatatatcttgcagaagtattggtttctttgttcttcccttctgggtttttattatcaccaccataatttctccctactaaacgtgttgttttaggaagttatggggtctttgagaacccattggctctttcctagggtgatgtgtagtttcctcaggacgttttccatcattttgattgtgatcagccatggatagatttgtgtttgtacgaagggatttttctgagttttatcactaaggctctcaatgaacgcaataaactgttagcgcagattttcattaactaaaaataataagactttacgtaattaatatatcatagaaatagtaaataacgattaaataagtctagggattttacgtggttttgcaattaaatctacatactccacaagtctatcttattataatatttttctgaataatagatacaattaacaattgatgatctttttcttttcaaaaatatccgtccctttttctgtagaatctgcccctatttataggaatatcagtttgcagttatttatacttgggatcgatttaaaatgtaaccgttcatgaaacgtggataattcccatgtttcatttaaatgcatgtgggataatattggataacttcttaactactttttattcttatccttatagatggttaatgttgatttggacaattgtatcttgcttaactccgagtttttatccttgtctattataatgtggaaaaaatgctaagtgttagcagatggttcgccttgtcaattttttttaattagaattgcgaggtggctgtctcgctattcgtaacttgaggttgctttgtataattgtatttactctactttgaataaatgaattatcttctttggctatgtactctgaggcaggtgtgtgtctcgtcaatataacgttcaataacctcttatccttatcacgcttaagactatgcagtcagcgagttatgaatatgttctattaattctttattaatgagttattctttttt

SEQ ID NO: 30058 - DNA, 3294 bp, Cannabis sativa
caatcttattagatttttgatataattctagggccttttctcttatgaatttttcgttactttttcagtccgacttgcctctaattataattacatcatagggccgttaattacatagttgactggtatctttacaacaattatctcctgaaagtgtggagtttgattacataccacgtaaaataaatacggttaatatttgaaaatcacagctgtgataggtccacttttactgggtcaaggtaatcgtgtatgaaacacgttgtaaatcataacgttctgggatgcctcgatggaaacacaggatcaataatcttggtagcgagctagagcttttaacacatctttttcgaggttaataatgtaagtcttgtcgcttctacgcttgaagacataatgctccatctgacaaccgcaactcttggcgacaaggtgaactttaacagccaacatcatttggatgtcagcttttatccgagagaactgcctcgatgagactatgaatctcattgaaatatgtctagagttgattagtgaagttaccagaagcgtgccttcctatgcgagatggacgcctcgctattagttgtttgggtttgcccgactattacacttagtttgtatgttgtgtattatacgctaagtgtcttaacagtcattatatctcgcctacgtccattcatgcgtaacgaggttgacgcctcgcctcacacattcgagggcatatgatttcttgttaacgcacgtgacaacagtttgtatagctttatctcgcgcaagatctttcagtcagcaagttgtaaatatactctattacttccgcattaatgagttattctattttcaaatttaattaccattacatacattgattcatattcttcctaatttgacacgtgtcctcctttgaaatgatggccgaattttgggtataatatctgggaactcccttctagatggcaactatcattccatgagactccttccagatttataggttagatatccgagaacataattccaagctttcgtggggttattgcagaaagtggaaataaatgggaagattaggggcataaaatttggtcgaaatggtccaacggtctctcatgtcttctttctggatgacagtctagtgttttttgatgcatcaagggaagcatgtcagcatttcacaaatgttttggagaagtattcacaagcttcaagccaagttttcaactttcacaaatttgaaatttgttttggaagaaaggtatcggttgctgtcaagactaatttggctacgtttatgggcatgaaggtggtagataatcatggcaaatatttggggctaccttcctttgtgggtagaaataaaaaacaattatttgatgtgatcaaaaataggatctggaacaagctgcgtggctggaaagggtcatagttctctatgactgggaaggaggtgttcattaaagccattgttcaggccatcccgacttacacaatgagctatttttgactgacaaaaagcactagtaataatattcacagaatggctgcacaattttagtggggatcctcaagtacaaatcaacgcatacattggtgtaaatggcctattctacacaaaccaaaagagcaaggggggttggggttccgtgaattggagcttttcaatcaagcgcttatcgctaaacaaatatggagaagtatccattttccattgtcattatgtagttaagttttgtaggctagctatttcccaaatggaggtgtgctggaagctaattgtggatctaatgcatcatttgtttggagaagtctctattgggggaagaaaattattttgggaggctattggtggcatattggtaacggcaatggggtgcgcattttaaaggatccatggcttccaagacctctatacttcaaaatatatgacaagtcgagcatccctagggggttgtatgttattgatctgaaaaatgctgagggagtttgggatgagactttcattagagctattttcaatgaggaggatggagaagtcatacttaagcttccatggatgggatgggatctcgacgataatattctttggcattatacacgtgatggagaatacactgtcaagagtggccaccgtatggcagctactttcaagaaagtggtgacctaatctaatgagactaaaatggaagcatggtggaaatacttgtggaaattacagattccatccaaagtgagacattttgtttagaagttggcccattcttggttacctacgaactcggttttagctgctagaggattacaaattgatcctagttgtaccaactgctctactggtgcacgtgagaatgtgtttcatgccttatggtgttgtaaagcacttcgggggtgtggaaaaattctggactgcaacaacaagtgcgaagagttgggaatgaagttgtgttatcttttttggtcaacttgtcacaacatatggctcaaaatatgtttgagttatttctggttttgtcatggcagttatggttcattcgtaacaaaaccaaacatggtggtgtgaggccgaaaccaactgagatcttggactggtgtactaattatattgattattttaaaggacaacgtgtccaagaaaatagaggagaagcaaggccaactgctcgctgggaagcaccagttgctggtgtgatgaagattaatgttgatgcaggggttaaggagggtacaaattgctctggaatcggttgtgtgatacgaaaccatcaggggcaggaggtgtatgcatcatctactgttctaccttgtgagtatgcttctgttcaagttaaacttttggccattcacgcaggtctccaagctggaatacaacgaagaatcccacattttttttcatcgagtctgattgtatggcagtgatccaattaatccaacaaaaagaggatggttgtcgtgacattgacggagtgcttgaacatatattcgacatcttttgaattatgctaacgttgacaatctttcatttgtattccgtgaagcaaatgtcgtaacttatgtattagccaatcatgctttgattaacaaaatcagtaccatgtggattgaaatttctctcccgtgtgtaaatcaagctattcggcaagacttgccaaatcctttataataattatttgtttcgttagaatgaatatgctttcaaaaaaacaaaaactgtttaaaatttaaggaatataactaatactcatataagttaatggacatgattttttcatggccaaaatagatttttatccataattt

SEQ ID NO: 30059 - DNA, 980 bp, Cannabis sativa
agagagagagagagataaagagagttcctttcttctctctcttcaaaaaacaaaaggcctcgttctcagtaaacacaacagagcaaagtatgtttcaagtggcaagcaagcaagcaaaccaggaaaacaaaaaaaaaataatatatgtagatttatatacatataacagataataataaagtattgattttgaacagtagaaagcgcgagagagagaagatcaagtcttgactcttgggtagtttcttcttttcttttttaagaaaaaaaaataaaaaataatttttttaactcaaagctcaagacagagccagcatgatggggcaacgggcatgtcgtttaactttaagcctttaactgatgaacactaaacgactcagtcagctgaacaaagcctgccccggtcagcaaagtgaagagaagctttgagatctagtatggtgtcgttctcctcattttggactaaaacaaagtttttttttttttttaaaaaaaaaaagcaaaatataagtaaataaaaatttaaatgataaagggaatgtatgtgttgtagtcgttggtactatgttgaattttttctttttctttatttatttatttatttatattatataattgtttttttggttcttttggtgagaggactgaggtgagccgcaagggaaagaatgtttggaggagaaggcaatatagtatataatgtatagacaaaaagaaatatatcatgcttctcttctcttgcatggactttttggtttttgtgaaattattagatttttcttttggggttttgtgaagaaacaaactccccctaaaaacttcatttttgtctttttagcccttacccacaactgattttgtggagcattgtgctttctatgaaatgaacacaaatcaaaataagttggaaccaatatgagagcttataaatgaaatgaacacagattgtgatagtttagctttcgaatgtgatattggcc

SEQ ID NO: 30060 - DNA, 1464 bp, Cannabis sativa
  modified_base (821)..(822): a, c, t, g, unknown or other
aaaatgtttaaaattccatgaaatcgtatttttgtaatttttttgttattttgatgtttttgtgaaataatctcaaaaataaatttttaggccctttctataagaataaataaattttttaaaaattattaaaaaaatatatgtatatattaaaaaaaaaaatttaacccctgagatgggtggaccctataagcgcaggcctaacccgtcttcgagtatctatatgtatgcttttagtatagaaaatgaatactctatttttcacataaacgttgatacatttcttagctaacaaaaaattaccacttcattttatatcaatttttatctttttgtctttaagaaactttatccttttatcatctgtttaattatctaataattaactttttaccaatgatatttttaaatagtactataatccaacaatattaattacttcatctaattaatatatcatatgtacataatataggataatggcttaatataatttagtatcattcatatactatattttaatttttatcatatgattttgtgacaaataggagagacttttcgatgtgacaatgtatataataatgttgtgtgtatatatatatgtgatatgtatcacatatatgatatatattatttgagaaagtgtagtgtggcttaattaagtaattattatgtctttaaataatgatacatgcatggtttgaactttgaaatttttgtctagttgatgtatatattgggtttatatattagccacacacaatataattaattatttatataaaagaaatattatgtatatatgtatatatatatanntatatatatatataaataatatggactgaaagaggcattttattggctttttgaggagtgtatatatattattgcatgcatgatagcgataatgcatacaaagatataatctttttatattggatttaattatgatcaattttcaagaataatgcatattttatttttcatgtctaattaaaatagtttttatttttttgtaaggctaatcaaaatagttttgataaatttatattaattattagtggaaaatcaggggggattactacaattttaaactatgtatttggtaaaagtatgaattagatcctttattttgtaaatgatattttttttttttttgataaatcagaaaaattataatgttcaaacattctttacaattacatcctatccttacttatgaaaagctagacaaatctattacaaattctcaaaccatatcctatccccttttttaattttctttggcataaaaagtctaattatatgctttacttattcctttactttcctcattattatatacaatgtggagctacaactattctattaaatatcatttctattgagctataactttttttttttttttaatttaagcgtttatatattacatcagcataacttgggactcgaacc

SEQ ID NO: 30061 - DNA, 2356 bp, Cannabis sativa
gtgcaacatcacttgccgcgaatcctgtgtttcatgctcgaagcaaacacattgaaattgatttgcatttcgtccgcgatcaaatccttgcacgacaactttcagttcgttatgtcccttcattagatcaagttgtcgatgctttgactaaaccattttctacagatcgattcctgtacttaaagaacaaacttcacttagctacttccaagtttcgtttgaggggggatataaacccatgaactaactagttagttaaaacggttatagtcagtagttaaatgtagtttgttataaattctgttaggcatttttcttgtgtatctgaatgtactctacactataaataaagagttcaaagccaactgttttggttgagctttcttggcattttacatttttgtttctctttctttccctcttctctgttttctctagtttgtaccactagtgtgtaccaattctccaatctgccattacaagcttttacatggtatcaatcgcctctgacctctgtctctcatggcttcctaagataacaactcctctaccgctgctcaaaatgatcctgttactgatactgctaccgctgcccctcctctgcctccacaagttcagccatggaatccatttgctcattccctctctgcatcgctcactgtaaagttggatcgcaccaacttcttgacctggaaatcccaagttgtcccaaccgtaatcggacatgatcttgatgatgttctttttactggtattccacccccacgaaacctagtcaatggagctcaaaacccccaatatcttcaatggaccaaacgtgatcaacttcttctatcttggctaagatcctctgtgaccgaaggcattcttgctgcagttgcctcttacaccacttcatcccagctatggtgtgcccttgaacaacgtttcacaagccactctcgtgcccgattactccaactaaaaggtcaattctctcatgttcgtaagggttctctaaccatttctgattatgtggacaaagtccagtcgctttttgactctattatcactgctggttcttctatttcggatcaagacttaatccttcaattgatgaatggtttgggtcctgaatacgattccgttgtctcgggtatcacttctcgaagtgatgatttaaccattgaagaagtgcaagcacttctaatggctcatgagagtcgtcttgatcatcacaacgctgttaccgatctgaccttaaagatgcaagccaatcttgcctatggctcacaaaaacatggtccatctcgccaatttcaacctgctgcaagaggtttcgcaccagaaaattcttttagacctattggccgaggaaatggcagaggttttccttccaactcacacctcatatgtcaactttgcttaaaaagtggccatacagcagctatatgtcactatagatctgataagaactgggttacccccaaacccaatgccaatactcctcgggcttatctcactgaagtggaaaatgatcaagactctaccagctactcccctcaagttcttccagattttggtgacgattttgggtggtttgtcgacaccggggctaccaatcatgttaccaacactcaagacaaccttgacactgctatagtctacaatggaaatgatacattggttgtaggtaatggtaagaaattggctatttctcacataggctctacttccttaccctcttcctctcatacctctcttcatctaaattcgatccttactgttccctctatgaagaaaaacttgatcagtgtttctcaattgactaatgaaaataatgttttttttgaatttcataaaaatatttgttttgtcaaggacaagatcactggccaagttctgctgagagggaggcttaaagagggtctctacttactgggagaaagttcttcaacctcaaaaccagcattacaatgcaatcttgcttttatgccatctgatgtggctactgcctattgtaattttcatactgatagtaatagtatcagttcttgtaatgactttacaagtaataaaaatcactctttttccactaaatgactatttgcaatccctctgtttttacttcctcacttagtaaagatgttaattcttggcattgcaagctcgggcaccctggtgctcaaactttagccaaactattacctcagctaccccatactggcactctaaaagacctcaaattttgcaactcttgtcaattaggcaaaagccacactctcccattacctatttcccaaagtcgagccactcaacctcttgcacttattcacactgatctttggggcccttcccatgatctttctattgatgg

SEQ ID NO: 30062 - DNA, 1862 bp, Cannabis sativa
tttattaaaagaacatttaaaaattactgatactatatgtttttgcctagcctcaataatctagaatcaggactttatatgtgtcatgtttaagataataatagaatctgttccaataaaattaaaaaaaaaattacaattttacaaatattaagtaaaaaaataaatattaaatttatgtctcttataaaataaaaattttagtacttatatcatataataataataataatacaatcttataaaacccaacctaagtaagtgaaacttcattaagcaaaaaaaaaagtaagtgaaccttcagtctatgaccaatcaactcaaaagaaaaaaaaaaataataccaaaacaaaacaaatctccaatatatagatgagagcaaaagttataaaaaacaaaaattcctctatttatatataaaaccacatacctttataagagtcccttactttagcttcccactggaatttaacaatgtacatattagaggttattacactattttccactcaagaaaaaaaaaagacatggtggtatatccaagggagaaagagtagttaaattgacaataataataataatattaatagtaaaacacataaaggatcaccgtatatgctttctttcttcaatgcttcagccacaaatacaaacttgtattcccttgaactcttcaaccatttattaaataaactgttggctttctttcttatactatcatttttctatttttcttttctttatttgcataaaccattttggaaatttcttctagtctgcagacatttttaaacatctgttttctgcaaacgtttttgttgcacacgtgtcaatttgtaagaattataggattaagtcgtacgtgtcacattttgtattcttcctctttctttactatattacatactgatcagttatttttgaagaagatggcaacaaagattgtttctgtaatcggataatgcttagctgccgtggaaaacggcaatttgtgaagccgtttctattattatttgctaaataccactcacacgagggagcgtgctgcgcaccctccaaagaggtagatgtttgttatacacgcgcggaagagtgagtgatagaggaatctgatatcgcgggcccagctgcagagaatgacacgtgcagctatgttttgtttgctcacaattttcttgttgctcttgtttagttaccgttttttgaaaaaaaaaaaaaaaaacacacacacaatcatatcgtgggagtgaaatatttatatatgtattttttattttcattcctatttaatgtaatattaattgcttttttaatctaaaaactttttgctttcaaaaaaaatctaaatttttttttcccatttaggcatttacattacagtaaagatttttcaaatttataaaaataaccaaaaatttgaaaaaaaaaaaattataaaaacaaaaaatatatcttcaataaatataataaattattttcttagttattttataatttgtttataattatattatatttggcatattcatttaaaaaaaaaacaatattatatttggcataaagttacttttctaagtattttacagtttatttatagttgatttaccgttattatgtatttttataattttaaaattttaaaaatatatttttataattaaaaattttatttcgtaaaattttcctttgattttttttataacaatatagtagagtaaactttgtaaaatgagcctttcgaaaaacataaattaagtaaaaaaaaaatgtattaataaaaacaagcctaattagtaatttttctcctgaactttgacatgtagtaaattgtgccctttaactttttttgtcgttaaaaattc

SEQ ID NO: 30063 - DNA, 5781 bp, Cannabis sativa
tttattatttggcattctttatgtcacttaactagggacagagtctataagtatttttcatcatgttgttgcttataacaaatctggggtacccttctagataactctgtccataatgggggtttgtaatttctggtagtagtttggcattttaatgaataatgaaattgatcgggtccctctactagaatatattatgatattagttatttcatgatattagaatatattatgatatattaagtgtgaaagtgaaaagctacataattgtagccacatgggtagaattgtatctcgattctcgattggtcggtggctgtacgtaatgcatgtacaatgtagaattattttgacagaaattgccgtgaaagatataatttatataaatatatatatacatcgtcatcacaccttaattattgtgatacaagtttcacaaatagttaatataaatacatagattatatcaatgaataaaatgaataagaattaggggtatttttattggagtttggcactgactattagagtacgtccgatactttggatcaacccttcaacttgtgattttatttttgcttttgtaaaatatagatcattgctattaatatgcacatatatgatgttgagtcgtgactttgggaaaggttttaaaactatagctatatggttcatatatctcagctgcaatatgtatagacagttaaatcccacacgtaccctcaatgaattctagatagtgggaggccttgtttttaggtacaagaatatatataatagttatggaagttcatggaaacgtgtcaatctccattgtcttttttttttcctttggaggatcaaaaccaattcctttagtctctaaaagtaatttaatgataaaaaagcctcctgtatattgaggagttactctaagtaaattattactttttttaatttatatggaaatttttagtaagaaagatgattcccttttaaaaaaaaaaaattaataaaaaataataaaaaaaaaaagacgcacgtttgactagaatagcagaattttgactgaaaatacttattcttcgctctttgaaaaacaataaagggttctttcaaaataaaaaaaaaaaaaaagaaaaacaataaagggtctgatccagcgacgtctaacaaaaaagggagaaatgttaactactttgccttttctgttttgtaataacagaatttagtttaactaaattcttgatttttgtattactgtaagcctataaataaagttcagtcctcattatcaatgttaagctttttagcattgttttgaggctttcattttctctcctgctgttaatcttttcatggtatcaagagcaactctgactcgcgtccatggcatcctccggcgacaactcgtctcctgtcggtgtctctgatcctaggcctcaagccccaactccagctcctcaatcaaatccgttttctcattctctcacatcttcccttaccatcaagctcgatcgagctaattttctcccatggaaatcacaggttgtgcctactgttataggacacgatcttgatgagatcctttttactgatatttcaccacctgagaaactcgtcaatggcgatcacaaccctcagtttcttcaatggcgccgcaaagaccagcttctcctatcttggctgcgctcatccatgtctgaaaatattcttggctctgtctctggatataatacctccaactctctctggaaagctcttgagcaaagattctccagtcagtccaaagcaaggctcctgcaacttaaatctcaactcaccaatcttcacaaaggttcactcagtatctctgattactttgataaaataaaatgcatctgtgattctttggccactgcaggacacaccattactgatcttgatatgattcttcaccttcttaatggccttggccctgagtttgatccagttgtatctggaatcacttctcgcagtgatgctttgtctctcgaagatgttcaagcattgcttcttgctcatgaaacaagacttgaacggcaccattccatgcttgatatcaccacaaaaatgtcagccaatttaacctttggttctcggcctggtccttatcgcccacctcccttctatgccagaaactccaatacagatcactcatccaaaacacagcctcgtcacccctctcgtccttcacaaaacaatcgcccactatgccaactttgtctgagatatggtcataccgcccctgtctgtcactaccgttttgacaaaaattgggttaccccaaagccaccttcctatcagcctcaagctcatctcactgagcaaacctttgaatatgaccctcaggtgcatgtttctcagtcgcttcctgattttggtgacgatgccggttggtttgttgacacaggagccaccaaccatgttacttgcaacatggatgttcttgattctgccaccacctattctggccaagaaaccgtggctgttggcgatggtaagagacttgtaatttctcacatcggtaaagctactctttcttccaattctttacctcctttaaaattaaaatctgtcttgcaagtccctgctatgaccaagaatcttgttagtgtatccaaactaacaaatgataacaatgtttttcttgaatttcacaagtcttgttgttttgtcaaggacaagcaaacgggggctgttcttctcaaagggaagcttaaggatggcctataccttcttggagatgaagactctgatttgtctcatcatagcttggaatgtcatttagccacttctactatttcagcttgtaatgacacttattctttttccaattgtaacactgctactgcagcaaactcttgtaaaagttgtcatataaataaaattgatgattccagttatacttctatccatactccagcaatatactctacctccttaaagtcagatatcaatttatggcactccaagcttggccatcctgcccctgcaattttaaaatctattcttactgcagccaacattccccactcccttaaagaacttaaaatttgccctgcttgccagttaggaaaaagccgtagactcccattctctttgtccaccaaaagagcctctcaaccccttgaattaattcacactgacatttggggtccctctcacactgtgtccatagataacttccgatattatatcatattcattgatgattacagcaggttttcatggtgttttcccatgacattacgatcccaagcatttgacattttcattcactttaaaagccttgtggaaaagcaatttaatttgcctataaaacaagttcaggctgatggagggggagaattcagaccttttgaaactttcttacgagaccaaggaatcaagtttcaactaccatgtccacatacacatgagcagcacgggcgtgttgagaggaaacacaggcatgtgactgaaactggtctgactcttcttgctcaatctggccttgatatgacatattggtggcatgcttttcaatgtgctgtgtactccatcaaccgaatgcccacatcggttcttggaaacataagtccatttgaatgtttgtttcataacaaacctgattacagcatccttaaagtgtttggttgtgagtgttatcctcacttgagaccatataatcatcacaaattggagttcagatctgagaaatgcaccttcttgggctactcttccaagcataaaggctacctgtgtgcaaattcagcaggaagaatattcatctctcgcaatgttatttttaatgagactcaatttcctgctcaacaatgttcttcctcatctcaggtacctcctactcaccctaatatatctcctacagctcaattttttaccaatactacccataatatcactcacttgtcttcctcttttgctgccaatgagtcctcaccctctgctgcatcaccatctcataccagtattcctactggttctgctccagcagtacaacctgctgcatctccttctgtggattctggaacaatggtggctgccacaattaactttggtgataattccactcattctctcccatctgcaactgctgctgtgagtgataatactaataatgctgcaacttttgcaaatggtgatgttcatactgctttgagtaacactgctactgctgcccctccaaggagtcatcctatggttacaagatctcaaaatgggatttacaaacccaaagcttatcttgctaccaaacacaagttacccgaatctctcttaccaaaggaaccaaaatctctcaaagctgctctaaaggatcctatttggaatgcagcaatgaatactgaagtgcatgctcttaaggctaatgggacatggactttagtgccttatgagtcacatatgcacttgattgacaacaaatgggttcaccgaattaaactcaaagcagatggctctgttgacaggtttaaatcaaggcttgttgccaaggggtatcttcaagctcctgggatagattatgctgagacgtttagcccggttgttaaaccggttactgtacgattggtccttactcttgctgtctcctttaactgggaagtgagacaattagatgtttctaatgccttcctaaatggcatcctacaagaaacagtctatgactcagccgcatggattcgaagactcctctaaacctaatcatgtgtgcttattacacaaagctatctatggactaaaacaagctcctagagcttggaatgacaaacttaaatcaacattactggcttgggggtttaaagcttcgaaatctgatacttctttatttgtctatggctcgggtgagactctccttatcttactagtatatgtggatgatatacttgtaactggacctaacacttcattaatcaacaagctcttacttgatctcaacaaccactttcaaatgaaagaccttgggcagctgcattattttctaggtgttgaaatatgcagaaacaaagatggtatgttcctttctcaaagcaagtacattgctgatctcttggtcaaggttcaattagatggtgccaaagcttgtgccaatcctacaagttctgctcataagttgtctctatctgagggtactccttttgaagacaaaactttataccgtagcactcttggtgctcttcagtatctcacgcttacaagacccgatgttgcatacataataaacaagttatctcagtttttacatgctccaacttctgtccactgggaagcatgcaagagactgcttcgatatctcaagggttcaatatctgaaggtttgcacctaaaaccagttgacaggatgtccatttcagcatactctgatgctgattgggcaagctgtatcgatgatagacgctcaactggtggctatgctgtcttccttggtccaaacttgatctcctagtcagcaaagaagcaacaagtcgttgctcgatcttccacagaatctgaattccgtgctcttgccaatactgcagcagaaatcaaatggatcaactctttatcctctgaactgcaactttgttttgctgatatccctgtcatatgggtcgacaaccaaggtgcagccgcacttgctgcaaatcctatttttcacgcacggtgcaaacacatcgagattgatcagcattttgtgagggatcagcttcttaacaatgaactatctgtcagatacgttccctctgtcgaccaagtggctgacattctcacaaaatctcttcccaaagataggtttcagtatctaaa

SEQ ID NO: 30064 - DNA, 2193 bp, Cannabis sativa
  modified_base (360)..(360): a, c, t, g, unknown or other
atactgaaatttttaactttttaacttttttactgtggggtagaatttttttcaaaaatactatgtttttttttcccaaaaataatgtgtaagttttatgatgtgtactgtgttacatttttactattgttctatggttgttttttagttattccactgttatttttagttgttctgttttgtgttttactgttgttctataaaaacacagtatttttgaaaaaaattccgtgtaacagtatctttgtaaaaattaactaaaatttcaatatttttgtaaatttctcataatataattttgggcttaatcacacattatatccacctagcccatgtcccatttctttctttctttctttntttttttttttttcattttaatttcttcatgcacaagagaagagataaacatcatatagaaatgtgataggaccaacttttattggctaataaaaatgcacattaactttaatgtgacacaaagcaccatatatctttattgtgtctttaatttgatctttttgtatttttcatctaatcttttcactctatttaattccaaaagttcacatttaagtcccaatgtacacaatattgagataattagttataaaatagaaaaaaatcaaaattaataataattacaaaaactacataaaactaatctaaatgaactaataaaattaatatataggcaaaaactaaagaaaactaattaaaaatcactaaaaatatttgagaacaaaattattataatgtacaaaaaagactaaataattttatttgcatagagttataataataataataataataataataataataatagtctttcaaaaaaaaaaaaataataataataataaatttttgaaaataaaactaagcaaaaaatatatttcacgtgtaacgtgttacttttattagtatatataaaaaatatctttacgatagaaataaaaatgtaagaaaaaaaatgaaattaataccaaagattaaataaattatagacattaattgtaaaataaaaaaaatatgaaaaaaaaaatttatatgaataaagtgtgtttaagtttcatgagaaaaaaaaaagggactatatatagactatatatatatagtgtaataaaacatggtgataattattatatatgtgatcataatttgtgaatcaaccaaattgaatgtgtcataataatcccccatgtggacgtactaaatgcagacaaagcatgttccctttcatgtgattcccaaatctaccattttattatttatcactttgcctaacaaaatcatatatcttcttttattataactttcttttttaaaataaatatataaaaataaaaaaaattgcagtgaaactaaccaccaccgatgtgtcataaaatggagtcattaccaaaggagaataacactaaacgctttatagataaattttttagaattaaatgtgatttttagtcacaatcaaaaagtattttatgactaaaaagaacataatatttaaatataagttgtcagttttaattataagaaatattatgactaaaaacatatttaattacaataaattttgattttcgtgattaatatctttactcgcgaaatttttaatcacaatataaaaataataatttataattaattacaattttttttactttcagttcgttgtcattatataaaaataaatattttttagtgacaaattattatagaaaaatagagtattgaatatgaaaacttgatcaattgaaaattgggacatcgtattaattaattctaactttttcatttaattgaaatttgagtttgaatatgtactcacaagaaaaaaagggtatattagcaaccacataaattacttttcatcttatccattgtgttttatgattaatcaaaatcattatttatatatatacacaatatatttctgaattatttttttcttcttgttcatggttttctcaagttatatatctagtttgtaacaaagacacaaatggatagtgacagaaccataacattttatatgtgtgtatatatatatatatatatatttgtgtgtatgtgttttttcacattcattattattattttgagacaaaacttggataaagtgaagaccaagtcgtctttgcatcatggctttactatatttgctcatcatatatataatatatccat

SEQ ID NO: 30065 - DNA, 4845 bp, Cannabis sativa
ctctctctctctctcccctttctcatattcttcaaagtttggtaatttttttttaaaaaattagcttcaattggaggtgttcttggtgtgttttgtgtttaaagcttaagaaacttgtggtaagttcctattcctcctttatttgagtttgatttttgaagttttgagcttgtgttttatgtttgatgttcttgtgttggtttagatagatgttggtaggaattgaagtgaaaatagttggtttttatggtgattaagcttgtagatttttgagttatgcatatctagacttcttttttgagaattttagagtcaaaattgtgatttaatttctgaatatatactttgaattttctgcatgttttatgctgtctttaagctttgtgctcatgcttgtgaaatggaagattatgttggttttggctcaaagtttgttgctagttttgattcttgtagaacttgtgtaatttgcataatttgatgtggttaagagctttttttggtgttcttaaaattttgttattgatggatgtggttagagaaatatgtatgtgaatagtgcatgccttgttggggttttgttttgagttaggtgcaaattcgagttaaatgaaattggtattttctgggtgttcaacccaggtgccgcggcatgggctgtgagtgccgcagcccgcctgttggtgtttttgggtttccaacccagatgccacggcatgggctttgcatgttgcggcccgcttggggttttcaggtcagtttggatgtaaaacttgttttgtttatatctttttagttcgaactccgttttggacgttccaattatcattggaaagctcgttttgagctctatatgtttatgcataattaaaatgccaattatatgattatgtgaaagtagatttgggggttaatcctatttgtgaaatctcgagaatttgtgactaggactaccgaaacttgctcaggagcacctagggatttggaatctccatatacttgggataccaggtaagacagtagttagcacgtagggttaagcgcagtggtgctcatatttgatattatgattgtaactaaatgtggaaccttggattatgtttattaccctaaagtgagcggttatatagcctagggttattaccctagtatttaagtagttttgtgtataatgccatactttatatgttgaaatgaagaattatgtgttcaaggcataattaggttacactcagtaattagaactgagataaactattctaaggccttattgtaaatagacgtgtgagcgtaacacgtgggtctatgccatatggacataaataggtgtgtgagctaacacgcatgtctatgtcaaatagacaataagtgcagtggcatcaatgattatgtgatatttatttattgtgtattttggtatttttactgtctccttgggcttggctctcaggtgctctattgtacaggaaaggataaatatgtttgtaatcagccatgagttcgagggcttggcggtagatgatacatgttcgggccatactaagaccaagcgggttgggtctactagtggatgtattttgttctcttggattttgccgcctaggtcggcatgtaaagaaacttgtaatattttacaaaaattttatgggatatcgaaacacattatctttctagaatggtagtaaagtttaaataattacaagttatattttacactgtactggatttaaagtttaaaaaaatttcccgctcttatttctagtaatcctggtttagcgagattagattatattattggttgtcgtagcgtgcctaatttcttggagcgttacattttttataagctttttttttttgttttttaattagaatagtgaaatattttccaaaaatatctcctataaaactcttttcactttttaattttttaactgagaatttaagttttgaaaacaaaaaaaaaaaagttacttttaattttttaaaacggattttttttattattattttattttcttaatcaatattttggactctgaatccaacctgaaccttgggacccaaaccccacccgaaccctaatgttggtctggacctcaaacttagactaaacccgaacccagatctagaccttggcctcggactcgtacccgaacctcgatcctagactaagacctagaccctagcctcggcccacacccaaacccggcctcgaacttggatccctaactcagacctaaacctcggccttgattctagactcgactcggatccaaacccgaactctggccacgaacctggacctggacctaacttaaataaaatcaacaaatgaaaatgaaatgaattttatagaacacacttttgtctgtttttaaaattgaaaatcaaaagtagttataaaacatattattatttttgaaaaataaaatgttaaaaacaaaatatgtaattttatttttatgattaaaaaatttaaaaataatagtaacatataacttttatatatgttgtagtttcatgctaattaataacaagaggtatataatagacaagcatattgtgcgggtcaactacctcactaagtattgaatacatatgattgattgttgtcaaaatgtttacttatcttttcaagtcaattttttaaagttaattaattgattagttttcactgtagctatatctaacaaaacataaatgtcttttttgtaatactttgaatgaatttgattaatacatcatgttagttgagagatattttgtaaaacacaattagttgctatactcttaatataggataacaggataaaacaataacttttattctattttatacctcgatctcaataaagtgtaattataaatcaattctagtactgatcatgtaagctctttttctttttactgggaataagactcataaatatagacaaagacaaccttatatttgtattgttcactttaaatttaactctacattctctaaaaatttcgtattaatagaacagtattcatttttatatattatgattttctttttttatttttagtgagattttagtttcatatctaacaattactgttaaggatattaatcatacatatgccatttatatactataataatacacatagaaaaagctcatataataataattatcaaacaactgaagacaagtgacacatctcctaattaaaatgttaacttaattaattcgattttattagtcgaaatgaaggtgatatacaagttgtagcagtttctaaacgtattaatttaatatgttcatgtataatatttttatattggttacatgtgatcattccagaaataatgataagcacttatataacatactgtataattgatcttatcctcataagtcatcataagaatacaacgctctcttatgcatttatgcttatttatagaaatacattaatttgtataagaagtaatacttttatcaattttagaaaattaaaaattatgatgttacaataatattataacaatatttaaaagtaacatagaactttctatgaaaatcataataatattatagagtcgtaatgatgttgcttctctcgtaaacaaacaaaattttgtaatatattatgattaatcttgaaaacatttactacatgcaagttggattattttcctaattctatatatagtatcacatatagaaaaagaaaaataaagaagaaatcaagttgatgccatccaagagatttcttaaataactcttttgttaaatatacacaacaaagtcaatgataaaacaagcaagcaagtaatcactttctacagagaaaacttccaaaagacttgagtccaaatacacttaaaaactgtaaagaaaagcagaaaaaacaaaaattgaaaagcaactgctcctatttgaatgtagctcatctattttttaacttatcgcttatcagttttagagagttgaattattactcaacaacgacgtacgtatatatatggcataagcagaagcgaatatctcgttcaaagaaaacattgcatttgtttcattatattaatttatacctattatcattaattaatcaagttgcttagtttttaaaacatggttgatgttgcatattgattttcctagctggccctttctatgtttgataagtacttattgactaatgatataaacaaataagaggcccaaatatttaaatatatgtttatttattagtgataaatacaaatatttgtgattaggtgataaacttaagaagatatatcaaaatatatatttttgttgttcctaaatccttaattgtcataggtctcttgtctttttcctccacccaggctcaaagccttctctggacttcaacgtggcttggtcgaggtctataattgagcagcaggcgtagcatgatggactctctctctatgtgttgtaattcttttctccatgggttgttctgtgacatcgacaatttcttgagttttggcccttgtccggtgcagttgggaggttcgtctgatcgagatctaggcaggattgtgggtggtgacatggtggtctaaggatggcccttctttcggatcgggcagggactcgatgtgggtttcgatcgatggtgttatgacaggagatcgatttttccaattcaaatatggtgattaggttttcctactacgattaggttctgagaaaattgcggtaaaatccacaaaactttcacttaggtagcaattaactttaaaacccaaattttaataataaaactcccaaaattcgtgttctattagctagcaatttaccattttaattaatttttaggtattagctgacatgttgtact

SEQ ID NO: 30066 - DNA, 2382 bp, Cannabis sativa
tccaaagcatatgatcgggttgagtggagcttccttatgactatgatgcgagggttgggatatgatgagatttggattgagaaagtcatgaggtgcgttactaatgtctccttttcggttttaataaatggggaaagatttggaaaattccatccatcccggggtcttcgccaaggtgattctctatccccatacctcttccttatttgttcggagggtctgtcatgcttaattcaagaagccgagagggctggaaaaataacaggggttcggtttggaaggaatgatgttaccgtttctcatcttttctttgcggacgatacctttgtattttttgaagggaaggagacagaatgtgagaccatgactctaattttccagcggtatgcaaggctttcgggtcaaaaaataaatcttgagaagacagaagtgagtacgggcagaagtatttcgaaacaattaggccaacatcttgccaacacacttggggttcggttggtccctaatcatgccatctatttggggctgccaagttacttaggaaggaaaaagaaagaggtttttgaggtcataaaagataaagtttggagtaaactcaaagggtggaaagcttcaatgttctctcaagcgggaaaagaaattcttataaaagcggtgatccaagctcttcctagctatttcatgtctcccaaagaagttgatcaaaaccctccattctttggctgccaatttttggtggggagacacaaaggaacataaaaactccattggagcacttgggataaaatgtgtaaaccaaaggaagagggaggcttgggtttctgtagtctcgctgaattcaaccaagctcttttagccaaacaagggtggcgcctcattcataaacctcactctctattagcaagaattttgaaaaatagctactaccctaacacttcctttcttaatgcaaagtgtccccaaaacgcatcttgcatttggaaaggaattgtttggggaagggagattatatatgaaggtgcccggtggagagttgggaatggtagaaccattcgagtttggcaagataagtggctgccacggtctaatggtacaattgtacaccggccaatagatgcaaatcccaatatcacagtgagcagcctgcttaataataaggaagagtggaatgtaaatactctaaacaattactttcataaggagaatgttccttggatacttgggatccctatagatattcactcggaggacatgctagtttggccttttactaaggatgggcactacattgtgaagagtggatatagagtagctagggagataaaccttgctcctacccgatgctctaatatggatcaaactcatgcttggtggaagatgtggtggaatctgaatttgcctcctcgaatgaagctctttggatggaaaatgtgtcgaaattggctcccggcaaagtccaatcttgttcatagaggtatgaaaattgacccaacttgtaattaatgtggccaatttgaagaatctctttcccatgctctttggacttgtgaaaaggttaaaaaagtttggaaacttatgccttcttacaagttaattaaggaaagtagagggcattcaatgatggatttgctagtggaatttcgatataagctagctaaggaggagtttgaagatgttgtcaaggttctttgggcaatttgggtgaatcgaaatagacaatggaccaatcaacactatatgcatggggctcgtttgctggaatgggtattcagtagctacccgaaagagaatcatgggaaggaaagtctccctaatgtgcattctgctgctcatacagatcagtggcaagcccctcctgttggcacctattgtgtgcattgtgatgcagctatccaactgaaccaggaaggggtggggataggctatgtttggcgagattggttgggtaacattatttctactggtatgaaatatacccctgtttgttgctctgtgactatagctgaagcacaagcagttgttgctgctctgcaagatagaccgaagagcttgcaccagctgtttgagatcagatctgattgcaagctactggttgatgcaatctcagcaaatggcagctcccttggtgatatgcagccagttgtgaatcaaataaagcgacaccctgagttttcccactgtacaaagttctgtaatgtaaaaagagtccataatgtaggtgctcatagcttagctaagagaagccttgacaaaaaattaacccattctttttacaattcttttccggattggttagccattgcttgtaaggttaacctctcccattctttgtaagtttgttggtgttgtttaataaaagcttcttttcaaaaaaaaaaaaaa

SEQ ID NO: 30067 - DNA, 1674 bp, Cannabis sativa
cgtacgatcctcgggacatgagggttgtttttttttggctgtttagtcgccaggggcaacaacaaatattttgtaaatgaatagtaaacttttgtaactgtattttataaacgggatcctagaattatataaatgtaatatattatcttttaattaaataagcaaaatttaattattcaagattttctaataatctcgttgattagcaacgagctgcacaatacgtttaaaatcacgctaacacccctataatagttagggtgttacacaagtggtatactaagttttgttgaggatattgacttcttttttcagattcgttgggggtgtgcatcttttagtctgcttatgtattctgttcagaaagacatgataaaaatgaaggctaagttagttaagaaggaagtcactgagtcgcggggtacacaatttatggatacgcaccaacattacaatattgggcctgtgaggcaattttagaagttggaaaagattttattgttagtcatgggatacaagtatcccgagtgcttagctggggtagtaaggagattgatggaagttatgacattccaaagaaaatacttgctccaatattttctaaaagggtatgtttttttttctatcattattgtattatttatcttttaatgatatcattaataagttgtatttttttctctatgttatattctgtttattcttttataggtttgggaaatgattttaacatgttttttttttcaatagcaactgaatgtttagaaagcattacttcctcgccctgataaagaagggtatgccagaaaaatcacttacaatgatgttgaaatagtgattgagatgggtgtcaacgagacccttcctgaatatgatgccccgaaccctgctgtttttcaaagccatgcagaaaaattcgcacaacatatcaaatctgctactattgcatcttcttcaggccttgatcgtgtggagttccaagattttgtacagaggttagacaggatcgaggctgagcataagtgtctttccacttgtcaggcccacctgaaagaggcataccaggctagccacctagaactgaaggctggtcagaaccttattatggagcagctcagggtcattttgagtataataaataataggtcgtgagcagatgcacgtcctcaattgcctcccatggaagatgttgacgtaatgtctgacgactatgatccttatgtttatgagaatacttcttctccagtggatgccaccaatattttcatagttgagagccagtcacagggtgaggtactgcccttagagagaccaccataaggtattcagtttcggaagaggaggaagaccacatggtttaaagactacactaaaatgaagaaaaaactcaagtcgtctataccttttgatcctctcatcccactagatgataggctgttggaaagttttcataggtggttctgtgggagtatccccaaccatcatcttcggaacgttaagactggtgattacaatcctgtatggtttacgaagatgttgacacgacaggattggattgaagattctgtaagtaaacagatattattttattactacaatataattttagtttatttaatttactactgtaactgctcatttgtatcattatatgcagcatgtagatgcatgtgt

SEQ ID NO: 30068 - DNA, 1632 bp, Cannabis sativa
  modified_base (26)..(44): a, c, t, g, unknown or other
  modified_base (844)..(846): a, c, t, g, unknown or other
gtaaaaatgtaaaaaaacattctttnnnnnnnnnnnnnnnnnnnttttacaaaaaatggtgtcttatgtaattattcttatttgtattctcattcaagaagctctaacaaatattgtgccaagtttggcacaacattctctatgtgccaaatttaaatcaccttttgatacattcttggagtacatttttcctaactgaactgtattttagttttacatcacatatcttttggagcacatttttcttaagtaaacaatattttaactttgcatcacttatttacatctctattaaaaagatttgtatttcatattatggtttgtttatttttatatattgaacaatttttcttatctcttgtttatgtaatgatatgttattttattttgctcgaattgaacaaccttattgttttgtttatatattagtttacattattgaatttccaattgaacaaccttattgttttgtttatattttagtttacattattgaattgaacaaccttttcgtgacatgttccgttttgtttatacaatttattttgttggataattagattgtacaaccgtttcactatattttgaaggaatcttcgggtggatagattagagattggtggaatcgagggagaagctgatttttgaacttctgaaattatttgattttactgcttaaaatatatgacttgttaattttttttttttaaaatataacagttacataattatgtcgcttttgttaagtttcatttcttttacagttaaaagttaatattttaccctataaattttgaccaatgcaaaattttgcctcattttattaaaaaattaattttaaaannnataatattctattaattctaagaaaattaataaaaattattaaaaaatctgataaaaatattaagttaaaaaatctaaattattcctaaaaaaatatttttaaactttattttatttataaacacgtatcttaaaaaacaaaactaaaattattggaaatctaataaataatttaacaaactaattttttttttttaaaaaaaaagaaaaagaaatcaaacttatttaaatttataaacttgtatcttaaaagataaagaaaaataattaaaagttcaattaaaatataaaattattttgaaaaaagttagaaattaaactaaaaaaaattatgtttacttaaacaaatctagattattggaggaaaaaaaatggactcaaacttgttcccataaaatttagattatacaaaaattaattttttaatattatttttttatatctaaataaatttttgaaatcgcttaattatttttaaattttaatttcttttttaattttcttaatcattcaaaatattttttttaagatctaaattaattttataaaatttacaaaataaaatgttaaatatttctcatttttattctgaggagtacgatttgataattgtcaaagtttaggggaaaatctgttaattaacaaaaatacgtcagtatttaaatagaataatgaaagggaacaaaacaaaatgactaaatttctataaatataaaagtttaggaggaattcttaacaagccatatattttaatgggtgaaatcactattgtcgaaaatttaaaaa

SEQ ID NO: 30069 - DNA, 1295 bp, Cannabis sativa
agtagaaacaaggttaataaaaaattttacaacactattgaaattagcaggaagagctttattattataactagataatttttcttcttttgtatccctaaaaaaatcctaattttacctttgtactctccatgccttctcatcttgtgctttgatgaaggctctcatcctaactttctagtagggatagtttgagtcattgagaagtggaggacgagataccaaacttctttccgctaagaaagacatttcacacaagaaacaatttaaacaaaaattaaccacaagatctcactaagggtttagtgaaccacttatacaccaattgaaattccatttatatgattaccaaattaattaactaaatattgtattgttatcgagatgtttaaacaaacatggagactaattaacttgttgaattcaagttcttcacgtaacaaagaaattctctctaaacttgaaagtgatttagaatttgatacaccaagagagctaattaaaaccaacgacctaagggtgtctttatacactttagaaaccctttaggttgtggaagaagaattaaaaaacaatccgccattaaatggaaaaacttctcaaaaaaagaaagtcaaattttgttcaaatagattgttagtccgttcaagcaaatacattgaatctagacagaaatgcactaaattaatagtcttttttgcaataaatgcactacagaaataaataactaataaattatcaatgacaccaaatattttacgtggttttatagttaaaatctatatatttcacgagtccttattattagggatattttttgggataccgagtatgatatcaatatttgaataagaatataggttggcaattatccctttgagattgattcaaatttgtcgtcccttttctcatgggttctgcccctatttataagaatataggttggcaattattcctttgagattgattcaattgcaactgctaatgaaacgtagataatccctacgtttcatttatttaaacatgagataatatctaataactacccaattgctccttatttttatccattagacggttatgctaacttggaaggttgtatctcgtcagacatgagttttccttcttgtccatcttaataggaaaagacacttaagttttggaacataattcatcccgttatatcccttcattggtattagtaatgtgaggtgatcatcatgctatgtgtaacacgcgacagttgagtgttgctacttttattctactctggtgggagaatatcctcttcttct

SEQ ID NO: 30070 - DNA, 5687 bp, Cannabis sativa
ccattataaaagaagatctacaagcagctaaggagtatctccttaagtttagaggccgcagccacgccactaattatggcaccttcgacattgggactaacacaaaaatcaccacatacggcaagcctctttttcctatcccaaagacatttctcctctctcgctatgctcgtagctggaaaggcgcttcccctgtgagcagaacaaaacaaacccagccaagagaaaaatattagcgctttacaacctcaactgccaaattatgcaactgatagatgatacaagataattgatgaattctcaatcaaagcaaacctatgagtgaatgttaaagtgcaccttgaaacttgagaaggcaatgatgataatatggaggtatgagaaatggaaatttccaaaagaaagcaacgcaagctcaagtgaaaaatgagtgtgataacaacagagtgcaaagtagcaaaaatagaagttacaagtacatgaaaaagattggtcaaaacacaattatgtatcacatgtgatccattgtatctgtatatatgagacaactaaatagttttgaaatcgaaccactttttcaccatgtaattttgcagtaatttcctaaaacggtaagtgcaattgtatatagtactaagtagtaagtaattagctggctccacttaaattatcgggcctatagttttgtgggttgaaaattaatgcatatctttctatgttatatgttactgtttacggataatcaagcctattggccttagtaaaaaaggtccaaatgggcaagctgaatcagtatttttctcttcctagttgttacatttgtgtattacaaaaaataagctaaaatttttagaggactagaatagtaaagactgaccatctatgagctttcatgaaaaagggctgagaaacatttattcctgtcatttgtagtgcttgaagtagctcttcagaaactcttttcaataatgcatcagaaggtttttgaagtccagtttgtgagattatactctgagcatactccgcagtagaatgcaatatccatcgttcactgcaattagaaaaatgaaaacaagatagtgtgtaagtactatactaccactagtaccagtaaattgctttcattttcctaaacaaaaaaaaaaaatacctattagcagaacgcccaggtttgctgctgtcacagtgagcccagcttaaaacttcagaattttttattgagaagcctttcaagggtatctgaaacatagattaggcagagttaacccatctaggaactctgagcaataataggatgaaaatgtaatcgatcaaatacaggatacagtacataggcgtgattactatcttactgaagatagaggttctgcaaatgctagcatgagagcaaaacatgggtgaacaggaataggaatgtcttgcagcttatctgctatctctggaaccaacttcaaatctatatagattaagaaaacaaaatcaaacttgagttatgtcatttttcagcaacaatccagtcccagttaacaaatgaaaaaatacatagtagagagcaaaacatattatcttttggatgttcttaatataaaatacatgctccaccaccagatgaatatataaaaatcatagatcataccaagtggttgcggtcgtcctgttacacttgtaattggtggcaacaaaatatttttatctgatactactacaccattgaagtggccaagattctgtccatccaaggctgtcaccatccacagattttcattctgtagccaatccaatctcccaacgcttgtaccaaacctagcttccactcctaagaaaatattaaaaaactcactctgaaccttgaaaaattattcaaatgttcaatatagagaagcagtagatttatatacacaccaggctcacggcataatgctttgcaaatagaattcattcccggaacacccacatatcttttacatacttggtcctacaggatgtagtgatagaaagattcagaaagactataatctgacatgagataaaaataagagcaaatgtgtgcatagaaaaagatttcacaaacagattggtttcgtttagttttagttttaatgcatgatgggtagaatattcaaatgaaaaaaatttctgtatggtatctcagtgtataactaatatactatataaattataaaactggtgatttaatcttacatcttcatatttaaggaattctgattcaaaattaaaaatatgccgattgagatgttactctcctgaaaattaaaaggcaatacatgtaaacctgttctgtatcagtgaatttgctggaggtacaatcaaaggacccaaacttttccttccactcagctacaagtcctctaagttgccactccttaacaagacccagtaccccattgttgctggaggtgaaaaatggagcaccatgatcaaacattaattccgtcccatcttcagtagtttctctgtgtaagaaagtatagtcgaaaatatcaaaaccaaatacagatactcttagacacttctactcttaaacttgcaaaatagcctgaaaaccaaaaaatccctctctaaaagccaaacgagtccaagaaattacttaaataaaaaggaggttgattcaaattcatttccttccaactagatccaaatgaagaattaccgaaatcaactatatgatcatataccctttactcaattttatatattaaaagagaatcagagaaccttcgctgagacatgcggcctccagggcctctggcagattcgaacaaggtaacagataaaccatttcgagcgagaattgaggcagaaactgctcctgaaactaacaatggggagcatatcgaaaatcaaaactataagtctatatacattaggaacgaaggaattattatatataaacgaagaaaaacaatttgttacttccagttcccacaacagcaaccctagtagtattatgcattgaagagaggatgattcggatatcgctaattgcgttaggaattaggatatgaagaagcttgaaaaattcattaatggcgggtagagctggagcgtggttagttgggaagcttaggattagcaacggtttaatgataacagattaacaggacaccggtttcaccggtcaaaatgtcaaaagtttatataagtttttttttttcaatattttgattgaaatttataaaagaaaaaaaaaatactgtgggtatatatgttttggttagtgaatttatattacattcataattactaaattttgatttttaactttagatataatttaaataggtaatgatattatgataataattttttaagaagcattaatattttttttattttattattttaaaaaaatattatttttttttttttaaaaataaaacataaaagaaatatttataatgaattgacatttaaattgtaatatttttttgaatgagtaaacatttgtacattcattcttggatattatttaggtgaattattgtttatttcttaaaattttgtacatagatttgatgtattttttgtattgtgcagtattaatggtaaaatgatgaaattacgacaaaaatgaaataaattgtacatatatgagcaaagtgttgaaagcaaatgaatcgagaaacaagcgaagctgcaataaatagatcttggcgctacgaggccatgtgttaggctctatactatagcgctgacttggaaaaaagaaaaaaagaagatgatttttgcacgtttgaaaactcgaggaatcacgcatggcgctataacgctgtgtttgagtcgctatagcatcttctgtacaattcgatccctatcctattattaaaacgtcatattttctatctttctagcctataaaaagaacattataacttcagcttgtgaagacgacaagagagaaaatacaattttaaagagaaacaagtttgaaaaatcaaggaagcaatctgaaactacatttaaaagttttcatccattcttcttcttctttcttttttatttctcactattattcatattataaataatattttgaaataataaaccacttatagatggctatgggtttcaatgatgtcattttagttaaaacttattattttttttttaaaaaaaaaatactattgtttccattctaagcctttaaatgttaattttgtctatttaataattatgactaattgtcaaataaaattaccatttaatttattattaattagattctctaaaatctcttaattaataattaaaccctaaatttcttttttcttctcaaatttgcccttgcttagtaaaattcataaataagatagtcttatctagaactctaattgataaaatataaacaattgattgagtctataaggcaataagatctcaggtagtgtgaggatcatgaacctatataatcaaacttccaataaataattctagaatttactgagtaaattctctatcttattaattccttttgattctatcatagattcgattcgaaattatactcttgattacatagaacgctctattcaccgagaatatacacgttataagttatccattatttcaatctaaataatcaatgatccttcatagatcgcctataatgaatattgactaaaattatcgtgttacccttcaatgtatgttattctcaaaacacttagcttcttataaataatatttcagtaaattagtataataattgaaataagagctcttctatttatgtatattagccaagctctaaggagagatcatttcagttctatacaattatagaagttgtaaatttcatatctataattagcgctttcactcaattgcactaccatgttcccaagatgtaagtattgagtcaatcctatagatacgcttgtaacgaaaaaattacagttaagctagaacctaaccatactaggattaagatcattgatctaaaatcaaccaagtgatatttacttagaaaagatattgtagtaagtttacgatatcttttctactgtaaatattggtctaatccgatgtatagccaatacattcgatcttagtttactctactaataccctggaaaaagtattctacttatttaagtgtagtaaactatatcaatgattatcacatcagtataaatcttgtgcgctaataaattataggacttaatgtttgaagcttatgatcatgaatattttttactgtgtagacaacacaataatcatgataattcataagttctgaatttaatagaatttatatatcaaaactaaaaattataatcatgaaaccaagtaattaatacaaagtataccttctatattattctttaatagtcaataagattactttgaaatgtattttatttagagtataaaatcccaataaaaacagacactcagggcctggaatgagaagctcaagcataccttgtttcaaaggagttttcaagcttccaaatctgatacctctctgtttattcatcgttcaggagactcaatggtttatctcttggtttagtttatgttgatgacattctcttaacattaggggtgttcgcggtgcgggtggtgcggttcttgactatttttttaaaccaacccgcacatgcggtttttcaaattagtagactttaagttttttttgaaagaataatagactttaagttgaa

SEQ ID NO: 30071 - DNA, 2022 bp, Cannabis sativa
  modified_base (47)..(54): a, c, t, g, unknown or other
  modified_base (1906)..(1916): a, c, t, g, unknown or other
attttgtcatttaacaaaacacatctgtaacttttgcaaaacacagnnnnnnnnatggtatttacccaaaaaataatatatagagtaattttccaaaacaataatcaaatatataataaactattgaaccttatttaggtatcctaaaatttataattttttaaaaatttagaaataattttagataattataatatacaaatcagactaaaatgctcactttaatgtggagatagataaagcatgtagcaaaggagtcttttaagagcctacaacaaaattatagaaaaatgtatgtaatttatataaatatatagaagaaaaaattgtaatccatcatagactatttgtgcgcatgcctgttttatgcattttccaagtaagagacatgagggatgtttgaaggccactccccatgacttttggctgctcttttattcttttttgagcttattagctataccttttgtcaaaatataggaaaactttcggtttttctcgttgatcgcgcttataactaacctccttttttcttatacaacttataatttgttaaaaaaaaaaaattaaactttttaattactgtgtgtatacttctatgcatataattcgtttgttttgtagctacttaacactttttgatatgttgtcttataattggctagcgatattctctaaaagttattacattaaactacatgagaccccatatttaattggaccaataacaatattaacacatagaagggtgctaggcaccactgatacttttcaatatttctctgctaattaatcattaggtagctaattaattaagagaagtgactaaattatcctagtgatagactagtagttttatgtgcattttaaaaagtattttagagattatgttttagttaattattttagtttgtggagaattacgtttattttattttgtttttggttttaaggtcaactacctaatatgacaccacaaaaaaaatttatttttagtcacaacaaatcttgtgactaaaagtaaaaaaattgtgactaaattataaattaccattactatattgtgactaaaagatccgtggctaaaagtattagtcacaaaaattataatttactgtgattaaatatgttttagtcacaataattattgtgactaaaactaaattagtaacaatttatatctaaatgctatttttgagtcacaagcaactttttattatgactaaaagttacatttagtcacaaaaaaattatgttatgactaaaaagttgtcactaaatatagctattttttatagtataaattaaaatgagaagaaacatgttaaacgagatgatcacgatgaacttattatgaaattttgacataggtgaaaaattctaaatttgggatgctcaacacactcagtttgtacaaataaatgcaaagttgaaacttcaagtttgattaaattttaaaaaaagtcgaaacataaaatattttaattctctttctcagcttcgcaacacatcttaaattagattatttgaagctcctatatatgtgaaagtcatgtgcgttttaatgagaaaggtcaaagtaaaaaaatacagtggacttcacgagtgtggatcttttacacatgagtacgggtctttacgagcagggttattttagttacgatttttagagttaatttggggtttttctaatatatgaaagataagtaattatctgagagaacatctccaatgagagatgtaaaaattgtgctatatttggcacaaaaagtaattttgtgataaatttacatcaaattttagttttgtgcttcaatgcacaattacaaagttttgatgtaaaattaaaaattaattaatgttttattaaaaaaaataaaaactaataactttataatcaattttnnnnnnnnnnnatatgtaagacaataaaaaaataatataaatgtttcataatttaataccataactaaatatactaataaaattatacaaatgacataaatataaatgaaaaagtag

SEQ ID NO: 30072 - DNA, 1000 bp, Cannabis sativa
tctttatcttattttactagctattattgttgaccaatggaaaaagcaaaaaaggaaaaaattgtagttattattcattataagtacgtatcatgaatagtgaataatatatacatttttttttaaagcagtagtgaaataatataattaattaaggggttccgggccactagctggcctctataaattaacgggaaaaaagaggctaaaatccatccatgcatgcaaaaagtataccttaccttaattttatctctctctctgatacaacaaagtgaattatatcaaagtgtaaattatatcaaagtgaatttttctgatataacatcatactattctagtctgagtgtttatgtatgtctttataaaaataccagtagaaacaaaacaacacaaacgtttatgtacagaaataactgttttttagtatgtcataacaagtaggagttgctaaaccatgcagtcgatctgtcaaaacaaagtgtagacttttgggcctgttatgcatggtgtggaagttggaaaagccactatacaaggaatccaactattgttttgtggaagttcacatgctatcctgagtcaataaattatctagtccctgaaaatattgcaaaatagctatacttaaaaagcaatatgtaatctgttctttttatatgtttgtatttatagtttctatgtcataccacataatcattttatagtgtgacaaatggacataaacttttcaagtaaagttcttggttggatttttctgtattggagactcaaatatctattaagtcctattttctcactcttgtatgaacattgcttttagattgtcttaacaaatcatttcctaagataattcaaatctgtgtgcgtttgcattaaacagacattgaagtgcctagtcaatttatagtactatccaagcttatctcatttttttatttttctttccaaaaaaaaaaaaaaaaactaaaaaactcatattctatttgaacgactcaac

SEQ ID NO: 30073 - DNA, 1056 bp, Cannabis sativa
tgtgtatatcattattagtatataaacgagtaatgataaatacctacaattttaatttgtacattcaaagccctgcgaacaaaactcgtaaggagataaccaacaaacggcaaatcacgccgtttatttgtacattcaaagtcatgcaatcgaacaaatctcacaaggagatgaccaacaaacagcaaattacgccgtttatgaaaaaaagcaaaagtacgagaattagaacccaaaaataaaaggataaatcccacaaaaacaacacaaagccaacattaacaaagactaacaactaaggtacgtactaactaaaaactactgttgaaaaactacataaacatgaccaagctactatcgaacttaaatcgctgaaattattcaaaatttaagtacattagatctagcttaaaatacattaaaaattaatctaattaaattcacatgcagtacatttacaacacctctatctttatttttactttttgacaaaaaaaaatatattttggactctttgttttgtaaaaataattaattggactctctattttataaaattataaattaaaccttatattttttaaaatagtactaaataataattcaaactgattttttatcaaaataaaactaaaaataatcaaatataaaagtgttataacaaaattggttacattttctatatctattcgtgttagaaattatttcagatttgttttattaaaaaaaattaaaaacttgaatttataatctaatttgtattatttaaaaaaaaaaaaaatacagagtctaatcaataattttttacaaaatataaagttcaaaataacataaacacaatataaaatagaataaaaaaattattacattatttattagaatatgccaataaaagaaaaagaagggcaaatcaacaatattttttaaaaaaacaataagtaaataaataacattgtgttataaatagtattaattatgtggatgtccaaatcttttatttattaccattaatgtaatcaacattccctttttcttagtttccctttctcttagttt

SEQ ID NO: 30074 - DNA, 4831 bp, Cannabis sativa
atgctcacctgcaaccctagatagccaggcataattttgctgtagatgagcaaactaaaggaaacgccaaagcggaggctttgaggatatggttgatggataactgagatagtcctctccggggggagtatactggccaagtccgggacctaaacttagatcccatgatagactggttctttaacttctttgggttttccttagctctctttgcatcagaaatgatgagccactttgcttccaaattagtccatcttcctataaaaagatttgttgcctacgcctcatctaacccaatctaccaaattcaggatatgattacggcttttaacctcagtgagtccttacacatcttgctacttgtttacttgctatttttattttgctaatggtggcgttcaaaatgaatttttttttgctaaagctggccgcctatccaagactttaatagatcaaggatatgctattacagctcaaggcgacattattgaggtgctctaggaagctcaaggtgatcgacgagcaaatggaggtgcccagtgataaagtcttggcgaataaggcgttaagggaataagactagaaggttgcagatgaggccaagtctactattcgtgaagcttaaaattggcatgacatggacgtgtgtagtgcctagacagagatcgaggagcttaagtccaaactgagtaagcttgaggaactttatcgagttaatctttaatctatagccaaaatgtctgtggagcttaatgaacttcacgaatatgggactcaactaaacaagatgctgagaggtcttccaaaagtccgctttgaccccagtgacatgcgagcactgtgtaaaatactatgaagattgagttttcatgtgctggaggtccaacctgtttgagcctcatctcgacttccttcctaatctaaaagccatcttggcctattttctggagaagaataagaggttagatgccaagctggctgaaaaactgggcccccgtcttcctctgcgagcttagagcagcttccttgtctagccaaaatactatatattttttcttttggagttttcatttgtaattttttaatcttttttaatttggggagacattcttatcggcctttccctaaggtttattttaatatattccttttctgacatttaattatgagagtaatatttttatgcattttcattatacttatgcactatccctaagtgactaaaatggtttaatcttttagagtcactttgcaaagcttgtccttacaatttggaaaaggttactagattacataatatttttttttgttcacttgactcacaaaaggtttttttaatcgaaaaactagagataaaattaaataccaaattcttaattattgatagtacttttggagatgattagcatttcacactcttgggatcacgaacccattcatacgcttgagcttataagtctcgaagcctatttcatctttgatttcataaaattcttcccagttaggcccaatacccccacatcggggtcttgtgaggcgggaaagacctttcttagaaccaggtcacctgttgagaatgtcctatttttaatttttgaattaaagtgttttgccactttcctttggtatgcgaccaaacgtattatgactcctcccagagttcttttacgaaatctagtgattcttgtagcaacgattgattagtggctaggtcataggcggtccttctgtgggagggaattgtactctctaccacgatcattgcctcacatccatataccataaaaaatggagaatgtctaatggtcgtccgggtagtggttcggtatgcctagagtacatgcgacaattcctcaagccaattgttttcacaggccaagagtttcttctttagtgtgaccttcaatatcttattcatagtttctacttgaccatttgcatgtggtcttgcaaccatagaaaagcttttgatggctccatatttttcgtataattctgttaatcattgtaaaactgtttgccattgtctgagactatcttctggggcagtccatatcgacaaacaatgtttttaaccacgaagtctagggtatttttagcattgattgagtttattggctcggcctttgtccacttcgtgaaatagtctataacaactattacatgtttgactctacccattctcgctgggagagacctaataaggtcaatgccccatactacaaatgaccatggactcgttattgatgtgattccatttggggggccctcgagatgtttgcaaaactttggcaagggtcacatttctagacatagtctatgcattatttcttcacagttggccagaagtacccttgtctcaaaatcattttagacaaactatgtggtccccaaaaaatccttcatgaatctccttcattgtttgtttggcttcaaggtgagaaacaaacctgagataaggcatacttaagtctctctagtagagtataccataaattgtgagatactggggagcctactactgaacttttatagaggctgccttgttctgtggcaactctcccttggtcaggtaattaataattgggtccatctagctgggctcttgaacagtgaatctgacctctatcttggttaggatacttggctccgggaggtactcgatggggactagccttagtctcattacttccttatttgaagctaactttgctaggcaatccgcatgtgcatttttctcccttagcatctgctcaattttttacttcttgaactcttggagcgattctcttgcggcagagatgtaagaggtcatattttctccctaagtttgatattcccccagaacctgattaacaaccaattgggataggctcccacaacttttgataatctcaattgtgccagaaaggcctcatactctacctcattgttagaggttgggaatttgaaatgcagggtagtctgaacccttttggagatatcatcactagttgtgctcctaatccactttcgtttgtggccccatccacatacactttccaggtgggtgcaattacttctggcatattagtatttgcctcagtttcattgcactctacaatgaagtctgctaaggcctatcctttaatcaaaatgtgcgggaggtactgaatgttaaattaactaagttcaattgcccatttaagcaatctccctaaggactctgacttatacaaaacttatcaaagtggatggttggtaaagaccttgattaaaggtgattggaagtagagtcatagcttccaagatgctactagtagacagaaggctagcttctctatcaagggtaccaaacttctgctcctatcatccgtttgttgacgtaataaacaggatgctagttcttaacttcctcacaaactaaggttgcactggcaacattctcagagatagctaaataaaggtacaattttccccttgcattggtttggataaaattggtggtttggtcatatgttcctttaatctcttaaatgcctccttgcattccttggtcaattttaacttttggcttttctttaatatattaatgaacgggatacatttgtcaatggaattggagatgaaatggctcaaggcatctatctttcccattaatctttgcacatccttatatttcttgggggagggcatatctagcaaggcttgtattttcttgggtttagcttttatccctcgtcggttgattatgaatcctagaaattttcttagctttactctaaaagtgtacttcttgggattgagcttcatcccgtactttcttactactttaaaacattctttaaggtcgtcagaatggttcttactggttttggacttgacttgcatgtcatctacataaacctccatgtttctttccaactaatttttgaacatccaattaaccagtcgttggtaagttgctccttcagtctttagcccaaaaggcatgaccaagtaacaatatacccatttatctgccctgaagctagtacactcgtggtcagccacgtgcatcttaatctggttgtaaccaaagtaagcgtccatgaaagataacaactcatattggacgtggcatccaccatttggtcaattcagggtaatgggaaataatctttgggacatgccttgttcaagtccatgaattcaatgtatactcgccatgtcctattgggttttggtgctagaactgggttagtcaaccactctgggtagtaaacatctcggatgaagatatttgacagcatcttgtccacttcttgttttagaacctctgatttgaccagatcaaggggacatcttttttgctgcacaacaggcatgtttttgttaacatttaaaatgtgaaagatgacgtttggactaatgttagtcatgtccccatgactccatgcaaaggtatctgccgattctttgatggtgtccactatttcaatccttttgctgggatcaatgcccttcccaacacaaattacccttgtcggatcctgttcataaatttgaattcttttacttcctccatgggttcgagtgcaatctcagctcctatccagggttctaactcatcttccacccttagtgggtttctttctttgttttgttgaaacatcaagacagtttgttggacggctacattctaacatttcctagcctctcattgattatcccagacagtccctactcctgtcgcatgggtagggaacttgagacataaatgtcaaattgaagttatcgtttcaaaatctaccaaggccagacgtcccattatagcattgtaagttgatggacaatccaccacaacgaatgt

SEQ ID NO: 30075 - DNA, 3565 bp, Cannabis sativa
  modified_base (59)..(69): a, c, t, g, unknown or other
  modified_base (274)..(279): a, c, t, g, unknown or other
  modified_base (3269)..(3269): a, c, t, g, unknown or other
tttaacatagtattatataaaaatatgatatataatcaattcaatataatacaatacannnnnnnnnnntacgacgttccaaacgaacccttattaatggtctagtttgtttctaatattcacaaaccattatgctggtttagtccaaaaattataaaaattcggaccaaacaaatccgtaaacactcctaattttaagacaatttctaataggaacagatacagaaaatgtaaccaattttatcataacatctttagatcaaattattattannnnnnattttgataaaaaattaattcaaaatcttatttgttcaattttaaacaatataaaatctattttattatttaacaaaatgaaaagtccaattgataatttttacaaaatacagagtctaaattaattaccttttaaataaataccattttaatgtacttttttcgaatagatatttagaaaatactggaatttgagttaacttaatactgtcacacgaaatttttttcaaagatactgtgtttttataaaacaccagtagaatacaaaacagaacaactcaaaacaacaatagaacaactaaaaaacaccagtaaaaatttaacacagtatgcagtataaaacttataaaaaaaatacaataaaaaagtaaaaaaaaataccgctgacagtattttttgtaaaaaaaaataaaaaaaattagtatgccatataaatttctcattattaaacattaagggcaaggtattcctactagcccgacccgacccgaccaccggacccactcagtatttatttactatagatggaaagaaccactttttcatatttttcttaactctttctataaagcacatgcacccgatgtcgttgtctgatgtgacatctaaactttcaaaacccagtcaacttttttgaactaataaaaaatctcaataaataaaataacaccatcgccccattcaaatagaaaaacttaaatatttaatttaatttcttatttattaaaaataataataaaaaaaaaagtaagtttgagatgtatgcttgtgtacatctgaagaggttttggtatgaaataacttgaaaaaaacctcttacagaatgaaaagctaataaaaagcaaaatatacttttcattttatgagtttgatctgtgcaaactatggccgctctactatcaaatgctgcagcatgcggatggaagctttgcacattcatttttatataaacaataaatacatttacatatataaaaatatatatatataaatgagatctgttttcacctcaaatatcaatctttatcatttgaaaaaaaaaaaaaacaaagatggggtcccaagtatgtgtaaatctataaaaaccaaggtttagttggttgaaatggaagaaagatatgggaagaaaaagaccaagatgagagaagctgaaggaggctgtgtggagaaagtagtgtgtattatgttgtcttatataaggaaccaaaacctcatctagggcaaaactttcaaggctttggagttatggttcgggcagcgggcagggtagacactagaagaagctatggtggttgggcaatgagattatcagtaagctgcccgtaacagtaaaggagaatattaaagtttttcttattaattattccaataataaatatgcaagttgacagtattgttgcaattgtaataatgaaggtgacgtgtaatattaggtgttgtacatgcacattggcccttggcaaaacaaactgggcatttctttactgtttgtcagaaattgaaaatgggttccaatttccaaacgcactaataccttagacaatgtttgagaagtaaaaatgataatggtggatggaatgaaggtttgtgggggttcgagtgttagattatgtattattttaatatataaacgcttaaataaacaaaaaagatggaatgaaagtttttgaggctttttgcttatatttttaggttttatttttgaaaattgtatttttaaaagtgagaatagaaaattattttttattattttaaaaatttaatagtgtttgactaaattttttaagattattatttttagattttttttttacaaaaaaaaaaaaattaatattctataccataccatgacatgaactcatctaaccttgtaccgaaccccagatccagactcgaactcgaatcttgacccgaacctaaatctaaatgtggacccagacccaaattgaaacccagactcagctccggaccccgaacccagtccaatccctaaacttggacttgatcccagaccccaaacccaggtccggtcccagacccagccctggactcgaacctaggctggggtctgggtctagttttagggtacgggtcctagtccaggttaggttggagtccggggttggggtccggtgtttggggtccaagtcgaggtctgaggttgggatctggtgtgcggggttcgagtcgacgtccaagtccgagttcggggtccacgttcgggtccgagtctgggtcgaggtggggttcaggtccgagtctagggttcgggatccagggtccaagtctaggttcagggtctgggtcgggtcgtggtcggggtcaaggtctggggtttgggttcgggatccatggtccaggtccagtgtctcagtatgtgagcaaaattgtaaattatattatgttagacaaaaaaaattatttttaaaaattgaaaactacattttgatgttttttgttttctagttttttaaaactcaatttttaaaaaaattgaccaaacgacccctattagtttttaaaagttatttttctattttttaaaattaaaaataatttttaagttatgaagccaaataatacttttatttttgtttttgtttttttataaaaagaatgaaagtttatttatttattctgaaggaaatgtattatcatttaatggtttaaaagataacaataataattatacatttttatcttaaaaattaattggtgatgagattagagataaaaaaaatacctagttttttgggctgggtcaagggctcacctcgtcaaggtgcatttgggtcatttgccctgacactacaaaaattagctacttttagtgacaattttttaatcacaacatatattttttgtgactaaatgtgatttttagtcacaacaaaaagttacttgagactaaaacatatcatttagctacaagttgtcactagtttaattttagtcacaataagtattatgactaaaaatatatttagtcncaacaaattgtaatttttatgacttacttttttagccacgaactttttagtcacaacttaggaatgataatttataattagtcacaacttttttactttagtcaagttttgttgtaactaaaagtaaaaaattttgagtgtgacccgttacattttatccgagttggattttgacctgccccatttagcttcttttttttaaaaaaaaaaaaaatcagtctattgatatacttagtaattttcgtgtttctctttgataaaagccatatctcaaagataattgctttcaatctcat

SEQ ID NO: 30076 - DNA, 1236 bp, Cannabis sativa
tattaaataaaaataaaaagtcatgaatttctcataaaccaagaatttcagttatatatgcacactttatatagaatagatatacaatacacaataaattatagaaatgtaatgtgttgaagttgatgcagagagagagagggattagtaataatgtatacttactaacttggtgttctcaagagtttgttcaagaatagtattgaaaatatggtgagcagtaggaggaatttctgtctgaacctcggcaatatgactatcaaaagccatggttgaaaattttttcattttttttcttctctgaaacaaaaactcaaacagcagagtcagagggtatcatcagctttagttgtagactgtgtttagtagaatagaaaagtcaaaggaaagaaaatattaagagagaaaaaaaatagtgtagggcctacatcaaaatatcctcccagaagtcgagagaaaatagagatatttttttttaaaaaaaaaaaaaatagataaattatcaaattatcctagtcagttttaattaaaattataaataataaattggatatatttctctgaacaatttttattttcaaattacgccgtctgattttttttttcttttgaactattcttgttttctcctcttattttaagttatacaaattgattatgtggcattttgaatgtcatatgtataatttaattaaataattttgttaattgattaattatttttaattattttttctaagaaaaaaattagggtgtactcataggcgcgtatttggagtggaaatgtagctcctatttttctatatttttaacgtttttttaaaagatatttttttttttttaaaaaaaagacctatacttttttaaactataaaaaagaaagtttgccgttaaaaatgaaaatggtgtaattataagatttgaatatctataaaaagggaaagtttggggtgtgaatactaaacttgatcatagacacaagaaacaacaaagagttgttgtctgcgttttcaccttaattatttccatacatatttccccttcattatttagtgtttttaaagcatggaaaactcttcaattatggctttttctcatagccatattgctcagattgagacagtttcctcttactgctcactagaggtgttcgcggtgcgggtggtgcggtttttaaccattttttcaaaccaacccgcaaatgcggtttttctaattttccaaaccgcacccgca

SEQ ID NO: 30077 - DNA, 2011 bp, Cannabis sativa
tgatctaagcttaacattgaaggctcaccaaccctattcagtggattgccattggcatcctaacgacccaaagggcagttggagaggacaatacaagtcttgtacctccttctcatgactggtgcagtctcctcaagattagactcagcatcgggactctcagcctcgtggtcaacctttggatcaacatcaacatgaggctgagtagcctcctctataatcttgactcgacctcttgtagccaccttggctacatgagggtcacatggaggcactctacgacaagtctgcttcgtccgggccatagttacaaaatgactaagggacctatgtggctatcacctccattatccaacaccctaaactacctgcatagaagagataaggggaggtgagcaacctaacaaagctagaaacaaattctagtcagcattacctaagggtacgttccaggtaaataacaatgtacaaggtcaacaatcgatcaagtaccatcttaagtacataaacttagacatatgataagtcctaagttatacaattgactataatatactcactaccaagccttatacagagtttccaaggggaaccagacataagactatagttctatatgcctccaaggccgtcacgagaccctagttaaggtcaatagagggtaaaaaactagttgcccgcttggagccttggccttggccggctagggtgctaagccttagaggctggttagaccccttgacccagtctagggtcagacaggaattcatttttaggcataggccggccagcctatggggtgcacacccttggccgaccagaccccctaatagccacccttggccggccaggtcttaaacaagacctccttggtgggccaaggcttgtatgaatccgaacatgtgtttattcaagaactcaaacacgttcttcatgttcttcgtgactaaagagccaagaatctgaatgaaggtcagattcagatctttttcatctagaaatcacacattagttatcctaaggctatcatgcaaatcaaaataccgaaaggacaaaaatctaacataggaattaaaggatattcaaagcaaagaataatattcatgcattcatggaaaaattaaccaaatcaagtgaaatacaaggaatagaaagcttacctactacaagaaacggttgaagaagaatgcaagaagcttggattgttgaaatgatgcaaaaatcccaagagaatagtgcttgatggtttgggccctctagagagatggaggagcttcttcaaatgtaaacttctagtgaaagaaatgaaatgtaaaaactgaaaagggttttccccccagaagcacttatatagtacaagtgagaccccttcttcacatacctcacctacacaataaaaggacaattaaagcagttagtttactacaaaaaacaagatcagacagtcaaggcaaagtatttcaaaaggctaaaaatgcaacaaattttattcagtaaaggttacatcagttccaaccacaccaatctaactgataagtccctattcgtacagacgttcgcatagggacttaaagagaaaatgttatcccgatttttgctcacctgacgtggcattgcttacatgtaaaaaatcagtgccacgtgtacaccaacaagaaggccaagttagtatctcaccaaataggaaccccagtacttaaatggggcatcaagtgacggaccaacttcctcacagaagttggcttaccacccctggccagcctctggacaacaccaaggccagccagtctggtccctgtaggtgtctggctggctaggaaagaacttggtaggattttttgtacaattctacatgtggatttctgatcgagttgcaaattcggccctaaaggcccaataaaatagctagaaaatatctatgtttaagggcattttagtcttttctaattaactaattcgatatacatatatgtaagggtttcagttataaattagggtttaggctttccta

SEQ ID NO: 30078 - DNA, 3647 bp, Cannabis sativa
taactgatactacacgtttctgtcctgactcagtgacttagaatctagaccttacatatatccaatttaaaacattattactaaccagatttgacgaaaattacagctttactacattgggtacttatgccgcaaatatttcttttcttagttttagttattgagaagttggcaaagagaggagagaaaatcaccttaatttcaagtgcttctgggtaaatatcagcattctttcccctaagatactgaagactattttcaagatctttatttcgaccaacttttgcctatacaaaacaaatcacaaaaagtcatgaacaacaaattttgatgaatcattttctctcaactatttgtatttgtatttctatatagtctttaccagccatctaggagactctggaatgaagtacaatcctaaaatgtgcaaaagagatggaatagaacctgataataacaagatgagattattgtttaaagttacattattagtagaattaatcaaattcaattttctttttcataccaattatagctaaggtgttccaaccaacagtgtttccaagaaagtacatcaacgaaaaaccgcaaccaagtatgagctgttgaaaatggacagaagaacacaagattttgattgatcaaatgaagaaaagtagtgactgttttcttaagaaggttgtaacaacaacaaacctgattagctgaagtaaaccctcctctaagatcctttggtgttatttcagcaatgtatacaggaatctaagtagtaacaaagttaatatttttgtagacacttgtaatgtatttctaattcttattgcagttagtgttacttaccacataagaaagaagtccaattccaattcccaatgacattcttccaagatcaagccaaaaggcactctatcacaacattgataagatttaacttgtttagaaaagtagtaacaaaataatacaaagtggaaataacaaagaaaataaaaaccttggaatatgctatggcaagccaccctgcagtactaaaaagttcagagaccaacattgcctgcctcacaaaaatcaccaaaacaacatatcaaataattgaagatgttattaagaagaaggaacaaaaagggttgtggacaatgttttataataacacttacacccttacggcctatgagatcagtcattctcccatttaccattccaccaagcattcctccaacagtcactattgatccgaaaaccgagtactgcacaagtgagtgagtcgaatttaggcatataaaaggttgtgtaagaaagaagagaagaaggatataacaagtaataatactaatagtacatacatctgctacagaaagcttaaaatctttcatgattccagattgagctggtgatgaatatccagtctgcacggcaagacaatcataagtaagccaattaagtaatagtagagtgttactgtcaacctcttatatttcaacctctttctgaacctccctgtccgaaaacacatgttagaatatgttttttctaattttttttttctcatggtgatgtttgttgtagttacaatattagacttgtaaatttttaaaaaatccgaatagtttacagtatcaacaataaagtttatgaattttagtttaccggtgtgttgatcaaaaaacttcaaacaaattttcatcattgtaaactactcgaaacttttcaaaaatttacaagaataatgttgtaattatatcaaacatagccataaaaaaaataatacttcggcatacatatgtgtttaggagtgatgttgagaaagactttctaatatgaggttgtaactagcacttctcagtactactctcaacctcctatttcgatatctttctcaaacatctaagtaatattaattaagaaacatacatagatagattcaaactaagaaaaggaaaaaacatcttcacaaagtgaaaatatggttgttctgttcttaattagtgctattgagtattgagaaatagttgtgttgtgcttactatacagcccatgcagaaagagccacatagagcaaccaaagtgctgaaaacaactccaaaagttggtgatgaggagccatttcttgaagtaatttcattctcatttcttggcaatggctcatcatcataattggacctttttagtaatccttcttccatggtttatttctctttctttttttctccttatgcagaagaaatatggattcttgttgtactatgaatatgtaaatggtattaatagaaatgagagtttatcaaatatgtaagcacacaagattggccacatgttttgccattgaaagtctatggtattatatatagatatgatttgaaacgttggtaatagtatctggtgaagatatgggatctgaatgtataatacaaaaatgtatacaatctaaatattctataaaaaaaaaaaatatgaaaaatatatattgttgtgatatattttgtattgccatgtttgacactatgagtaaaaaaaatctaagacatgctctcctgaccaagttgtacttccctcttataaatggtaaaaatccatattagatattgatctgaagctatatgatatttatgataagtatgtatctccaatatatatggcttttatttcaattttatttatgtttatatttgttactattttaggtttatttgaaggcctgcatgtagacaaataccaaggattttttaaaaaaataaataaataaatcaaggatttcaattcatttaatatattttgagaaaatgctagagtaatcttgtcataaaaaaaaaataaaaaaaaaaaagttttgggtatatacatttaaatgaaaaggcctaaagcgttatcaaagatgaagagtatattgtaattttcaacaaaataaataaataaatcaataaaataaaataaaattgaagaggtgtgtaatagacattcacattctgaatctgtaccagtgcattaattgaaagaggtgttaataggattcctaagttctctttatttttatttggtataaattcaattgtgatctaaagcattttccaagaaatatattgttctataattgttcaagtacttaataattccacatttaggatgttttcaaaagtgaatatgaaagtagctaaattagaagtaatactctaatgtaaaatttcaatattttattttaagggacaagtcatattgtctatttattacttctttgtttatatattccttccaaaaaattaataatgattaatgtgtttcttaaaagggttggccaatatcctaacaaatttttacaaattattttttcatattttatggtgccaaaaattatatttaaacaatgtgttttacatgtataacaaatggaggtgtaactaattgtttgaaactttttttttaaaaaaaaattagtaaaatatcagaggtaactacaatatacataaaaaaaaaattacaaattctctaccaaccaaaaatacaaacgtttgcagtaggactgatcctacctgaaaaatgctatatttattacttatatatatatatataaaatgcagtaactacttaatacctcttataatatcattttgcagtctcatcattcatcttgaaatctccaacaactttgtcatcca

SEQ ID NO: 30079 - DNA, 2684 bp, Cannabis sativa
  modified_base (2112)..(2134): a, c, t, g, unknown or other
  modified_base (2188)..(2191): a, c, t, g, unknown or other
  modified_base (2514)..(2520): a, c, t, g, unknown or other
ttaattaatgattataaatatcaaccattagatatttgatccaatggtcaagaataaaatactcatacatgggtaatacccattaagagcatactcatatatatatatagttggtatgcttaataggggtgaacatcgggcagggtgaccggatttcgaattgaaaaaattgtactcagacccgatccgtgaaatggttcgggtttgcaggtctacgggttcgggttgacccgatcaactcgttaatttattattttttaaaaaaaaatcaaattttatatagttttttttatatattaaattaagcatataagtataaacttataacgcttcgtaagattaaaataaaataaaaaaggcattaatttcaaatctaaaatgcaaaagtcaaatttcaaactatatataatatattacatattattatttttaatatattatctatgtaataaaaataaaatgattagattttagggttttttatttttaatatattatataagtaataaaaataataaaaaaaaatgatcgggttggcgagcgggttcgggttcaacttgaaacttggcgaccataaaaaatcgacccgcgaacccattcatggtgtaccagattgaacccgacccgcccgagcagattgagttttttaaaaagtttgggttgagcggctcgggtccgggtcaaacctggtcaaaatgttcagtcctagtgcttagggctaagcatgaaatctaaacaatcgaaaaaaattgttcaaactgacttgttgaacaccgctagaactgaaactggcaaaatcaaaaactgaaaaaaccactaacggttaaaattgccatcgaacgtcggttttttttttttttgtaataaaccgaccgaaaaaagaacaaccgaccattatacataaatattattttattaatttttttctatatgtattatagttactgataatatataataagaatgtattattttattaatattaaaattaaaagaataagacaattagttttgaacaattaatttgtatagttgtacaatgtagaataatgtgcttatagaataaattgaattatattttaaaaaaaaaagttcggtttgagcggtttaaaccgaccaaatcgaggttcaaaacggtcggttttaaaacaggttttggattggtcggtcgattttcagattgcaccaatccagatcgaaaatcgaattctagatttttatacagaaaaaacggaccaaaccgagccctaagtacgcgatcttacaaattatctaaaattgaaggagtgggaagaatcagcactagacaattcttttttattatttattttattttatttgcattaaaaaaattgtttatgtgattgactttatgcatgagaaatttgactaaatatgcatattttaagggaaaattggtttcctaaaccaatattgggcaatattaatatagaaaagagatgagttaaggtttgacgggtattatggggatagcatataatgttcggacaactgtaaggacttactagccttgattgctataaaggtcgatgctaccacatcgagcccgttgctagagaagaaaatcaatatattgcttatgtagcttatcccttagacctttttgaagaaggttctgttactaacatgtttactttcattgtgggcaatatatttaaggctatgagcgctctacgtctggaagatttttctctcttctctcttcattcattttcactaatccacacacaaacctcattcccttcactcatttcctaatcaaataacagtaatatttcatacaaactacactagaacctcatataataggtgctttggtggttggtttattgtggacggagcatcaaactcggattcaatgggtaataatttttctttattaaatcttgttgttagttattatatttagtttataatgttcttttgatgctcgatttgctttttgtgtggaaataattgttcttaaagttttctgcaatttttagaatttagtttttttcgtcttgtctgagggtgtccgataggggtccaatggtgacccgatggtttgttcaaatttgaggttagggatgttgagttttgtgccctaannnnnnnnnnnnnnnnnnnnnnnagatttactaattaataaaaaatcgaaaattattttatattgcatggttcacannnnttatttcatgattatatatatttaatgtataaattctagtaagtccagaacatataattattcatgattatagtgttctcaacacattagaatataataataattatatgttcaaaagttaaagtctcgtaatttatcagtacactagactgagactaacatgataatcaacgataaggtatacttacaccttggataagtgttatgacctttccagggtattggtaaagtatgccagtatcgaatgtatggagtatacgtcggattggaccggtattaaacttggataagatattataaacttactgttatatctttctaannnnnnntcactggttgatcttaggtctatagatcttaattagggctgcgcatgggttgggttggccaggttggaagtattttaacgagccaacccaattacgtcggcctgaaaatttctaacccattcaaaacttcttttttgtataacccaacccaacaaactatacat

SEQ ID NO: 30080 - DNA, 1849 bp, Cannabis sativa
ttaacagccaaaaaagttcaaggaacatgatttggtatatgtcaaagttcgggaaaaaaattgttaattagcctatatatattatatgtttacagagaaaagactcttattattttcattagtatcagccgaaaatatgtggctgttgaaaataatagccgtagggtttatttacaaagcaaagtgtatatatatacacaacaaaagcaagtttcagtgggccggtattgagctaagagaaaaggctttccatttctaatctatgtttgtgattagatgtgttgaaaatattcataaagtatgagcaacatgttggatgtgactttgattgaatttttatgttttttattttttgaactattcagtaaaataagagatcatgaagaaaatgtgaaaagtaatttatatttttgtatacttattaaaaatttaagagggtgtgaaggatttttttaaaaaaaaatatatgaggggtttaattaaaaaatgggtgagcaggggagaagaaattggcgtgccattagtcacactcttaagaaaacattatttaaataaagtcattcttgttttgttgagggacgaaaacacatccaaaaccaaaagcattaaaatgatgttggagtgcatattaattaaaaacaaaatagagttattattagaagaaaaaaaataaatgttagaaaagaaatagaaaattgatcaaatcctattcctattgctatgatgtttttaggttctgttttgtactgttttagggttattataataatggtcacatattgacaaaatgatttgtttttcaggaactttggaaacataaatgggaaaaatttgatgttgattggagccaccacaaaaagttattagtgttttttttattcttatatgttaatttgtttattaatgttaatttgtttattatatgttaattgtaaataaatggaatttgtatatttattaatcttttgtataaaaaattaatttttttagtttaattttttaaaaaaaaaaacatatttaatagttttaaaaaaatagattttacgtatattttttataagtgttactaattgtttaattttttttagttatatgtaagttttgtgtatgtagaaataatgtgaatttgtgatgtatttgaagattgttgaagtgtttaggaaaaatttaaaaaaaatttggatagattaaaatatatttgttatgccgccgaaatgttagtagaattttgagataataaaaatttataataattttataatctataataagtttttaaatttataagaaagtattgaaaaataaaatcataaaataaattcttattgaaataattgattatttaaaatattgtatgaaattaaatttaaatttaaataatttaatttttaaataactaaaatctaaataattaataaaaatagtgtaattttatactttttttttataaatattaaataattacattttccatttaatattttaaaaaaaaaaattaatatttaaatattattataaagttattaaaactaagtatcttaattaaaaagaaattttatttataattaaatttttattttaataaatatttttaaatttatttaatataattaagttttattacaaatcttttaaaatttaatgcatttaattttaaaattaagtatactaaaaatagtttaattttgtttttttataacatattaaatatttagatttttaatttaatagttttttgtatatttttttttatatattttagtattattaaaaacatattaaattcaatgcatttgattttaaaactaagtattttaactagaaaaagtttaattttttttttgtaaat

SEQ ID NO: 30081 - DNA, 1604 bp, Cannabis sativa
  modified_base (26)..(30): a, c, t, g, unknown or other
cgaaactcttgctacagtggactaannnnnccgtgatctgactgaaccactatagtcctttgtcttcttgctatttcccgttttctgttaagcatttacgtttccagctcgatactcaccattttaggctgaatactcgcaattgttcttcaaacaattccttcttattattaatattattatatacttttggtgttgcgagttttgctcgacaacatcggttaatggcataaagattttagagaatccttcgacgaaacgttgataataccttgctaaaccgaaaaaacttcatactttcgtcacagattttagccttggccaattcgtcactgattcaatctttcccgggtcaaccataattccatcttttctgacaatatgccctagaaaagatatctctgacaacaagaattcatattttttgaatttttgatataacttatactactacaatttaaccttttagtgacactatatagtgacgcgcacaaaatctcacttttgtgcgcgtcactaaatagttaagaataatttttagtgatgcgcataagtagactctaaatttttgctgttagtctctcatattgcgggtcactaaaaatatgaagtgtgaccaaaaagtattacccataattttttaatttattcgaaaaactgacttatagagtcatatcaagagtgactaggaaaatgtatctccaaaaaaattaaaattgaaaaagcactgtaagtgttggaaattgcttctctatctttctagatagatctttttaatattttattcttcttatatatttttattgaaaaattatttggggtaataatatcaaaaccctaataattgtttccctctctctcctttctcaatagcgcctctctcaaattttttatttttcttttatctcatctcttctctctatcacatctctctccaaaactaaccatctccaaccctccatggaagatgacaaccactaaaggcccaggcgagctccaccaatggatgactgacacgtctaaattttgagccccaaggcgactccctctactctaccactataagaccaaaaatgattgacttctatgccacccaaacgcctacgaagttcacccaaattactgtcttaatcggtatatttttttccatctgattatttgtctttccctctctctaaatgtgtctcagatctatccagctggacgacatttgaagatcattgtgggtctcaccttcaatgtcttttgtggttttgtgtacacgattgacgttcgtgtcctaagggcttgggttcgacgggcttggtgtttgacggcttggtgttcgacgtttggttgacagtggctttgaatcttttttttttgttgttgtttaggtttattttgttataagtttgcattgtgatactttgaatataatttaggtttatttcattctaaataaatactgtatcaataaactaatctgggtttcttttatttgtgtctttgtaattaataaaaaatgatatgagtttgtattaaggatcatataatttgtaattttaatttaaaattgtgtataaattgtataacattttgttaataatcttaataaatataaa

SEQ ID NO: 30082 - DNA, 2255 bp, Cannabis sativa
gagtggcaaacctataaatgccatttttttctaactttggtatgaaatcccatatttcatgtaattttcacttaaaaaaaatatattaggtctttttttcttttggagccctgtgtaatagcccaacttgcacccataagagccgcccatgaataaagttttacattgataattactagctagctaatatcctatttttaagtatataattctattgttgtgttgtatttcttgtcaaactttttgttaaaatagattttggatataacaagtaccaattcaatgtgctggaggtaaacgaaacaagctatgaaaaatgcattgaaaaagattttataaagaacataacaaagggaggacgagatgtgtttcagctgactgagcctaaaacctactactttctctccggtggaggctactgcttcggtggaatgaaagtcgccattcatgtcgtccatggtggcccccctcctactcccgccctcacccccgctactaatcgctcctcaatggcggcggttccttccattatcggccatgtcatcactcctcttctgctaattcttattctcactacacctttcctctatgtggactttcttcattatatattttagttaattgatattttgcttcttcttaatatttgtgatttgatgtaatttcatctttattattttagagagagatatggcttttgtaattatattgaaaccttatgttaacctttttaattgtatggactccattgattagataaagttgatgaatttaaaaagaagatactgtttttatttatcttatataatttcttttggttaatggtacaattgttttttatgaacaaaaaatgtagatttatcaatttactagtatatatggtcaataatgacgtgtgtgaagcatcgtactactttgtttttctgggattttaatgagatcaattttcctaaaaaagaaaatctcacgtgctcatttattaaaaacagaataattaacagtttttttagtataacaggattcattaccaagaagaaaagaaagttttttttttatcactaactccgcgatcaatggagtacttagctaaataacaagcaacataatttgcctttcgaaaatctaaacgaaaactcgagagcaatatttttttatatcccagatgacaccctacatccaaactagaaagaagagagtcaatgccacaattatgttcaaccataaacttgttacattgaagctgagagctaagctgttatcctccttaatttattaccataatgtccgcagtaataggatcaaaaggccttagcaaaattttagttttggcacccaaacacacttcattttcatccttttacactccaacaattaccatcaacacctcgaccgacatcaacattaattttttagatacactcaaatagaggacgccacttggctgcttcccttcttcttttatctgtctttgtagttaattggcaagcctgaaattattgttgtagtggagcattcgattctcccctactttccaattgttcctcaaataccaacgctgccaggatattgtcacaaagagctcgaattcttcctttacaagatcagaaaaagtagaggatcgacttccatacattctttaatgagcctctagaatctaagagattttcaatatttagaattagcatgacatcttcaaattgcatgaacccagtcctctgggatggttagttggaggccaattgtggcatagtttccataaaaactctcaaattccaaatagacatccacaacacaaggactttgttttcttagtatctgaagtctcagttgaaatattctgtcccatggtaactttgtaaccacttcttgctctatatttcccattctttgtgtagtgccaaatcagttttatcttttacagaactatcactactcgacaaacccaatatttatgaaatataaataaattaaaattttaaacttatctaatatttacttgttaatttgttatacctatatttcaagctactagattgatgttacgtgaaatgcacatataattagttttagttttttttttttaattcagtggtgttaaatgcaatacatgtatgtttaattatttttaattaggtaatatattttttattttaatttttgaagtagcatttaagattttgatctttaagaattttttttgggaaatttgaaattatatgcatattagggattaaaattggtatcctaatctaaaa

SEQ ID NO: 30083 - DNA, 3576 bp, Cannabis sativa
tattaattattagaaaatagaattctaacaaacatattatattaattttttattttaaaagaaaatataataataaatcatcatttattaaaaaatatttaatggtgtcttttaattttttataacttaaatcatcatcatcatcatgattattattattattattagtaatagtagtagtaaagcatctaacggttatacataacaaaaaataaatatatttgtttattaaaaaaataataactgtattatttaaaaataaatttatagttaataattaggctttctattttttaattgtcttcactccttacatgatttttatacttatatataaatgtttcacactccgaaacttttattcattctaattgaaatgtagtttctgtatgtaggcctaggaatagttataagtatagatttattaaatgtaaattcaagaacttcaagagaaaccaaacacaaggttcttttgtaaaataaaacttaaagttagtatagtatatatacatatatacatatttgttagtcttgctatttttgaattgtctttacttttatattatttttatactatatatatttaagttctactcataaagataaatatattttaataaaaattgtaattcttgcatgtatgtatgagagtgactatgggtataaatattggttaaattttaattcaagacatctaagagaaaagtaaactcaataatttatgtatatatatatataaatatatagatttttttttggaagtggtttttttatatttaaagtgtatctatatttttgtactatctatgtaatgatatgcatgtactcaagttattttatgttttaaaaaattcatatctatgtagttatgatgttatgtaaattggggcgatatctatctaataagatagtgattttttttttatatatattttgtggtatttttagttataaaatgcacaaataaattagtaataaatgtataaaatatagtagaattttaaaaaatatatacataaggtctttttaaaaaaaagtttttctttaaacaactaattcttttttacaattttaatgcacaaaatagaaatataattttctctcattttttttgaataatgattaaatttcattaaactaaatcatccaaaaccaaggatgaaaatacaaaaggtaaggactccctactaaagatacggtcagcctcagaaagagaagatcgcgccaaggcatgcgcaaccctattagcagaccgcttagaaaaattaaaagaaacaacatcaaaatcagcaactagagtcatacaatcataaagaatatggccataaggagaagccatacttttgaacttttgcaaatcattaatgacccttaaacaatccgactcaactacaacatgtgaccatccattcgctttactccaagaaagagcttccttgatacgaatggcttcaacaataagaggttgcaaagagccttctctagataaaattctggcctccaagaccattcccgcaacaaaccttgcaatcaaacccagtccatacctcccttggatagagaaaagtgcaccatcgacattaactttgacaaaagggaaatcaggtgttgtttattgctctacgggtagtgcagtcggccagtttagacttgcatccgtgacattatgtttttgagcattaaaccattcaacataatttaattttgccattgtcactacctcactcgcatcagggtgtttggagttccaaaccaaatcattacaatgagtccaaactgaccaataaatcataccggcctcaagagcctcagccgtgttccatgatgtcaacccagcttcaaatcaactcgagaacaacatcgcatcaggcgccacaacaggaattggaaccttgctccaacaactttgagcaaaagagcaccgcaccagaacatgcagagtcgtctcaggagcagcaagacaaaatgcacatgttgcagcaattggaatatgttttgtggaaagatgaaaccgagttgggagactgttggtagaagctctccacagaaaattgagaacctttggagggagctgtaactaccataagagctgccagaaactagagttatctggactatctctgctggttttcattgattgaagcagggaatacgcactcttaacagtgaaaacacctgaagtatcatgtaaccagtaccacaaatcagtactcacatgactactgagtggaattttccacaccaaagcttgatctctagcattgagcacatcagctataacttccatatcccattcaaccaggtcaactttcgttaaagagtcgacagccttccccacgagtcctggatggacagattcaatgaaagggttcatctcatcaggaagccaaggctcagacaaaatattgacggtagaaccatcacccacaaatctttgaaccctagcctgaactaactccttagcctcaaacacacttctccaaatataacttgggttacttcccaacatcgatgtaagaaaagaccctgaagaaaagtatcgagctttgaaaatttgccccatcaagctatcaccacaagtcaaaagcctccatccttgattagctagctagtagagctaaatttaagtcccttaaatctcgaaatcccataccaccattgctcttgtgtttcgtgagcttgtcccagcttagctagtgtatgcctttattcatgttcgacctcaaccaaaacttggtaatggttctctcaatgtcttgacaaattcctacaggaataagaaacacattcattgtataggcgagaagtgattgaacaactgatttaataagaacttcctttcctacacgagataggaatttattgtcccaagactggatccgcttctgcactttatcttttaaataaccgaaaatgacattttaattcctgccaacaatactcggcaaccccaagtacttattgtgctcagtcgcttcatgaattcccagagtagtacagatggtctgtcgcatattagatgaagtattagtgctaaaaaagacagaagactttcgaaaattaacatgttgtcccgttgcagtagcaaacatcctaagtaactgaagaacccgattcatctctccattagtcgccttataatacaaaaaactgtcatctacaaagagcatacgagagacactaggcgctccattagccactttacaaccatgcagccacttcctcttttcaaatttgcgaataagagtagaaaaagcttcaacacacaccaaagaaagatatggtgatatatggtctccctgtcggaggcctctactaggcacaataggacccatagttcggtcactactcacaatctggtactgtaccgaggacaagcatccaaagataagacaaacccatttatcaacgaatcccatccgagtaagcataacacacaagaaatgccaatccactctatcataggctttacttaaatccgatttcaacgccataaacccatccttgcccacttgcttccgcttaagataatgtaggatttcaaaagagaccataattgtaataccctagaattaa

SEQ ID NO: 30084 - DNA, 1075 bp, Cannabis sativa
tacatatttataaaaaataaaaagctcagactactataatttttttacgacggatgatttgaattttaaatttaatctttatatttatctcattattataataactaaaatataataattgaatgtgaaaaaaataaacattactgattggtttagacgagtcaactcgactaaaccgaccaattcattgagtgggttgattttttttttttcttaattagatttttataatttgatatttatattgagttaaataaaatgtaacgtaaaccgatcaaatcgaccgacgtacactcctaccctttagtagtccttcaccatccatatacataagactttgggccctttgtgttgactgttgtgtgtattcaaaaaagtgtctaataaagtgggtttcaaagagtgtgtaaatatttaagtgtgagtacaagaattagtgaaataaaagatagtgagaattgggcttgtagttgggtcaagtaaaagtgatcaaatcttgtaattatttttgcaataatatcatcaattatgccattttctattatacttcataggcaacgatcatagtaatcacactaatcgtgttggaagagttattaggttctaatcaaatacctacaccaacaatgtgaaataggcctcctctttttctgaagttatttgacatttgaattttgactaaccaaaattacagcagtcttgattatgccaagattaagaaagttccttcattattgattcttgataaatgagaagagcttcaagtttgtttattctggatatgggccatatggcttaattcttatgatggtaagctgttcaaaagggcatcagtgtaattttgaaaggatattgttagaatattttatgtggatttatataattaagtgttattcattcagtgtcagtattaacatataatgatatttatataatcgtaatgcatagtattattattaggtcataataaaataaatataatatactaacacgctcgggactcatggatacgctccaaaaacatttttggccagtccattagaaaattggtccataatatctaataataagagtt

SEQ ID NO: 30085 - DNA, 1615 bp, Cannabis sativa
aaaatacagagtctattttattatttaataatctaaacagtaatttttgtgaaacacagaatttaaaatagtatttattcaataaaataatcaattaatataatgtatacaaacttataaatttccctaaataattcaagatttgcatagaaaaatttaaatgatatatatatatatatataatataatgtcccttaattgaagagaagaaaatgtaatgggcctggtaaaatgaagccaaaataatgaataaattatgttaaatataaaaaaaaaaaaaatggaaattataaattttatagattttatacttcgtgtgaaaatataagttttttttttcaaaatattattttaagggaagattgaaaaaaattgaaaaaattaggtaaggataacaggtaccctaccaaaaggagtaatcaggtaggttattctgtttttttttttatatttatttaacttttttccgatattttcccataaaatatgtatatttttttttttttttgaaaaaaaaaaccatatttttacaaatttatgccttcaaaactataaaaattcaaaaagaaaaaagaaaaaataataactttaacggtttaataagccaatgttgatctcatatattcgcaacattttcttaaaatggttttttcttttcctattttatttctgtttaccttttttttaaaaaaaaatatatatgaattagtatattttttatagtaaaaagaaacagtattatttggtattatcttttaaagatcattgtttattgaattaattctactcttataattttttacttacacactaatgtgaggtttggttggaaataacaaaatagaatggaaataaaataatttttattgtattttttgtttggtaatgtcattcttattcaatagaatgattttttcatcattttggtgaaatgactatatcattttgaaatagaatgaatgatcatttcaatgcaaggtaaaaaaaattaataattttttttttatcaatttttattatacattttaaatttaattcctatttctattcccattcatattcatatattttcattcttcataaccaaacaccaaatgccatttaaaagaaataataaagagataattacaacaaaggttccaaaaaatttagggttgatgcaaattaatctccaacttcgaaaattaaagataatagtcttcaaggtcacactgatccgttaaactcaaataaagtgtcatgtgtcaactttttattggtctaaataataattttacttaaaaaaaattagaataaaataaaataaataatatattttaaaatcataaatttattttattttattttatcttttatttttatttatttttcatgttcttcttctttcaccgagccatgagagctcccccagagtaccaccacaagatctcaagacttggagaggtcatggatgacctccattttggcatggggtgatcggagctcgcacatcatgcactgttgagaaggagagatggagaacgactgacagccaaggggcttgagggtggaaggtcaaggtttggatttcgagtttctaggggtcatttcaagcttggtggactgagaatggacg

SEQ ID NO: 30086 - DNA, 1638 bp, Cannabis sativa
catgttcttatatatagctcaattctctaccatttattccatgtgggacattgtccacaatattaagaacttgaaaagattaaaataatagtacaagccttcaagagggtcagagcctcttggagcttgcatcgtttatgcttgttcaccattcatggcgcaactttcaaggaagtacaaccaaaaaaatgagcttatattaaaaaggagatatctttgaaaatattccccatatttttctaacatgtatccttcttagacgcctagcaacatcatgtttctttgtagtcccattagccacaggcatgtcttgttttgtctcaccaaacacttaccttaggcttattcagcaaacacaatgtaaagaatatttttctatatagaaaaatagtcatatatataggctacaactggcgggagaaatgtatgaagactcctttatattctcccatagcgcttataaataaaaggtagagtcactcaaaaaagggatgggaaaaaatgagaggaaattaaataactctaataatccatgcaacaactctctgtaagaccttgattacaaacattaatacaagtattaggctaagatttgttaatgctccaattatattaaaatctctttctaaatattactattttatttataataagaataaattaaataattactgaaaattttggtcaacaaataaaaaaattaaggactttgaatgccatagagaaattttaatggattcaaattggttgttttgtgtcacaatttagtgtctattctactaaaatttgacaattataatactatatttatggtatcgactttggcttctccaaaataaacacaacacattaaaagtgaatcaattattaaggtaaatacatatgttgatttaaaaaattcttaatttaagtcatatttaatataaactttattaaaaaaatttgtttaacatttgttactgtgttacttactttatactaacacaatcaagatacatcaacttctcacatctcgattaatgaaaagttaattaataatagtcaagttccttcctgatgagaaaagtaagataaaaatccaattaggccgtctcaagactattcaatcatatataccaaaaagtactcaaccatgacacaagtttccactaaacttcatggtattgccaaatacttttcgatttgcttttcatttttaatttgccaacttgaattttgtgaccttgtttcatcctataataatgatcaacactacccagctagcttataatataataatttaggaaaatttacatcatatactaactattatttttttacaaaatattgtctggtaatatttttttacttttttactgtattttttataagtttcatactgtagtatactgtgttaagtttccactggtgttctactgatattgtttagttactgttgttttgagttgttctgttttgtgttctacttgtgttttataaaaacacagtatttttgaaaaccttttgtgtgacagtaattttgtaaaaattaactcaaatttcaatatttttataagtttccaatactttatttctaaacaataatcataactatataggtagcccataatgggaccaaaaacttcacgagtctactta

SEQ ID NO: 30087 - DNA, 1384 bp, Cannabis sativa
  modified_base (548)..(551): a, c, t, g, unknown or other
taattttattatataaatcaataataaataaatgtaaaagatttacaatttaatgtaataattaaataacataaaagtaaatataaaagaagtatatttattgtgatgcaatatatcatattgtggtacaaatatccataacctgtgataaatttgaattaacttttgatacactgcataaagcaaacattttacaagataagctatattttaataatgagaattgctaaaaggtattatcggtgtctagcacccttttcggtgccatactattattggtgtaattaagtatcagatctcatataaattaaaaaaatagcttttaaagaatatcgctaaccaattgtggagcaccaactattaaaggtatcgagtactactgatacctaatatcaatgctctttaataatagatcaccaatctctatctccattgaagatgttctagaataaagataagcgtttgaagaggagtactaattataactttctattacaagctcttagtcaattttcacgctcgaaatcatatgtcagaatatttttttnnnnttttttcatagtgatattcattatagttatagtatcatctttgtaaattttttgaaaaattctgatagtttacagtactgaaaatatagttcctaatatttcagcctaccacgtatgtttaaaaaatttcaaacttatttttgacactataaattattcgaaattttctaaaaatttacaagaatgatgttgtaactaaaacaaacatcactatgaaaaaaaaattaaaaaataatattctaatatatatttttaggtataaaagttgactaagagattgtgataacatattgaagataccacttttaaaattagttgtcatataattgtgtgtcaagtttgtgggtgatatacttatattatttatatttaaatacagattaaatttattttattttctttttctttttttgaaaaatgattcatatgatttgacgagtgcgtagtacgtattcggtagattatataaatataatatcatctttacactataaagaaaatgtttattaatataaataaatattgttaatagtttgttaagacaaaaaaaaaataaaaaatgaggttctcatgaattaaatgacaaatttagcccttggtttaccagtttactacaaatacaaacattgatcttatttatagtcactttcatataaataaatgcaaaatatttcagcgtaaatatttaagtttaattttgagttacagataaatacttaaattataattctcaaattctgtaagtgtcaagtcaatattcatgtgttatttttttattgatatattaaaattaatttttaaataaaaaataaaaatttaataacttagatcaa

SEQ ID NO: 30088 - DNA, 2658 bp, Cannabis sativa
tatccattaccaaaagagggaactcccccccccccctctggtattgtccattactgtacctactacatcagctacgggtcctgctgcagcaatctcacaatcaccatttcccaactcttcattatcagctagtgcctggaacccattcagcacctttgtggtcgagacttgtccatactctttaactctttttcctttactcactgcctgaaaaccttcaggatcaataacaggattagctgtcctatgatcttctttaataacccattcctattttgccttgttaccattcctgcagtcctcagttttatgtcctaaacaagaacagttggaacacgtgataggcttccattcgtactggattcccacatgacaagccgacccatactcatcttcaaattccaataagtttggaagctcttgattcatctgaacctcaatgagaacccttggaaatttcagcctctccctctctcttgtcacactatcaaccataatcggtttcccaacttgaccaacaatcttaaaaagagatttctggcccagtatttgagttcaaggtcctcaagatgcacccaaatgggaacttgtttcacatcctctttcctgaaatttgtattaggatcccaaggtttcatgatcacaggacgtttattgaaaaagatgtaacctccatttaacacttgatccctaatctccattgtgttgaaccaaataagaaaaataccaaaggcaagcattttcacattgtcaaccttatcagtccaaattctttttgcaaatccttccaaaatatgcagagggggattagaccctaaaacatagcatacaatggaaggactccaaaaattaacctcatcttcaatatcttcgaaattaattttgaccttattaggcctctcagatctaacaaaagactgttctaaattcttaacaatagatccagatcgcagtacaggagggatcgaggacataccttgacccaagctactgttacattggttattcgcgtgcacaaactgcagaaaaactgacctagcctcctccgttcgcttgatctcattcagtgatgaagtaggagataaaggagctcgaaataaatatgaaaacccatcctagcgattactctcagccatcacttcctctggttcttcatcttcttcagaaagctccaggggagcaattcctagaacaacatccatcttcttcgtccgaatgacatcttattccgaattagggcccttcttccttggtttggagacgaaagccttcgattttccttgttgtttcgacctagttttggccatggcgccaacttcagctgctagagagaaaaaacagggaaaatcttaatagcactgaaacaccatttttattcatcaattggtcttgcacaatacaaagttatattactctaagtgtttgtatattaactatctttttattaatattttatattttatattatgtgtttgtatttttatattatattagtatcatttttatcattttctttagtatattagtatcatttttgtagtatattgtatatttgtaaggaaatggctaaactttgcatgaaatttttttaaaactttgaacattaataacttttgatctggttgtccgtttgaggtgatttttttttaacttgagtacttttttgcgttctacgcaacccaaatggcctacggtggtttggccaacaaaattttcacaaaaacgctgttttgtatattaaattcatgttatgcacccctttcaccaaattttttgtattttattttgctatttcgcttaaaataaactaatagaattcttatgttaagcattagaatcaatgtttataatgcatttgttaactctaccacaataaaaattgcaatactaaattccattaatatctcttctaatatttaaataaaatcatagtagcaaatttatcaaatattgtgttttggtatattggtaaagacttatcgatctatcattttggtcacaagttcaaatctcaatagaccatttttgtattttttttatagcttactatatctatctttagcactcaacaatatctattctatgtattacatcaatattattctgaaattactctaagtatttaaagattatcgaaacatatatatataaaaatattcttataaaagtaggttaaagaaagtataccttataccaagaattatgtacttgacttacgataaagtcacttccaataaaattctaacaaccaagtttaagagaaactagaataaaatattatcccaattctatcgaaatttcggcataacagctataattgagtgttgccaaaaagtttaaacataataataacaacaaaacacaattcaaaataatataaaataatcacaacaacatttagcaatgtaaaaatttatcattcatccaactacagtacatgtatccacataacctacttcactacggatgaatatttcagatattcaaactcacctaacatacatattattccactcatcgttccggcacagtacaatatattgcgaaacctacttcactacggataaatatttaagatattcaaactctactaagcattcataattaatttataataaaagctagtaaatgtatacctcgagctacctagaaaccgat

SEQ ID NO: 30089 - DNA, 1623 bp, Cannabis sativa
cttttttcctttttgcttccgtttaagataatgcattatctcatacgaaaccaatatgttatccgtgatttgacgtcctagtaaaaaagcaatttgggtctctgaaataacatttgaaaggacccctttgagcctattcgccaacactttagaaacaatcttataaataacattacataaagaaatcgggcgtaagtcattcatgctttctggttgagatttttttggtataagcactatattggtctcggctagatactcatgaaactcaccaaaaacaaagaagcgttggaccatatctgtgatatccttccccacaatgtcccaatgtttttgataaaaaccaggattaaaaccgtccagaccgggagacttgtcgggatgcatttgaaaaagagcctttcgaacctcaatgtcctcaacttgaaggagtagatcttgattctgatcagcactaactctaaccgggatacagtctataactcgctgccaattcgaaccggaagcagtgaaaagatcagtgaagtacttttccataacctcccggaggccactatcccaatccacccacacaccatcactattcttcagttttacaatctgattattccgacgccgattactagcacaagcatgaaaatacttggtattttgatctccggcttgtaaccacaattgtttagaccgttgcctccaaaagatctctttcttggttaaaacctcacaaagctgagattgagcctccttatatttcgagacagccacctcatcacttcttcctttcaaattcttcagtatcttgttgcaatgctttattttttttgttaaaagaacctgtgatatcactaccccattcagcaagggatacactacatgagtgaagcttcaaatataaagacccatttggaatgttatcccagttggcttgaacaatctatctacacataggctcccgggaccacgtattttcgtactgaaacttcttctggataatgatggctttagtcacagcaagattaacccaaattggacaatggttggacaccgtaacttcaagattttcaagagtgaccgagggaaataacaattgccaatcatggttaactaatgccctatcaagtctaacttcaacccattgactagtactcttccctttctcccaagtaaatggatatccccttaactccatgtcaataagatggcattcagagaccacatcttggaacccatttagaagccaattcgggtatgatcgaccacccttcttatcactatgactcaatgtattattcaaatcaccaaacaaacaccacggcaaagagtactgacctgagagttgatgaattaaacgccatgtattcccttttagactttgctagggctcaccataaaaaccagtcgcacggaacattgaacatccttccattcgtacctccaagtcgatatggttttgactaaaaccaagaagcttgccttcttcttcttttttccataacatggctaagccaccactatgtcccctagcttcaacaacataactcccttcaaagcccaacatccttttgacataattaatcttttcagctttgcaaatagtttcacacgaaaaaatcactttgggtt

SEQ ID NO: 30090 - DNA, 2923 bp, Cannabis sativa
tctctcgctaaaccatcttcataatcggtgttggccgagcgactttggggtccctctttggccaagccatcttcataactatcgttggccgagggactctgggtcactctctggccaagccatttttgtaaccgacgttggccgagcgactctagggtcactctttggccaagctatttttctgttatggtaggcaggcatccatttgagggagtatggctctttgagcagtctcaacctcttattatttcttcatcctttttctcagatgggacggagtttatagtacttgaccgtgctaccctcttgattggagaacatttgcttactcctgagaggcatccctctcatttcatcattacgccatgagtgtcttttaagacctcttgtggctaagtaacttttgttgggagaagtaggagcatttctcttatcgacaaagggtagctagtccttgtcaatttgaaaaatatccccctttctctcttttttcttgtgtgacccccaagtgtccaatgtcatccaccttgactcggagacccacctgactgcgctctttgatttattgcagcagactaaaagcaaacgtgctatcgctatgaacttcttcttgcataggggaactttacttaagagaatatcttgtatatttatttttatgagttgtatagcgtgactttacttggatgtacgagcattagggttattgccttgtaaaccctgcaggggtctggcaagcttcataaagtacatttgtttgtgtctgtttccaagactctgttaccttcctcgatgcagatatatctttctgctctctcgtagaagtcttcaatgtcctccaactcccttttcaacatattcccccataatctactctcaagtcgtattccaacagctatgaagaacttatgtccatcattgaacattcttcctactttggcgacttcaacattaaagtgttggatgtaccccttcaactttttttctctccttactttacactggtgatactcattacaggcataacgtaatcactcgccacttggtgttgttgctgaaaattcctctaaaaattgttttcacgatgtaattgttgcaggtccaaacctcttgaaccacttatacgtggcccctttaagtgtaactacaaagcattggcaccttgccttgcaggatacctttttcatcttcatcagctcagtaaaagctcttagatggtattttgggtcagtcgtaccatcatatggtgtcatgcagggctccttgaaactgagtggaagtggttccattttaatttcccttgagaaaaaggattccctgtcaaattcatcatcctcgaaatcttcctttggtgctatagccatccttcgacgtagatcatacatctctacttctagctctttcattctttagttcatcctttcttgagagttggtgaacgagacttagatcttcccagcagtttgtatagagcttgtgagtagtactcatctcatcccatcattgtgcggctctccaacgtggttgaagggagacactttctgctttctttgctcttaagagggaggtgcaagtgtggtgttcccttgcactgagattctttggctgaagtctcttcataagactacatgatgtttcccctattgcaatcttacccaagcagatagattcatgttgctctgagcaacctcttaggttcttatttcacgacaggcactttctactttgaccatttagggtatcccccattggtgacatggagctcttcccgtcttcgtttgcggttgaaatcccgcacttttgtcgatggactttgtacagattgggaagagtttgagttatgcctttgagaatggttctcagtactttttgcatgccagccaccgtagtttctaacctccagttgttctggctgagaccttttatttcgtcttcatagtggcgagtttgggattttggtcccatagagttagctcgcttctcctttctggggcaatgttgcgaggtactgggatctcgcggtattggtggtggtgggtgcctaggtgacgacgggacctcctttcttcatgtcacacctttacatttggtcgtgacggaggaagtaactccactgctgtaatacttgcaactctaagattaaggagtcagattagcaaaacctaactagttaagtgtgtattaatgtggaattatattattatataatttaatatatatataaaaatgaattatattattattctttataatgtacaatttccaatagacatttttagaatactttagtaaaaaataatattgtactttagtggggttaaaactatctatattgtgagaatgtataaaaggatttacaaaagtgcttgtacttgttatattttacggtaaaattactaatataaaacgcctttctatgttagtcaacgttctaaattgatgctaaaaaatgtttaaaattttttgtcgatttgggatcggcgctgctttgcgtcgatttaaaactgactctaactttttatcatcatttctaaacggatgtatttgagttaaatttgatttttacaatttggaccaagcctaggagccctgttgtaaagactcaattgaccgagtcaaaaagagagagataaatatatatttgtataaataataataatgataataataataatatatgtatatataaaaacaaaacaaataaaacagaacccctcatatcgtcctcactcactctttctctttctctctcttcaaaccacaaaataaactcacaaaatcccatcaccaacgtgactccagcgacccatctctaactaccgtctgactccacacaccggaccaatcaaatcccaaggtgctggtgacttcaaaccccaagcggcaatgcccctttcgccgccgttagcctgggatcccaagt

SEQ ID NO: 30091 - DNA, 1183 bp, Cannabis sativa
ctgaggtgctatgtttaattgaagcaaatatttatgtttaattaagctgtcattttgtataatacctattgcctggatttttctaggagttgtagtcttagccaataaatagaaagactttgtccatagataaggggcgattgactttgtgattgtttaaagtaaagattacacttgggagttttcaagtttctcaaataattttggttttgtaaccagccttatggctttgatcaataaaattcctttctctctagctgagttgtgtaccaagtgtctatcagattaaccatatccaggacacaattttgagctccaaagtaggatggataactgataaattttcaaaatgatgcacattaaatttataaaaacaagtagtaaaaataataattcaaaaaaagtgggtggaacttttgaaaaactaacaacttgaatgaaatctcaccatatgctttagcttctgatagtaaattggtcccatgaaaatatatgcctgcagtggacaaccagtgatacctggcagagaacaaaattatgctttttcaacttagagaaaagagagccacaaaaaaaaaaaaaggaaaaaaaaagaaagaaatacaaaaaccatgctgagttttgttatacaagcatttatggtgacttttctccacacaaaaatagggggaaacagcgtcattcaagaatttctaccatttcatctcttcatttgaaaatacatttaaatggaaagataaaatcactacaaagtacaaactaggagagaatcccgtctttcaacaatattagaggatatattgccaaagttgaaaaatcagagtcaaaattgtcacagcttaaatatttctccaaatgcgacaatatctcttttctgaattgtaaaaattagtcaaaatggtcacagcttcaatattcaccaaatgtgaaaattctcaattctcaacttttaaaattaggagattatggatattagtaaagcagaattgcacccctgagtacgggaacatgcacaactttctatcctcgaatgttaaaagggcaggaatggggatagcaccccaccccaacagggacccatttaattttttatttattttataatattattttcaattattatattttttttttttttgaaaaagagaaagaggcctgttagaatttgaggaataagatgaat

SEQ ID NO: 30092 - DNA, 2926 bp, Cannabis sativa
taaaataatttccaacaggtattacatgccacgtacaaacagaagtggagacattggatctccctgtctaagaccttgctttgattcaaaaaagccatgtagagaaccattgaacatcaacgagaacttaggagttctaacacaagtcataattaggagaatgaatttcgggggaaaccaaaatgcatgtagcatctcctcaataaagtcccattcaatggtgtcataagctttttggagatccaatttaaagatacaatttgcttttcgtgacttccttccatagtgacggataagatattggcaaatcattatgttatggccaataaatctgccatgcacagatttgccttggttttgagcaatcagcttaggaaggacagttttaagccgtgtacatatcaacttgtttgcagctttataaaggacattgcagcaagcaattggctgataatcactaggaaggtttgggcactttgtcttagggataagtgtcaaaactgtgttatttatctcctttaaaagtttccatgtatgtaagaaggatgaaagagcagcatatatatctttaccaataagttcccaattatcttgaaagaaaaaactactatatccatccagacctggggattcgtttctaggaatggagaaaatagcagtcttaacttcctcaactgaaactcagcaagaagagcagctacctgttcattagataacacagccccttgattcataacagcagaattaacatgcatcctattgctcaatttggaaccaagcaataatttataatagtaaaggttttggttacatgttgtggttcatatacccttatccctgcagcattttgaatagatagcactctgttttgtgccctacgaattcgaatactcttgtggaaaaaagctgaattagaatcgccatctttgatccaatttaattttgatttctgctgcaaaaaagagagataattagcctggaccgaagtaaactctgctctagcttccttttcctgttgctgcaacatagaaccaagggggttttgatgaaaggcatgttggagttgatttagtctatctcttgcttgagcagcagcagctggaatgtccacaaaagcttcctgattcagcttcttcagggcctgcttcagtatttttagtttagatacaacctgaaacatcactgctcgaagaataaaatggttccaagcttcagcaaccacattaggatatgagggatgagagatccacatcctaaagtatctaaatggctttttaccatcgggaaggacattctaaactgtcaggacagcaggagaatggtcaaaaagaccttcattcaagaacaccacttcagcagtagaatacaactcaagccagctctggtttgcaagtaccctgccaattttagagaagatcttgtcatcccccatttgtttattgctccaagtaaagaaattgccaatgtacttgacatctttgagttgacaagtatctacacaatctttaaattcaatcgaatcattataccgaacatgcttcccaattctctcctctttactaagtatgtcattgaaatcaccaagaatcacccaaggatcagaaatagaaatctcaataagatctctccataaaatgttcctaccacactcatcattaaaaccatacacaaaagtaacaaaaaactttgtttttttttttgtctatggtttcaacaaaaaggtggatgagttggctagtgcactttaaaatatttacattgaaactaagaggattccaactcacaagaatcctccccccatcatgccaagctatattagaagtaaagcaccatctcgaaaacattcttacatacaaggctcctaaattttgagccttgactctcgactcgaggagacaaacaagccctactctttgatttccaatcaattgcttgactgaaatttacttttgttggctattgatccctcgaacgttccacgccaagattctatccatgggcaagagagggtactcccccctctcctgtcttgactgcattgttcaaattaacaatcacatcttctatagtgccatcttcctcatatccctctgctgaagattgaaaggaattgcatgtattagttggcataacaggtaaattaacagcctctttttggcctctagagacaggaataaatccttcattagcagctgcaatttcttttttctgtttaacttcagcttttttcttggtgcctttttaacccacacctatttgctggttgttttcttcctacagtcagctatagcgtgccccaaaccaacacaatgaccacacaaaagtggtttccattcataagaaatagccaccgtagtattgaatccattctcatcttcaaattctatagtattcggtaactcctgctgcaatgagacttcaattaagattctaagaaaagagagcttatacctgtttttagtagcatcatctaccattataggtttccccacttgccctattatcttgaaaagagatttcttaccctaatatttcaagtcaagatcatcaagatgaacccaaataggtaccaccttgacatcttttttcttgaaattcactttaaaatcccatggtttcatcactacaggtctcctattgaaaaatatatatcctcctttgagtatctcatctctttcttcaattgagtgaaatcggataagaaaaatgccataagatagcaatcccaccctttccaccttatcactccacattctcctaacaaatccttcaaggattgagagagggggattagctcccaacacataacacacaattgaggaattccataaatctacctcttctttaatgtcatcttcagttatcttaaccttgctggtagagatagaattcgaaaaagaggaatcgagattccttttcacagaac

SEQ ID NO: 30093 - DNA, 3526 bp, Cannabis sativa
tatttgcgactaaaaattagtcgcaaaatctaactattagtgactaagttgatttggtcacaaaaaatctagtcgctgaaaacttattttcttgtagtgttggttgacgagttattttcgtcaaaattttggcaccttttgcagaaaagacaaactccaagctgtgtttttctcatgaatcatccattaacactcgccatgccaagttgttcattttgtctccaagacaataaaactatcttggacaataatcaactagttgtaacaagaagaagtcatatggctcagccaccagagaaaacctacgcgaagtcaatttgggtgaaggacacaatggtagtcatatataaatgaaaacaacgtaaggaaacaaccccaacagtaacagccaaagttgtggtgaccgacctacaaggagaatgaccatacctctagtcaccggagaatgcacatacctccagtcacagcagaaaacaaataattccatgtagtggaaagacacacgaacatacaatatgggtccaccagacacaaccaaatcccacgaaggcacccatctccagtaagatcccctccaccacagatttcacatgaaccgaatacttaacgtaaacaagccaaaaaggaaaaagtttactcaatgagctttcgctcttgaactcgctctcacatagaggaaatgaatgacttgaggttggaaaaccaaaggttagaggaaactatgaccaatatgcaaaatgtactaaatgccttgttacaaggacgcactgatgccccattgtattagcataaacaaaaggaggtttgaagccaaaaaagaagaatgggggaacctcaatataatccatgtgtgataaatctaagtcctcaccatgagggggtgcacccatgcaaagtcaacctaaaactcaagaaagacaaaacctctcacctcaaccccataaccttaaggaaaattattatccaagaggactcatgttaggggcacctcgccagggaaaattgttatccaagaggactcatgctaggggcaccctgcctaaggtttccaccccaaaggaaggaagatgtaagatctatctctctactttggttaaaggtcacaaacatataagataggagaggtacctcccacaacccccatgcaacccacaaatagggttaaggttccaccaactaacccacgggaaaaaaagtgaattaaatgggtcaaacattgtattgggacatgaattagacctatcacgaacacatttgatgcaacgaaattagaatcagagtactttttgtttaaagcactcaaaacacaaggtgtcccaagcacccaacgcccatgctgacatattatcagcctggggcgtttctaacaacaatactgaagatttgacccaatcatttcattcatcttcatccaaaaaactgaaacaagggcttttgggggagaaatgggtcgacctggaggtcaaaacggggacccagtgcctaggttgacaaagtgtcaacctaggccacttccatccacatttcacatgaagtcttccaaaaattaagatttaagtgcttttgggaaataggcggagccatttgggggtcagaactaggacccatcgcccagtttgttgtcttggtggtgcttgggcctagcagcgcccaagttgacactttgtcaacctgggccatttctaagaagtttttctgagaagtctcccaagcatattctccatcttcatcgaagattaatgtacaagtgtttctaggaatcaaatgcagtcatcttgtggctacaaactggactcaacgctcaggttgacacctggtatttggcccagtgcccaggttgacattttgtacaatgggctatctccaatcattatcctaaaaaagtgttccagaattttttttcatctttagaaataacaaagatacaagttatcttggggagaaaatgagatttccagggggccagaatagggcctcagcacccaggttgacatggcactgggccttgtgcccaggttgacatgtaacctagttcgaatgtttctacttctcaaacacaaattcagctctggtcattcttcttaaaatggtcaaaaacaagaaggagtgctcgttcgaaatctcgaatgccatagaagtatcaaaatgagcctcgagaaggagactgggaagcacccagcgcctaggttgacacctgacctagtgcgctaggttctacttatgagagttcaattctgttttgagcattcaactatttttttcacagtaaatgagggctacaacttctgacaggtcaaatctaaactttaatattttaacctttcaacaaggtaaaatattgacaaaatcaaggagttttgagtcatcccgatttcacgaaacaaaaacatcatcgagaatcggtgaacaacttcactagaacattgaatctgattaagtggtgtgaacatataacttaggcatcaaaaaatacaattctaggacgttttggcacttacttggcatccagattgacgttagaatgtcaagttgggagttgagtgtcaaccggggcattgggttgtcaacctaggcagagggtgctgaaaaaccttcagtaaatcgacctaaacttactctatattgattcgatatacacgatttaacttgcatttcgaagctatttcaaagatctatcaattcaaatcacatggccacgttgcaattctgaagattttggattcaaaattcatcctcaacaaagttgtaatttttccaacagataacccaaaaacgaggcgacggacgagattcaaagtccaaaaattgacgattttcaccaacagtcaatttttaccattggatcatcatgaatcattatcaatggccaagatcagcccaaagttattatatatatattttttaattattattttaatagttactcattctctataatatgcaagctcctctagtttattttttgcattctgctaagtccccacaaggtcagagcatctctctctattctctctcaaaaaatttgagcctcccacttagtcaattttttgtaattctcgtgagaaataaaaatcgaaatagacgtagctcaattaccgtcgtgtcacgggaagtgaattattataaatttgttgtgtctctcattatattacattctcgtcaatctagcaaacgagtgtgcggccagaaatctgtgtctatatttttatgtcaacacattgattttttggcattaacttagctttcgagttcttaccatgacaatatggtcctttaggtgctcacatatcattataacctcttctgttattttattatattattattgttagttatagctagatgcaagccttcaaataattaagtatgattattgtactgctagagtcctagctagcttgataatcttttaattaattatatatttattgactaagtaaaagtaacttttgattattgtggtagtcaaattaatatatgtttacatgtacatgcagggtcgtctcaagcttttgaggggcctagt

SEQ ID NO: 30094 - DNA, 1760 bp, Cannabis sativa
ttttttttttttgtatatttacaaaaatccacgtagcaatcaacggaacaatttaaatcacaattcagattcacatagcaatctacatgtaaactactggagcaaccaccgaagtaactcaaactattaagaaaataaaaataaataatatatgaaataattgcccaaaaataattattattatattattatttatattaatatttatctttacttaggtaagaattaccttttattatatttttatagtgtattttcattccattataaattaaataattatttttattaataataaaaaactaatttaaagtcatgtgttaaagcattatttttaaggttatataaatatattttttgtttgaatgaagattataataatatttttaatattttacaaatttagataaacaaaaaaaatatatataaagtaaggatatttttgtcaaatgtactcattattttattccattctcataccaaacaaaataaaaaaaatttaattataatattcattacaaaataacaaaacacactaatagtattctcattactatttctattaccattactattacattacaataaaccaaacatcaccttagttgtatttggttgaaggtaatgaaatagaattaaatgtaaaatactaaattttaattttatttctttgtttaaagtattgaaatgtcattttaataaaatgatttttctattattttgttggaagactattctatttgaaatagaataaaagatcattcaaatagaagatgagataaaatttaataatttttttttatcaatttcttttatgcattttacattttatttcattcaatttctatatatatcctcattctcatttcttttcatatatttttattggaagtttaggttaccatgcttaaatgtaatgcatggacccaaatttaattcacccataataaaaataagaaaactatgctattattccacctaaattaaaaaataccccactcatttaaacctcccccatctctctcctctcatactctctgtaatctctcccgtaaaaaaccacctaaactaaccaccgcgtgtacactgcgaaccaagccccaagcagagacatcgaaaatcgttgagcgacgacaaaccgtcgagatcacctttcattctcttgctttttgtttgggcgattcccaaactatatgtatacaatttatttttaatagataatttacacatttgtgtttgtgttttgttaatgttttgcccaaaaaatggatttaaaatcttttgtttttttgattttctaattttttttgtgatgatttgcaatattttgttaatcatcgctaaacttcattactaacctcagaattgatctatcatcgtgaaatatcgcaataaattgaaaaactagatgaaaaaagaacacataaaatgcaaaaaattcaaaatcaaaatttttggccaaaaatcaacaaaacacaaacacaaacgagagaaaataaactatatacatgatatagtttgagaatcacccaaacaaagaacaagagaatgagaggtgctcttggcggttcgtcgtccctcaatggtttgtgatgtctcagtgggggccttggttcctagtgtgcggtgatgagcagagcacggcgatgagtttaggtggtcttttacaggagagggaacaaagaaaatgagaggaagaggggagagaatggggcaagttgaaatgagatgagtatttttaggtttaggtggaacaatag

SEQ ID NO: 30095 - DNA, 3368 bp, Cannabis sativa
acacaatatgaaaactatgtgagttttgttcgtataaaactaaaataaattttaaaactccacatagtacgataatattaaaaaaataataatttagcttacaacacgttaataagacacgatcgaacataaaattaaattttacgaatttggcatgaaataaaatttatgcaagtcgtgtttgcgttttataaatttttcgtgttacgagttgtgtttatatcgacaattttttttaataaatttaagatttcaacatgcacgctaacaaaaattgttacgaccctaaccagaagtgtttctatttggaccctttcttctctcttatgtgttaattttgttgtttcttaaattctccttgatctcttaacgagaatgttcataaatttgtttttaggtggcattagttcatagtaatagtaataatgaataaatttattacattgtttattttttttttaatataatgattatattatattaatagtaatataaatttgttacattatttataggtggcattagaatataatgattattacattgaatattgtaataatgtttacctactaaaatttatattacacttgaactcaaggaaaaataatattttaataaaaatataataaaaaaagttaaaggtctatattatttttttaaaatattttataattataaaataaaagtaatacattattttcatcaatactaattttattttattacattcttatactaaactaaatattgtaatcagtaacaagccgtttaattttcaaattgtttgacaaaaaaacttattagataaaaaaagagtgctaattataaccaactattataaaaacttagtcaacttctatacccaaaatcatatcagatataatatattttaaattttttttctgatagcagcattcgttatagttgtaatactaattttggaataatttataatactgaaaacataacttctcatattcaaatctaccacgttagaaaaacttcaaacttaaataaaaaaaagacatgtatattttaaatattgactaagatattgtgctctaaaaataattcaaaaggatagatttggcagtaattataggttggaggtaaacaagcttgtacaattgattccgaaaattacatgttgtccaggtatcatcatcggttgttgtctctttctcagcagtagaggagtgatcacccctaaaggcaagttaaagaaaaccctaaaccctgttactgtactaccacaatttgattttttgttttgttttgttttgttcaagctgtcacctttttcatttatttatgtacttttttggagttccagtttgatatagtgaggggtttgtgaaattttaacatgggttttgttttgaatgagttaggggtattttgatcatgaaggttgggacaagtgaatcggatgaagagcatgaagaaggagataacgtgttttatgagtttgatgacaaattctgttatgatgaagatttatcttttttggattttcatgccaatcgtatgatgagagaaaatattggtaatgaaatatcaaagagctatgaagaattggggaatcgtactaagggattgaaaaaatcaaagaaaaaaatcttgaggtattaaattaatgatctttttaataattgtttctaatttaagcacttaatttttttgataatatttttaattaaacttaacagttatatgcctggatcatggattgaaaaggttgatagcatgaaattaagtgactatgatgtgcctcaaactacatctctcatattagttggtcctaaaaggtctggaaaaagtagtcttatcaatagaatttcaagggtttttgaggttgacaagtttgcaccagaaagagcccaagtatcatgtatgtatgaatgttataatcattagcttcatttaatgatatattttctgtttttattatgaccccattattttactttttgaaattttgggattaccagataatgattctgttgaagaaccaaatgttggagatggaactctcttctttcataagtatatgattccaagaggttcatcatcattttgtttatatgacactcgtagtttatctaatgattcacatgaaaactttaaaatgttagagcattggatgactaagggtgtttgtcatggggagcttgttataaggtcaatttttagtccatatagttcttattttctttttcatcttcgagttttggattttcgattttgaaagtttcttaacagggactcagatagtctaagtttgaggactagaatgaagtttaaagcttacaagaaaggctgcatgtccaatgagaggaacaaggtcaattttgttgtatttgttgttaatggatattcggttttgaaatcaatacatgccaaagatgaagataaacaatacgtcgagcagatcgcatctgcattcaattgtccatttgtgtcattccgaggtattaagattgagttttactcttattatggttgttattacaccacaaaggactttcatgtattccctttcattagagatttatctggtttggcttgtgggcaattatttaatactaatctgattggattctattcctccaatgcctgaatcaaattgatgtttcaatttccattctttcttacagatgacaaaccacttgttgttgttactcatggtgagctgcttgaaacctttgaccgtgtttatgtccggttgtatttgggaaagctactgggtatttcaccttcaacacaaatatttgatatcccaggtgaggtgttcctctatttattgatcattatcccctgctgttcattatgggttttgttaactatattgaaattctataatagatttgtaagttgtaaccgatcaccatgtgccaacacaggtacacctgatccagaaactgatgtggtgatacttgacatgttacacgctgcgcttgagcgtgctgacaaaaaccttcctccaaagccgtttatgaacaagttatttcttttgctgcacaaaatgccgttgcagtgtcatatggtatgaatgaaactattttgtgagaagctaactctcaattttgtggaatccaagtagaatttgatggaattatacgaaactcaccccggcttgttgactattatgccaaattacgtgcaggttcttcctctttttcaatcatcaaatttctggttgctaatggtacttggaattgctatccttttggcaatggtgcttcgtgggtatatttatcagcaagtttcgccgaaacaggatgtgcaatggcataagattcgacacttgtggctaggctaagtcttccttttgaaagaatagatagatacatacacatatatatgta

SEQ ID NO: 30096 - DNA, 1422 bp, Cannabis sativa
  modified_base (59)..(65): a, c, t, g, unknown or other
cagaacacattttttttttaaaaacaaatatttttaaaaattttactttcattttgtgnnnnnnnaattagaaaacaaaagtgttatcaaacgatacctttgttaatgttatcccattttttgcactatgacgtggtagcacatatgagtgacacgtgtctaacattccttgcacctgggcagagatcaatatcccgaatagactttgtgttatacatctgcttggtaccctagcagggtggaaggtagattatctgagcaatatcaggtttaaccttccgaactacttatcaagacttacatcagaataatcccgtgaagtccaagcactaagataatttctacaattgtgggattgagtcagatgaatatgacaacctattctgttttcctattttgtacattgtaattatgtaattatgattcttacctagtttagacattgtaagcgaaaggaaaaccttcccttatgcattaagctcctataaatagtgatctagcttcactgtaaaagggatcgaaagaattacttcagagagagatctaagagaattactcagagatttgattgtaagagctttgagagagaaaacacagtgttctttgttctcaagttaatacaatctaagaggagtaggctattaccatactaacggggccgaacctcttcaaaatttggtgttctttatcacttgttagcttttgctctattttaattacatttctaatcgcttaataattgatctactatcgttgacaaaaagcgaggtcaacagttaatgaattttattatgaaataatttttttcacacttgtcctttaaaaaactaatattttttggtaattgaaattttgtcctacatgtaagaatctatacatttttgaaaattaaaattttatttcactatattccatttttatgatgattataattatagtttaatattagaggagtactatcgtcaacctcctgttacaatctcttagtcaaattccatgtccgaaaacacatgctagaatatttttttcacggcggtattcgttatgcttacaacatcatcctagtaaatttttgaaaaattttgaatagtttatagtgtcgaaaatacgtttgaagttttttaaacacgcgtagtaaactggaatatcaggaactctattttcggtactgtaaactatttaggatttttcaaaaatttacatggatgatattgtaactataacgaatactgctatgaaaaaaatttgaaaaaaaaatatttcggcatgtgatttcgaacgtggaggttgactaaaaggttctaataggagattatcattagcacttctcttaatattatgcatctcttctatttctatttacgtaaatagattaagtcactgctaatttttttcttgttatcttttaatttaggggaatta

SEQ ID NO: 30097 - DNA, 1326 bp, Cannabis sativa
agttcagatttgtatttgcgaatttttatgtcgtaggggtacaaatcgtgtgccttctctctgaaatcaataaatagaaacaagataatatataaataaaatacagaattgctaaagaccccaggtgcttagcatgctttttttagtctatttgtgtaattaaatagcaggtttatataacttaaaaatttaaattttaaagaatgtcgctaatcaatcataaggtgacacttatagaaagtgctgcacaccaagtacccattaacaatgctcaaataaaatacaaataacattatatatttaataagtacttacttaacttgttcccactatttataaattcatgtttatatgatatacatgtacgtgtataaagatagctataatcgactaaatatattggaaattaattttgtgtatatataaggagaaattaatagagatatatagaacttactcatcagctgtgagaatatttactttattggcacaagcaacaacagtaatgataatccaatagacatgtattggttttagtagcaggtgtgaccgaaagattatttcgatgagttgcagtgtcaatttaatgagatcattaagttgaatgagtgcatttttccgagtagtggtagtggtgggaagaataagagagcctttgagaatggccagtgatgtggtgaggtgatcttgtggatgaacctcgccaatgtgcattaataactccccaaattcctttgcaaaagcggctaatgtcagtgttaactttgcctcccatgaatagcttcgtagcttcttcaatattttcactgttgtttcatgtccaatttctgcacttggttccttacaactgaacagctgcaattttgtatatttaaatttattaaaacatttagcacttttttaattaattttgtatttttaaaattaaaaatgtaaaaatattatccaaaattatgttctatataaaactgtattaattttttaattaataatctaaaatgtaaaataaaaaaaaattactttcaaaattttttaaatagcttttttaatcaatattttgaattccgatcccaactcttaaactttgaaaatcgaacccaggttcgctctcaggcttggacccgctctcggtcccaacctcagatctggcctcagacccgaattaaataaaatcaacaaaaaaaaaaaaattacagaatacatttttatttttcgtttttaaaattgaaaaacaaaaatagctatagaacatatttttattttttaaaaattaaatttcaaaaataaaaattttactgtgacttttgtgattaaaagatttaaaaa

SEQ ID NO: 30098 - DNA, 3044 bp, Cannabis sativa
ccaatttgtccaagcatgtgatcggtgccaaagaactgggaatatttcaagaaggaatgagatgcctttgactggaatactagaagtggaactgttcgatgtgtggggtattgatttcatgagacctttgccatcatcatatagttacacatacacattgctagctgtggattatgtctccaaatgggtagaagcagcagcaacatatctgaatgacggtaaaacagtgctaaactttctttagaaaaatattttcacccggttcagaactcctagagctattataagtgatgaaggaagtcattttcgcaacaagcaatttgaagctctacttgcaagatatggagttcgccatagaactgcactcccttatcatcctcagagtaatgggcaagcagaaatttccaatagggaaattaaactacttctagagaagacggtgcagcgttcaagaaaagattgggctaagaagctagatgatgcactatgggcttatagaaaagcgttcaagacaccaataggaatgtctccctataggttggtatttggaaaagcttgtcatctttcagtcgaattagagcacaaggccttctgggccatgaaaacattgaatatggacttggcagcagcaggagaaaaaaggttgttacaactaaccaaaatcgatgagtttcgcaacgaggcttatgaaaacgccaagatctataaagagagaacgaagaagtggcatgaccgaggcctagtcagaaaagaattccaacccgggtagcaagtcctactttttaattctaggttgaaattattacctggcaagctgaaatcgagatggtcgggaccattcacggtggtcaaagcattcccatatggagctgtggaactaaaaggtgaaagccccgagacttttaaggtcaatgggcagcgtttgaagctctacttgggaggtcaattagaccaagccaagtccgccattattctagcgcctctctaagcagaacaactcagcgtctggctagatgacgataaaggcagcgctcttgggaggcaacccaagtgttttcatttatttttttggaatttttgctattgtttttagtttatgttttagtgtttttagcattttaaatttcttgtaaagtatcaaacattatatttttccagttaaatcgtgaaaatcgtgaaaaacataaaaaaaataatttttcgagactcaaaacccagtggtcgcaaccaccaggttcctaggtcgcaaccctggtcgtgacctggacaattatagagccaatgaaatttttttggttccagtggtcgcgaccaggcataatgatggtcgcgaccctttttcctagtcgcgaccatgaggtttaacagaaaccctagaattttggattttcaagctagtcgcgaccagcccatgggcttgtcgcgactagctttcgaaattttttataaaatccaaatttttccacccaaatcaaacctaaacctaactattctcctcagctgaaacaccattgttctcagccaaaaaccaaccccaaaaatcacccattttttcaattcttttatctttataccaatttcttcaatcctaacccatttcatcatcaatcaccacttttcatcaaaaatcacaccctaaaatatcaatttcaccccaaatccaaaaataccatcattcttcatcttcaacctcaagctttcaaggacattcaacaatggaggttgagtagtggcttcttcgagtttgtaagtatcactctctattatatttaaggaattgattgaatgatttagggattttagtgaaaatattgaatatttggaaatttgttgttaatagtggaattgttgagtttatattgtggatttgaattattattgttattatttgtactgttctggtgcaattttaaaatttgggaaagtaagaaatttaaggggaagtgctgcccaattttttctagaattattttttgtgaaatttttgctattgtgctaacatgggtccaaaaagaacaagaaataatgaggaaggggattcatcatcaaactcaccacctacgggttttgatcaaacctggtttgttaatgaggctgcacaaaaccggtttatgaggctcatggctaggccatacattgaagaccgaggtattaaatttcctgacaaacctctaaagcgtcagcggtttgagacgattcgagcccaaattgaaaggatgaaatggggtagttttgttgatgctaggggccgggctaatgtcaccatggcatgtgaatttcttgctaattggcccgagcgtagaaatggtgaaattaaggtgtggggtaagaatgttcccgctacagccgacgccatcaacgccatgtacgttgtcccggactattcaagagaagatcaacacctctgaattattgaggaggatgagcagtttgacatggtagatgtgactgaaactgtgggattcccagggctgaggttccacgttaatgatgggcaagacgggtccattctgcaccaatgtgaaatcaacccggtggaaaaaatctggctatactttgtgagtgctcagttggtgccaagcaaacatttctcggaggtccagatggataggcttaaatatgtgtatgccatcataaaggggtacaatatcaacattagacaagttatccgaggaagcattgaacagattgttcaaggagccacgggtggtggccttggtttggcgggcgttatcactgatctttgcgggacatatgacgtgcctcaactggaatatgacaatactgtggtaccgcaaaggaagatggatatcagtattgtcaacaggctcaaggagcctcatccttatggacaaccacccgctgatgagcaacaacaaggccgaaggcggcgaagagaacctagtgtcgaggaagaggaggacgagcccccacaactgcttgagcctattgatccgacgatgcagtatactcatgcacaactgagttacatcattcagcaaaataatcacatgcagaattatatggtgcaaaggagtattcat

SEQ ID NO: 30099 - DNA, 3457 bp, Cannabis sativa
tgaataacgacaacaaccggcatgaaccaaaataaaaatctataatgcaaagcaaaaggcatcttcttctattggttcaatttttggcaaaaagttcagcatcggacggtttagtcgggttttgagtgaaaaagaaaagtaaacttacatccacccattcacgtgttgtgggttcgggttcgggttagacaggttgacccaatcaattttttttttctacttaattatatataaatatataattaaattattaaattcaataaaatgtatatacattaaaatatataatcatttaatatatattgtattaagtaactttttcttttacgaataattaaattaatattattatatttgaagtttaatgtatgtaaagtgtaaatttatataaagttttaagtaaaaaaatgggtctaatctgaaattcggtcattaaaaaatcaaactttaaacccgtattgatcgggttgaacccaacccgcctgcaatgagcagttttttttttttttttggttttttttgaattgttcgaatcgaattcagatcgaacataataaaaatgttcagtcctatttaatgacttattttcattatatcattttttatttctttctcataagaatattataacgaataattcttgtgcttattccaaagcacaaagtggttatgaaataatgaagcatgttgagcatttggagtgatactattactagcttctcaattatgtatagaatttagatattctttaatgaattttcttcaatccaagtataattgtataaaataaactccaactttgtcaacaaaataaataaataatgttctcaaataaggcaaaatataaaattatattttgattttatacacttaagtcttttttttagcaaaatccaaacatataaacaaaaaaccaaaggacccaattaaaaatatagatgaaaaaacaagtatatttgtagaaaaatataaattgcacaaatatcctaatgttcacaaagtaaggcttttgaagaacattttcaaaccccatttaagaaagtcaaaaaattaacaaacaagacactgaaaaacatgaaacacaaatcctgaattttagtaccaaatgttcacacattataagtagtttcaattgtttttccttaaatgagaatgaactaaaaacaagtaaagaaaaaaaacatctttagttaatttggtgggttataaaagctataaacaccataaaatgtttgagcaaaagtaagtaacaacaacacaacagctgcaacaaatgaaattatagcccaaggattactaaaatagttatgtctcaagctagctctccaagcattccatctatgattatagtacttatttacatcagcagacaacctcgaaagataactgtcatttatgtcaaaaaccacttcttgacaaagcctattgaacaaatcagaaacctcagaatcactccccaaccaatgttctatgatcccacaataatgtaagtaaccaacatcttcaggtgagttgatcaagttgtccatgaaaatcacataagaagtaatgtcattacctgaatccaaatgacattgttcataggcaatgaggtttaggaagagtgattttgttccatcatgtattagaagtctaggaatttcaagaatcccattcttgaatttgatgtcccaaaatcgatctgtttttcttttcttgaatttgacaccggcttctcttagttctgtcacacaatgtatcaattgttgtcttctcttgtctgcaactcggtgagcatgagaccagcgtttcatccaaactcgaggctcgggttgaggccctcttcgcaacagacttcttcgaaatacatcgagacaatgcagaccgccacctgtttaagaagaaatagaaaaaagttttaggagaattgtagtaaaatgtgtcgaatttcaaaggtttgtgttggtaaattgttagtatttttttgtatttttattgcctagcttagtataaatatgttatgtcattagactaatgagaattaggagtttttttaatagaaaattgatactatctcgaagagtatagcgattattgtattactcaatcagtaccaatttcttataagaaaactcttaattcttattcgacattacatatttatacttagttaggcagtgtaacaatttataatgatgatgagaagtatggggttccacctaatggatcaaatgtcgcggtattgttgttgttgttgttgttgttgttgttgctgttgctgttgcgttgttgttgttgttgttgtgtcccatagatgattcaagcttggttctatcactcttagacaatggctcatctgttggcattaaagggtcaaagaattgcaaagtcaattttgaaattagtcctttatgatcaagacaatcatgaccaagttgaaggcccaacaatctttcaagtatgaaaagtggaagttgattctcaagcatgatcatatccctttgaatggaatgcattgagccacgcatagcaaagattggatcatttctaggataaccaagatgcttaaaaccaccagcagcaccccgaaaaagctcaagaacaaaacaaccatcaagtaccatcatctcaacaaactcattactactaagagtgattgtaccttcataacaagctctagtcttttcttcaacctctttgattgaatcaaggtacaattttatgtcttggtttgttctcttaaggcattggttaagcgatcgccacttgtggcgatccatttggcgaaggcgtctcttgccatgatggtaaggacccaatgacacaatttgtgggaaataagctttgtcatctccttctcttaagtagtgtggaactttgtaaatacatagttttgcccatgaaccaacaaagtcatcttgttgtgcttgttcaagcttttctatgattgaaatcacccattcagagtctggtgatttaagcccttcttcaatgttatgatcaacatcatcaccatcttcatttttcaacacaacttggagtgattcacttggcttttgttcctgtttttggactgaattttgatgagaaaataactcaatagcttttgatgagtttggtgttgttgctgttgttgatgttgtgacaccagattctacagtttctctaagtttgagagttattaagtaccaactcaatagctctttgttaaacactgcaaccatcttttagtgtctatagatttagatttagatttagagaagaaaaaagaagaagaagaaaaagtgttatgtgtttgtttatgactctaataaagaaaggtatatttatacatagatatttttatatatgaatttatgatctcaaatggatttatataaaagtcacattcaaaaaatggacccttttagccttttaggttgggaattaatttagctaaaccaaaactactttttaggtatatattgttctattctat

SEQ ID NO: 30100 - DNA, 1633 bp, Cannabis sativa
tttcgcaccatatgagggtttgggcctcccctccttagattcatcaaatttcttgctcagattttaaatcattgagctcatagtgttcaattcaactagagaacaaggtatacctgaccaaatagtattcacgtaattcatagagttcacaaagtgcaatataagaggggaacaaggtatatctagccttatagaggttttatatcgctttgttacttccaaaaaagttaagaaatcagtatgagcaccttcttaattgttgcaaatggtagagggttgatcttggagataacacttctgccacatccttaattgtctccaacagtctggtctgaacttgtgccatttctccatttcagtgtgactttttgtgtaattagtgttcaacatagcattgatgagtgagattgagttctaaactcctattgtaatatgttgattcaatttaataaagattattcgtttgccattgattttgagctgagttttctttctctttgtcaactttctaatttattgttattacaggtgttgtccaaatttttgtaagcttgacacgtggactataatcccagaagcctaaatggtaatcgaccaattactattcttaatcctgacccccaccaaggatttgcttaagctctcagaaaaggcctccacgaaggttacattccatgcaaggcaaggacgcgaggagcatccgcaatcagcagtctctcccagtcttgggcagtgaagccgaattccccgtgaaggataagggcttcctaaaggacgccaatacaggtcacagaagaagtcaagatgagttgtaaccccattcagtgtcacgaggaagctccgcacgtagttgtcacgctgtagacaggacaatcatgtttttttaggtacagtgccaggacttgtcccatatgttatgtcgtagtacagagcatttgcgcccagttgtacctgctcaagtgatccaacgatcatctataagggaaattcaaaagggaagaccttgaggcgacacatgtgaagtgatcagaaagtacaagctaacacccttaaatgccatgtgatgaatcggccacctaccaaatcaaccgttagaattcatcctaaccagatcggcctaataatcacatgaagggaaaaatggcctattaatacccctgcattccataagataggggcaagtctctgaagttaagaaaaaaaaaacattgtataatatataaaaattctactaaaattcttatgaatcttcttcttcttcaagaggaatagatattctagagagtgctagtccattatgtatttacctgtaatattaatcgcctaccgatatagctaataaaatagactcgtagactaaggataggtaacgtctgaaccacataaaaagcccgtatttgttatttattatttcacttatttctttagttctaaatatttagtttcccaaaatctcggtaaataactgttattattatttgatttagttggttcttattgttgttattgttcataacaactttgttcgagtgaattaattttactacaaatggtatcagagctacaggctctaagaaaagatttcaagatccaaatacaaaccttcaagaaccacatttaaactatcaagaac

SEQ ID NO: 30101 - DNA, 1285 bp, Cannabis sativa
ttcatctcaaaatcaattggtgatgagtagaataacatatgttcttatatttgactcaatacttttatattaaattcatgtgagacaatacttctaataaacaaaaaaaacaaaatgttgcctatttgttcttgttccttagcaactccaagctgagagtgagatcggttccttttgctgccaacataaaattagtgaatattgtttcttctcaacatggaagccccaattctattatggccttctacggctgtggctccaatattgtttcacaaaaatgatataagaatcgcactcctccaaaaacactttctaattaaggaactaacaaaatgactatatattgatgaaatacaaggacgaaaatggaagtgagacactaattttgcagagcaaacaaatttttgagaagactctaaaatttggtttataacacaaattcagacttaacaaaagctatttttgttactcttttatgttaaataataataacatataagtataaacacacctcagctgaagctataggtgaaataagaggtcaattcaattcctatctctgtgacaataactgaatgccaccatttccatttttcgtattggtaatcatactcttcctcttccttgttcgtttggttcttcaattcaattcttctcttcccactttgtattttggagtactttgtctttaattgtgtttttggctattttgatgggtgctacctaaaagtgtaaagtgtcttctctccctacttttatttctttattattattaaatatcaaataataaattataactttttataaaacattctctttttgattatagaaaaaaaatttattgatcgaaatagagtaaaacagacttatttacatattacaaataatataaaaaatatattagtctctcttaaagggatccctcctattaatataatctcattttaagattacctctaatcaatttattcacttaaggaattataaaaacattttgctcaaaaatataagtatttcgattctattaaataaaataaaccgtaatcgtacaaaatatagttgcaacattccactgaagaagactataatctcggtgatcattcaactaccaaagctaatccaagtaattgagtaagacgtcggccaaatggcattactatactaaaaataaataacatgcatgatttgcttgagaatcgaacaataaaaaaaatatgattatgagagtcttgattaacctcacaatctttttttcaatctagattatcatcaatatataaaattt

SEQ ID NO: 30102 - DNA, 1719 bp, Cannabis sativa
agaatacgagtattgggggttttaccgcccaaatttgggttatgaagttaagtgaaaccaaaatgaaagttttagagattttgccaccatttaccctaaatactttataaggatagtaactctttatctctggtggactttcacccaccaaaggtttagctatattccagtttcctctattcttgaacatcttttttgtaacgaccgtgatatctaactacttgtattattttatctatgaacgttcttcttcttcaaaaaaacaaaaaaaaaaactctcttatatattgtttggtactagtagaatgtgaaaaataaaattaccatattatccttgttagtataaatatttattttttaaaatgataatttaatatttgatatatttattttgtcttttttttttcaaatgaaaaacttttttattgaaaataagttaaaccgaactagtaatcacaaagggggctacttccttcaaaagaccaacattcttaacctttataactctagtccaactggccaaagcataggcagaaggattctcagaccgcaacacaaaagtcacaacaacatccttaaagaagttacaaatattcaaacaaaacaaaaatagagagggtaagtgcaccaacgaaacgacagcgaaccaacaccaaaagccaaagcagccacctttgaatatgtttcaatcctcaacttagacacctgtttatctcgagccacctgcaaagccaaagcaattccacacaacctgaaactgtagagcactgagcacccgacaacaacccacacctcctcaagctctctggcataattcttttgaaaaatagcaaaaccagtgtctgtgtccactacaaaagcatctacttggcagcaccaaaaatcgtcaaaattctgaggagataactcaggaaagcacctatcaatatctggacttctttctcaacccaaatacagtcataaaacaattcatagaacctggaataagtaaaccatttccacatcatagttcttgcttttatgaatcacatcattgcaccattttcacactacctcacaaacacatattgtaaatagttttaactcttcatcatccaagctaatccaccacttgtaaaaattaattgtgcttgtccaattttaacagtcaatgcgcataccccattaacttctaaacctgatgcaccgagtaaaactacaatagcaaaacaggtgaactgcggtttccctctctaggttgcaaaagatgcacacttgactatcactagcaagaaagctgagcctagcttgagtagaaataatattagacagaattttccaacagtgtaactatagctacactgcctaatagtaaagtggtaattttccaaaaatgataaccttccgggactgagactggtttagattacaaccatcatctaagttgtcatacgttctcaatcttttcaatctttctagaatgtcttataagttcctaaagttctaaatataatttagaaatttttcggctaaactcaaaaaaattactccacttacacttaatcttttttaatagtaaaactttctaaattgttaaatccattttttacagttaattattaatataaaccctttatatgtacaatgtgtcaaatttatattaatacacctaatattattattttagaagtatataaattattttaaaatttataatattttttctctcttttttttttt

SEQ ID NO: 30103 - DNA, 1378 bp, Cannabis sativa
cttttgtgattaaatgtttaccgctttccgttttaggcaatatatgagcgtctagaaatgaatattatatgaaaagcatgaagagttaaattgataaatgtttactttaaaagagagaaatagtatgtataagttagagttaaagcaataagtgcataactgtggagttagtgcctgactcgtcgaggttgtcgaatttagggctatttgaaagagaatggaccctacacaatcatctagataaaaaggcaagcacgtagatcctggtaatgaccaaaaaaatccaccggcactgcctgtgcctctacaaaatctaaggaataatgcaggggttaataatgctaatcaacctgctgactggcagaaaatgttcctcaaaatacgaagcatcatacttcgtcaagaagatgatttgtgttgatttatgtaatcggcccaagtagctccagttgaacaagtgttaccaccagcttctgttcgagtggtgggtaactcgaggtttattctagcgcatcgagatttagtgtttgaacattttgttaaggtgcaacctccaaagttttaggaggtactaatattattaaagtggatgagcactgttacccacattttggataatatgggagtgacgggaattgaacaagttaattgtgttgcattcatgtttcaggagcacgcccgcgtctagtgggatattgtgggacagacttgagatgtcagcattatgtcttgggaagaattcaagagcctgttcgaagaaagtttttattacattgccatcaaaactttgcatatgaaagattttgtgaagttaactcaagggaagagaatagtggccgagtataccctggaattggatcatttagtaccagcaaacttcacctataaatagaaatatgtaaggtgattgaatgccactatcagtcgggacgtaaaaattaccaccgatcacgacacatcatataagaaaatggtcgagatagcactaattactgaagatgcagaacaacatatgatgaaagagcaggctgctaaggatgtcgtcacagcatcgaaccctagtgtgggtggtagtgtcagtaaggggaccgacagtaacaactcgcatcacaaacagaagcttgaagcttccagaacactaggaagtaacaggaagtttcagggaaatagaggtggtcgtcaaggtcgtggatctacatttagatcttacttcgagtgtcctaaatgtaagaagcagcatcagggtgagcaccgagctaaaacatgcttccagtgtggtatgatgggccattttatcagaggttgtcacaatctaagaaagaagaaccaaataagaacaacaattagaatctggggtgtctgttcactataactcagg

SEQ ID NO: 30104 - DNA, 1323 bp, Cannabis sativa
tgattgtaagttttctgttgcagcactgaacatatttctttttgtatatatgatcgttgttttctgattgatgttttgaactcttctactgaagttcatccggaaagttggaatcctatgtggtctgtatcgaggtaagataagagccagtttcagaggctgttgttttatgctatttaattttctaaactgctcacaagatgcttggaaacaactgtggagaatctaatgcacttacttctgttatccttaataaatgcagcatacttcaaggacttctttcattcatggtgagtcaattgtgggtcactgagtacttttttcttatttgcttgtgaaaatgtagttttcagattcgtatagattacactcttcatgaatatgtaactaaataagtacttatatttttcataagtatggtgaatttatatcgtgattctattactctgcagatggacactagtcctactactggcagtgtgaacaccactactgcagaaaaacgccgtttggcggaagcttcccttgctttcaattgtgcacagtaagtatcctggatacacagaaacttgtcatatgggattttcatggatctccttgtgttgtttttgaagtttatttgggctgacaactttttctactaaacagagcaacattccggaaaatatttccggagtatgtggagaagtttaaccaccaccagcagcggcttattgcagagcaagcttctactgaagcatctgcgcaagaaaattcaaagcccttgctaaaaaaggatgattcaaagggagatgtgagaagagaagttgttccaaacaataggaggatagaaaaaaagacttcaataccaacttggatgatggtgttgcttgtttctatctttggccttgtaatggccctacctctgttacaactttgataccacggatcacaaatgataaagttcattggattcagtggtgatcaatcaggctaggcttttgcgagttaaagagactagttcgaaatactgctagttttgtgttatatctaacatgatttgtatagaggagactcggtttgatcgtttgtttgtcaatgctccaacctgacttgacttgcatgtgatatcttaatctagtgggagtttctgtttgtgagcctttactcgatcgtttttgttttttattattagaatatggaaatgaatcgttaggccgtgataccctcttccactagtgcttttataattaccccagtagtcagttctgcatgttttgtcagtccaagctgatattagagtaaacatgttaagatactaagataccttggtgtctttggccc

SEQ ID NO: 30105 - DNA, 4759 bp, Cannabis sativa
actcgagacacgggacccgaccctggacctagaacccaggacctaactaccgggacacaaccccaaacccggacccaaacccaaacttaggagccgacccaagacccggggacccgaactggaacaagactgagatccgaatctggacctaaggcttcgacctaacccctagtaaatgtttgaatccaagacaaggacctggatccgtacccagacctggaaccggaccctaactgggatccagacccagaatcagaatcggaccaggtctaggactagaacccagacttgggacagtaaagggacccaaacctaaacccaaactcagaccataccgggacttggacccggaccaggacctttgacttgggtcctaaaccaagaccaggacatggacccagacccaaaaactggggccggacccaggacctaagaactagactcagacctgggacccgaaacttggagccacactgggactgagacctaaactcggagctgaacccaaattgggacttggactaagaccgggactcgagacccgaacccgaacccgaatcgaaacatgaacttggatccagactttgacctaggatttgaacataaatgggggacccagacccaggaattgggccccttaactgggacaagaacttgggcctcggaacttttatcgggattcaggacccaacccaaacccaaacttggacctaccacccaccacgggacctatgatctgggagtcaatgcttggacccgactcgtagtcggtgtctagatctaggacttagactagaacgcgaacccaaactcaaaatcaaatcaggacccgaatacatacccagacccaaacccacactcgtgaaccaaaaccgaaacttgaaatggaactggaccttgatcttggaacgggactgagacctagacccgaacctgtacctagaaccagaaaaaacctcggaccctaactgagaccgaaacatggacctgaaccccgcctcgtacccaaatcaagacctcaacccaaactcagacccaaacttaacaagaacccatacacttgaaactggaaccgaaactagaagcggatcgggaccccggactaggacctcgacccagacccaaaactgtgaccagactcagacacaaacccaccccgggattgggtcccaaacttgaatccaaacccgaatcgtgactcaggacccgaacccacacctaaactaagacccgaacatggaataggactcgagacctagaatagggatcgagacccagaactgcactctagtgtcggtcttggacctagaccgagacccagtctgggacctgggacatgaaccgagacaagactaggactcgtgattgagatccagatcttattctgggatccgagaactggggcttggaaaagacccatagtctgtgtcttgatttgggagtcggacaaggacgcgaagctggaccaggacatggacccagaccatgacatgggacccgaaactgaaacttgaactagaacgtgaccaggaccctggaataggaccaagaccgtgaccaggacctggacctggaccggcaccgagaactagaccataaccaagcccaaaaactcgagctcaaaccaagtcccgaacccaatctcggacccagactaggactgagacatgaactcgaacccaaacccaaatccaaaactcgatccgggacccagaccaagcccttgaccaagactgggattcagacctagacttggacaccaacccaaacccaaaactaaatattgacccagacccagactgggatcgaaacacgggatgaggactcagacccagacgcagacccaaatctgaacctggtacccgaactcagacctggacccagcccaggattcgaaaaacccatactcatcagacctaaacctagacttggacccagaccagaactcaaacccagatcgggatcaaaacccaggactcagacccggaactgaactcggactgtgatcgggatcggaacatgggactcggacccgcatctagacccagagcctgatctcgacctagaccgaaatctgagcttgaacccaaactcagaccaggacacgaacaccgacccgaactcgaacccaaactcgaactcagaatcacaactggacctagaaccagacttggactaggaccagcaaaaggacctaaactcgaacccaagcctagataaaaaccaagactgagacctagacccgaacaaagaataggactcaaactcaaacctagattgggaccgaaacctaaacaagaaccgagacctgaacccaaaaacgggatagggacctaggcaacagagctaggacttggacctagacccgactccagactcagacttgaacctaggacctagctcgtcacctggcacccaaaatggaatcagactaggacccgagattaagatccggatcgaacccaaacccaaactcaaactcaaattaggacccagacacatacccaaacccaaacccagactcgggaacaaaaactgaaacatgaactggaaccggactgggatcttagaatgggaccagggcccatacccggacccaaactcggacaaggactcaaaccccgacccatacctagacccgaacttgaacccagacacagaatccgagtgtgggtctctgttcgagtctgggtcctagtccgattacaattttggggttaggtcctcgtcctattcttgggtcccgatccgcttcttgtttcggttctagtttcaagtcacgaggtacggccgagtccaggcattaagtcccagatcccaagtcctgacatgggtcctacgtccaggtttgggtctagggtcgggtcccgaatcacaatccaagttgtgaggcccaagttctggtcccagtttgggggaccaattcctaggtctaggtcccatctatgtttgggtcctaggtcgcaatccaagtccaagtttgtgttccggttcgggttcatgtcttaggttaatgtccgagtccaggtcccgatttgggttcgggtcccatcctagtctgggtttaggttttgggcccaagtccgagtttggttcatgggtcctgggtttggcccaaatttttaggtttgggtcttggtctgggtccaggtcccggtcttggtttaggttcgaggtgatgggtcccggtcttggttcaggttccaggtcatgggtcccagtctgggtccaagtgccgataggtgttttggtctgagtttgggtcctgttacagtcccaggtctgggttctcatcccagtcctggtccgattccgattccgagtctggatcccggttcgggttcgggttcgagtcttggtacggatctgggttcgggtccgagtcttggtacggatctgggttcgggtcctaaattcaaatactgactatgggtcaggataaagccttaggtctagatttatatctcgatcttggtttgggtttgggttcagatttctgtctcagtagtcagttcctaggtttcgggtccaaggtcgagtactgtgtctcaagttttgggtgaagtttttggtctcggtcctggtctggcccagttttaggtccaagtcccccatctaggtccggatccttggtctaggtcttggtccaggttcgggtttggggcccaagtcccccatctaggtcacgatttggttctcaggtcctaagtccgagtctcgggtcccaagtcccagtcccggtccctattcgggttctagtcctagtataggttcaaggctcgatccaagtccgagtcccgggtttaagtttgagtcatgggttcgtgtgtgagttctagtacgagtttgggtctaggtctgggtcttggtctgggtctagatctgggtttgggttttggtccgggtgtgggtccaggtctcggtctgggtcttggtctgggtccaagtgttggtacggctctgagatctggtccaggtccttggtcacgggtgctgggtttgggttcgggtttgggtctgggttagggtattgatcccaatctaggtccgtgttcggttccgcattaagatccagttctgggtctagttccaattcctgttccaaggtcctaattcgaattcttgttccgatttcaggtccttagtctgagtctgggtttgggtcctagttttgaaatggttccaagtttgggtcttggtaagattccaagattgacacacctactacaagttgggtccaagccccgggtcatgggtcaagatccggttcccaatcttgggtcccggtcttgttccgattcagatcctgggtcctagtccatgtccaagtctgtttcttggttcaggtttgggaccaagaccagggtcggttcttgggtcacattctaaatcttgggccccgattctggttctaatttcaggtttgggtccccaaacaaggtctggacctgggtctaggtctgagtctccgatcccggtccgggttctacgtccgggtttggatccaagtccatgtctgggtttgggttcgtgtctcgaaacctgatcctagttttaattcgagtctacgtctcagtccgggtgtgggtttgggtcctagtccctttgtcttattcccatgtctaggtctgcttccagttccgcttccaatttcaggtcacggtgtatgtgtctgggtctggttctgggtttgggtctaagttcgggtttgggtttgagtccgggtatgggtcccaaatcaaaagatcgactatgggtc

SEQ ID NO: 30106 - DNA, 2095 bp, Cannabis sativa
tgttgaaggaagacaaatactggactcaattctcattgctaacgagacagtagaagactacaggagtagaggcaagagtggcttggtttttaaaattgattttgaaaaagcttacgatcgggtggagtgggacttcttagacctagtctcgtgtaggaagggattcggggaaacatggaggaaatggatcaaaggttgtatctcttctacctcattctcagtttttgtcaacggcacaccaaggggaaagtttgccgggtcacgaggactccgacaaggtgatccactgtctccttttctttttatcctggtggcggatgtgttagggaggatgatgaataaggcagttagttctggcaatgtttctggatttctggtagggaaggaaagagtccatgtcagccaccttcaattcgcagatgatgcattattctttgtcgataacgagcagtcgttatactagttgttgcggttagtagaagcattttgcgctgtatctggactaaaggtaaatatgagtaaaagtcaactgttaggaatatgtacagatgaaagtatcgttgcaaggtttgcaagtagaatcagatgcgaagtgggaagatggccacttctatatttaggtcttcctttggggggttcacctagaaaatggagcttctgagaaccagtactgaacaagtgtgctaaaagactagatggacggaaatgtgcattcttatcgaaagggggtaggttgacgctgattcagtcagttctatcatctctcccattatacttcctatccctatttaaagcacctaagtcagtaattagaacattggagaaaatgatgagagacttcttttgggaaggcaacgaatctacaggtggggaccacttagtggcttgggaggaggtttgcaggcctcgggatgaaggaggtctaggaattgggagattggagttaagaaacaaaagtctgcttatgaagtggttgtggagatttccttcagagcaaaagtcgctgtggcacagggtggtggtaagcagatacggtagagctgataatttctgggattctaagaatggaagtcgtttgtctcccaaaggcccgtggagggatatctcagatctgtatgatgagtatttgggcttggtacaattcaaaattggaagaggagataggattcgattttgggaagacatttggattgacgattctcctttgattagtgtattccctgacttagcagtaatatcaagaggaaggaatgcttctataaaagaaatgatagtggatgaagggttaccaggtggttgggtggagagttggaatttcaagtttagaaggaacttaatggatagagagatgccaagccttatctcattaatgcaaaaggtggaacatgtaaaagtgttgagtattttggaggatagtcgaatctggaaaccggacccatcgggagtattttcttgtaaatcaaccttttcttggttgacatcaaattcattgactgaggacctggtttggacgaagacgttatggaaaagttgcgttccatcaaaagtcaaagtatttggttggctcgtcgcattaggtaaagtgagcgcccatgacaaggtgcaaaaaaggaagcctttcctttatatatctcctggctagtgtgtttgctgtaaaggcagcggagaagatgttgaacatttgtttctggagtgtaattttattcgaggcttatggagacatgtgttagaggagtttgaattggcttgggttatgccaaggtccgtaccacaaataatagcttccaagttaactggcagcaaacgcagaacaaagctttggaaaactgtgatattagcaacaatctgggccgtgtggcttgaaagaaatgccagaatttttgaaggggttgccaaatcgaaagtggatgtgtgggagacagttaaattctggacatctacttgggtctttagaaccaaacactttgaggatttgtccttcttagacttatgcagagaatggaaaacattcttataagcttcctagtatgatcctgtctaaggacttttgttcgatgctaattgtaaccatggttttcctccgccataagtgagg

SEQ ID NO: 30107 - DNA, 1626 bp, Cannabis sativa
  modified_base (447)..(452): a, c, t, g, unknown or other
tggaggcttgaagcggggacgttacagaaattcacacaagttctaaataaatttagtaaattcagagtaatgaaagtaccccacaattcactaatatttattctccttatgaaaataaactatacaatcttcggtgccataaatgtagaggaattcttatttataatatattttttgttgtcattttgaacatgcatatctttatgagtgacatcattttgtaaatcaatatagtaaagacctataaatatatgtcaagttttagaaacttggagcattgataattttaaatcaagtcactattatatgcttattttttagattgctaaatgtgagaacttatcttgtctgtggataagatttgctcacagttattgatttccttaggtttatttgtaaacctagtaagcaattatgaatgaggaataccaatctaaaataatccannnnnngttaataatcacattaactatattagaataaagtcatacaaaataaattgaaaatttattggtagtaaagaagtgtgttttgtttatcttaattgtacaataaaaatctatacattctagatgaggttaacagagtaaattttagaaatttctatcaacattgtagaaatttataaatagtgatgtaataaaattacataattattaatgtatagttttaaggtttaactaaatcatatttttatcaatgtataaacatgcttaaatatgaaatcttattaaacaaaaattacatgtgagctaaatttttaatttaataagattagattaagatgtagattatgatagattttattaaattatttatgaaaacacttaaggtttaatatttctatcttaatgaaatgtgtgaaacatctgattattttctaaatgtattaaaattttatacttttatgataaaactattaaattaaatctacttaatttcttgtgggataaattaagagaattcaatttaatatattatcctaattaattatataaatataataaaatcctcgtgggataaaaatattatatccacataattaattacaattcatgtccattatgtgatcgtgatccacttaatatatatgattttatgtaattaagaatgatgtggctactccctaattatttaaaattatgtggttcactagacaccaaagtataaactgaagatgaaaattttactaaatttaatattgtttgtgggctaaattttaaatttaataaaattagatgaaactgatgatagatttaaataaataattaatttagaaaaaatatgatcttaattaattatataaatataataaaattcctgtgggataaagttattatacctatataattaattataatatgtccattatggtaagttttaattaatatataattttatataattaaagatgatgtgactacttcctaattatttaaaattatatttttcacttagatattaggtattgggctctacaagaaattttgttattaacacaatagacaatcaatcactgagataagtattcctagtgtagtcgtccgaaatcattaaaaatcgtttcagatatgaacatttattccagtttcatgttttcttatgtcaaactacaaaattacttac

SEQ ID NO: 30108 - DNA, 1703 bp, Cannabis sativa
  modified_base (33)..(54): a, c, t, g, unknown or other
attggcaatgggaggagtagcccattcatcttnnnnnnnnnnnnnnnnnnnnnnacattagcaatgtgggactaattttaatagaaattactaaaataactcaaacagtaaattttaaaaataaaaaaaaaaaaaaaaatttatcgaataattttccttttcattactattccgtatactcgattgagtctactccgtgcacagagaaaatcatcagagactattaattatatattcaaaattaaattaaacattacactatattaaccattattcaaaagagttaatttaaaaataaaataaaataaaacagattaatctcccctccatgaactcgcccagtcccacattaaaaaaatttacatccctacttggaagatcacaacaatcttaaaaaaaaaaaagcttagcagataacacaagcattaggatcttcctcaacacttctgacgaaatattgtggttgtggacgtgaaaccatttgagcattctgatgagcaatccatatcttttgaagctcagtcaattcatctttctttggttcttgttttttaggttcttcttttttgggttcttctttcttcttctctgctgctttgggtggtcccactgaaagaatttcagcattacagagcttcctcaacttgcttaccaaactcactggatctatgtcccctgttactgttaatttcatgtctttagaatccatggaaattgaatcaatccctgaaaagaaatgaattttattagatcgatctcatcattatgttttgtgaaacaataaagagttaaaattgaaacttgtcagaattggaacaatagtagcatacctgagtggccagaaactgtcttcataatcttcttcttggttctgtcatcgtgaaaatccaatttcaataccacttgctgctataacaaaacattcccatattagtttgatttgatgaggaaagaaacaaatcataagtgaaattggtgaaagtataagtagtagtagtaactaaccttcatgatgagtatgtaaagttttgcgagatctgagcatgaagtagttgttaataatagaacacttaacagtgttactaagaaattatgagagagagagagagagagagagaggaagttgtttaggggtattgatgctttggtgtaatgaaagggaagtagagatgtttgtatttatgtaggcgtgagtgaatgagttaatgagtcaatgagcacagtagtcgaatggtcaagaatgatagtcatctgagtgggagtgggacctataagactagaccacaagtttgcaaccttcccagaaagtgttacaatacaatgtttttgaattcatttttaaaaatgattattaaatcatttttagaatatttaaattattaaaattatttaaactaataaaaatgtcacatatacaccttgacaatctcaattagtattgggataattgcggcaaaagtccccaaaaacttgaggttgatgctgattagtcctcaacctcaaaaattggcggtgaaaatccctaaagtcgtcatatttgtaagtccgttgatacccaatttaacagacctgttaaatattgacaataatgccatgtgtttaaagattattgggccaactcataattttaattaaaaaataatttaaaattaaaaaaactaaaataaattatttaaaaaataattattatttttttctttttt

SEQ ID NO: 30109 - DNA, 3790 bp, Cannabis sativa
cgtttatcgcttatcaaaaagattcattgtcgttggctaaaaacgaagtcaacagaggtatacacaaaaaaatgatcaaaattattttctaataatcgccataaaattattgtaagatataatcaaaaatggaaaattgtataagtattgctcagccataataatatacttggcaagaacttgcttaaagttttgtctcgctccttaaaaaaagcctggaattcttatagaatttattgacatttgatcttctttaatgtcttaaagatccttcctgcaatgcatattcaataaaatttcatcgaatagaaattcgagtaaaaataactaaatatgagcttaaatattttgtgtgtaaatatatattaaccgataaatcacatgatttattatatcatacagtttatatatctccagaagctaatatgttttacttcacttttataagatacatatacataaaacatggagtcatgcatggatcccaaaaatacaatattatagttaattttttagttcctataatacacatttggtttggtgctgttgagataaaaattttacaaaattttgatttgtatatttaatttccaacccctcgtggacataagaatgtcctaataatgttataatattgaagaacatttttttaaaaaaaggaatataaatatacacaaattacacacactaaaaaatatttttgtgagcaaacacaataatttttatataatatataaaactacaaatatatatatatatatatatatattagtgcaatacaaatctaaataacttctaaatacgaatttgtggacaaaaaagaaaaaagaaagataaattaaagcattttaacaaaaacctacttgaatttagtaggagatggtaatcatgcgaactcttcactcacacatatatactattgtttgaccatgtagaaattccctttctttaatatgtacatatactcttatttttgtaaattttgattctattttattaattatatatgatgattctatgatgggaagattaaaagttttgaaaaaatttattaaaacctttatgtattaatttagattatcaaaggacgtgagtaactccattaagcaattaatatatttgatgacaatacaaataattatttttaattattattaccattttttgtaactatagcattacaatcaaaatgttatatattaatatatagattattattatttatatgttatatttagtacaatctatgaattaatgaagaaatgagaagacaaagctaaagagagtaactccacacatttataaatttttctttaatataagtaaccccacacatttataaatcaaaactgaaaaataactattagtgcaacactttttggaaaaaaaaaaaaacattttaaactatttaaatgatagaaaatttgaaaaattaaaaaaattaggaataggattagaagctcatccataatgccacatcaccttgattaacaacaggattatataagtatatagatagatatagattgtatttttgtcatagaaaataatttattttgattctaaagtaatgtgttcacattaatagaaataccgcttattttaattctagttctcataagtaaaaacaacttttataattccgatgaagagtgaatctgattcttagagcatgtttggttttgtttttttgttttttgttttcaaaatattgtttttagaaatgagaacaaaaaatagtttttgaaatttttgcaacaagtcacgtttggttagtattttttaaaaacaatattgacctaaagtgaattggtttttaaaacaaaaaacaatattttgtaactttgtttcttgaaaactgttttaaaaaactaaagccaaacaagccaaattgttttcaaaaaataattttctatttttaaaaacaaaaaacagttttttaattatgatgtcaaacatgcacttaattattcctattacgtgtaaataatacaccagaagataatatttattttttcaaaaaccaaataataagataatgttaaaaactaaaattaaaaaatatagacatgtaagtgttcacaataaaaagaaagaacctagcaacaacaacttagaaggaacaataaactaggttctcttagcaaacaaattattcaaacaaaaaacaaggagcaatgaacatctgccaccgtataaaggctccctatactaaagatagggtcaaaatagaactaagaatgaactagtgagtgctgtcttcctaaagacaaaaaatgcacaaagcacaacaataaataaagctcttcaaaatactaacaatgaaaaaccaattaaggtatttatagttgagaaaagcgtccaaggccagcttctctgaaatgtacaacattatttggaaatttctgtgatactttttggaaagcgttcacagcaaagaaagttgtcccatataaccttcaagtcattcttaagcatttcacttatgagcttcctatcaacatcttttttctgaatatggaaaacactaaatcagttacgatgtcacttaggctttgacctataatgtatcacaataaaagagttgaacaaaacagaaaacataccattaattctgaaactactcctttcaacattataacaacttcctttgtagcttccctgcctaaagatcgattaacatctttgatcttaagccttagcctttgatttttgtatactttacttcttactcgccataccttaaccaccttaaatttttctccagaaaatgtcattcccataggccatgttagtccacctttaacatctttatctacaacagcagaactaattaaatttttgaggcttcccaagtcatcatcctgtaatatagcatgaagaattgaacaatatataatcagatttaacaataacaagatatttctaaacaagttttgacctattttgttccttcctttatctacttattacttttaggacaagcacaaatgagatttaacaataaagttaccgtcatcaaagagaaaaaaaatatttaaaataatttgattcgaaattaaacaaaaagaacttacagacaaattagttacaagttttttggtgcttaggtccagcctcaggtccagattcttttcaaggcaagatatgtctctgagcatgtgatgtgcataggaatgttcaatctaaagaaaaagatcttccaatgtaagtcacagtactaaagctgatcccataacaaccaaaagaagaaagaactatatgcatattcaataatcggaaaaagcatgagcctcagtagtttataatgaaaattaaatatcatccacctggtttcctattacaaacaaaaaacaaacttgccttgtgtggattcaactttccatcttctagtaccctacatttgcaacacatagacatagagtcatctggttgtgttgcctcacgaaactatagaaacagggacacgtgttagaaatttcatatcaattctaaggtcattttttgcctactactatatataaagtacttttacaaataagaatggaacaaatcaaacagcagtcgggaaaaaaaatgaaaagtacttatagtatgcgcctcaaaaagttaggttgagcaaaaacttacaaatacagtatacacttctttctctagtttaaatttgagtccactctctgaggcaccttcttctaatatgtattctatatatgaatcaagaatatctgtgtaaaatgaagctctataccccctcagtaattcttcagaaagtgcacaccccctaaagaaa

SEQ ID NO: 30110 - DNA, 1226 bp, Cannabis sativa
gagagagagagagagagatggaatcaaaaaatgaaaacctggagaacgagcgaagatttgaggaggatgaccaaagaggtcaagaaatttagcttttaaacggtgaaatcgagcctgagcttcttcgagttgagatccatggccataaacagggtccaaagttgagtagattgggattggaagatcttcgtgtttagccattgattcaattcctcgtaatctttctctttgttatgaatctgaagaaacagaggagaaagaatataacaaacattaacgataatttataattctgtttttatgatacaaatatatatatagtaaatatgcttggttgggggactaattaataaatattatctttttaaattatatttaaagtgagattaggaaaagttgagtgttatagaataatgctttttttttttggcttttacataattgaattgattagattcggataagatgagatgagatggaatcggatataataataataataatattaggaaaatattttataaaaataaataaataaataaaattgcactatattaaattgtaaaatttgtaaaataactattttaaatttacgttttaatgctttaaatttttgttcattgtcaaaaaaaaaaaaatgctttaaatttttgttttgtaaaattttatcgtttataatctttttagtttattttttttttaaaaaaaaaactatattcaatttacactaatgattgtttttggtcgttccatgccaccaaatatggttaatttactaataaaaagtttcatttggattctgttaaaaataaatagaaaaatcatattttttatataatgataagatataaccaattttttcagaaaaaaaaaaaaaaaagaagaacaagtgattacgaaaaacattaggaaaatgaagtagagagggaaatttctttattttttagattaaaaatatatatcttctttatttttttagattaaaatatatatctctcaatttgttgcattcaatttatttttaaagtaaaatatatgaacgcagtgtattgtttcaataagaatgaggaattttaggaccattaatgagatgattcataattttagattgtattcaaaattcaaggggaattttattttgagcattgctattaggcaccagtggtgtctagcaccttctcgacatgtcgcgttgcgattggctagtgtcacgggctcaccttttc

SEQ ID NO: 30111 - DNA, 2141 bp, Cannabis sativa
ccgtctctgattagtggctcagtgaataaaagtctttggtcccgattctgagatttttccttcgtgaatgtctcccagttttgcttagcagatctcggagtttgttgtttctccaaattcattttcatttcgtcctcaacctcctccgcccaactctgagttcgaacgctgccagatctgctcatgttctctgtttcaagattgtcctgtgctcgaaccatctctgcaatctcatttagcccctcagttgaatgaacttcatcaacatcctccgtttcatcctctctctcagcaaaaatctcttcaactggaacacgagtgactggttttcttcctacttttttcttcttcgccatggaaggagaaagcagagggaacgaaaacttttatatttttggacttttatttagagaaaaatgtaaaatttttggcttcttttgttttgttactatattaattgttaatttttgtttaatcagctatctaatgtaattggttcatctatttttttaaactagtttttatgtttcatttattcaatgtaactaatttttgtaagttaaatgatagttttttttttttaagaaactagttgttttatgttttatattatcttttgattgttttaggtagtattgttaactggtttccctatttagttattatttttgttgttttaaataattggctctaacattttaatttttaattcaattaatttaaataattagtttctcagttatagttttaactagttgattattgtaattagtttcagtgtgtcaaatttcaaagtctaacaccaatgacaactctaatgtttaacttcggtgacttttcggtaatgaagacaactctgacgtattttttgataatttttcgatgacgataataatttcggcgaatattctaattatatttttaacttttttttgtgactaatattttattttagtggataatgacttttttaagtagtgtagtgagttaatggttaagtcttggagcttttaaaaagtttgtaactaatttcattttggtattgtaaaatttagagtacaagcatgtaaaatttatatatgaattttggtatctgtaactgttttttttttcattaagataacaactctagcaaatatactctcatatatatattttacttcttttgcgactaatattatattttagtggatagtgaatggatggtctagtattgaagtttttgagtagtttgtaactggtttaaatattagtatattatgttggtattagttttggtaatgggttgatgatcaaatttttaagtttataaaaaacatgtaaaatttatacgagttttggtatttgtatagctagatttttcataaaaaaaaatagttttgattatacggaagaaattgttttattaatttattgtcttaccaaaattatattgttattattttagcttctagatggttttttttttttttttttagataagcttttatagttatagtgtgtgtaaataactaattattttatatgataaaaaaatagaattataattttatagttttttatggcattaatttttatctataatgatttttctcatatcttaagtttttttttaaaaagatgacatatttagtataattaaatttgcatgtcatacatattaaaactttaattatttttttttttcatatttttgtaaatagcccttttattaaacgtattttgggcctaagtggagggccttgggcgtgggtaggggtggacatcatccaatccaattcaattgaaccgaaccgatccaatccaatccaattacaaaaagatatcaaattataattggattggattggatactaaatgttagattctaattggattggatcggtcattggatgtcaatctcaaaatccaatcaaaaatcgatccaatccaattagagttatatatattaaaaaattatttacataataaaaaatataatatatatttattaatttttttttgtatgttgaatttgtaacacttgattgttttctgtattcttaatttttttaatcctctctattgcaccaaatcaattgttctaatcttaagagcttcggggtcagcaatcaaccactcttatctgatcatcgttccgt

SEQ ID NO: 30112 - DNA, 1465 bp, Cannabis sativa
tgtttttgttgaatttgttaaagaatggggtttctgggtgaaaactggatttttttttttgggttttgggttaggtccgattcggtacgatcatacgacgatataggcccgatagttcaactgtgatatatgaagtttgaggttgatgataatggcccaatataaggacgatggtactcctttctttttttttattatgggacaatacgtgtctgatacgggacgataggtatgttcgatatgtatgtccgatatggcacgattggtatgtttttgttgtggacgataggggacgatgggggacgatggttggtttgatgataatatttaggttcttaattatgattttttttctttgaggccgatgggggacgatgataggtccgataataatgtttaggctcttaattatgattttttttcatcgaggttgatgggggacaatggtaggtccgataatatttagtttcttaattatgttttttttccttggaggctgatgggggacgatagtcagcccgatgctttgtagaatatctaacttcaagtttcttgtatttttttttttcagattacaagaccaccatgccttattattccaatttcggacctctacaatcactagttcttctagcattatacataacaaatgctaaaacaattgaacctgtccacagaaaataaataaaattgtaagagaaaagtgttaaaaatatccttaaaagccacaaaatcacatcctatcggacatcaagcacacaaccccataaaaatatcagactgtatcgggccacccatcgatccattatcaatgtcccaaacccaaaaaaaccatcggactatatatcgggcccatcgggccttcatccttgtccttagatcaaacaacccaatcagactagcatctggcccatatcgggccctatcggactatatgataaaatccagaaactagaaaaaaaaatacaatattcacacgcaacaactatttcaatacataaaacagtaaaataacagcaacaacccatagatcaatcatgaaaataatgttctaacctaaatataagaaatattaacaaaaaaaaaaaatacttacccatggttgttcccatatttcttcggtggctcaacaatatattgcttcagtgttggttgaaagtttcaaaccttgaagaggcaaaatgtaagtaaaatgggtcattttagtgtgactttgataaagaaaaaagagagaatcgggaggaggatgaagagaatgaaaagagtgaagagagatagagaggagagtataaggaggggtattatgggaaaaatgagaatgttgatatatatggccaatattaatacatataggttcaggggattaattttaggataatatatgcataaaatattaaattttctttttcaaatatttaattttgcaatcagtgtgacggactcatgaataaattaatttgagggg

SEQ ID NO: 30113 - DNA, 4203 bp, Cannabis sativa
  modified_base (1491)..(1501): a, c, t, g, unknown or other
tataaagctgctgcatcataacattcaaggaattgttagcaagttttaccttaccgtggcttatcttaacctttgggaagcttgttggatccctaaatcctgcaatagtgtggcccatcttgcggctcatggagcgaaccggagtatggcgtttggccatttcgtttctccctctgtttttggttccctacagtcccctattgtagatggccatgacccccctttcacttgtctagtggatggtggtttgctttgttttatttctgttgtttagttttcggctagttcagttagtgtttatttccttagttgtttgtttgttagtttccctggtttgggtgttttgccatgttgggtttctttgttcgtttgtttggttgctctccaggagcctttaatccaaaaaaaaaaaaagtagagttttgaaagaaacttgacttcaatttatgattgtgaaggaaaagacaaaaaataaaataaaattgtaatagattaaacttataaaggtaaaatagtcaacaaatatcacaccaacaagccacttttataatagtaagatatattagaaattttaattcttcgaatgtttgttattaatttgtcaaaaacaaatactttttttttttatatatatttctatataatgaatttctaaaggtgttaaaattttttatatcatctaaaaatataatatattatgttttacgttatttttgatactcttaattctaaaaatactccaatagtataacatccttcaagaattctataattatggtatcacatattattatttaatatattatttattttaattataaatattatcacactatttatttacctttaatttttttaaaagagatagcatcaatgttatatagtggcatcaatataattttctatgatagcatttatttatcaataatgatataatatccttatattttgcaaaataagcaatctacataagcaagcatcttttaaatattaaccattggaaatgctttaaaagaacaattaactaagagcatgcccaaatgatcaaataagtcaatgatgtattcattgcttaaaaaaaaggatggcctatttagttagatctatggttgtccataaaattgttaacacgtttcatacctcgatcgactaattcgggtcaaatgaatttggtgatacaattttttagttcgatcacaattttagaattctcggtaatagttcaaatcaaactaatccatacaattcttttatacatacctaatatatatctttatatattaaaagtgtctatctaacagcaattcttggtttaacgttttgttattttttattccgttaactttaacggagacccgtttcctttaattaataaatagccgtaagatcataattgactcatagaattggcaagctaggttaatttttataagggtaatttgcggcataacctctttaagtggtgaggtttttgcaactaacccccaattnnnnnnnnnnngtggtaaaacctcctaaactcgtgttctgttagcagtttaacatttctatctatttttagctgttaactgccatggtggaatgtccacgagtacacagcgtacacgtggcacaattttattggtccacgtaaataaatatttaaagaaaaataaaaaattaaatattttaaaaataaaaataaataaaattatttttctttaaaaattaaaaaaaaaccctaattctttttcttttcttttctttcttcttcttcttcttcaatcctcacacactcctcctcctcctcctactcctcctcctcctccttcttcttcttcttcttcgtctagcatcaccaccatcaacctcaacaaaaccaccactacccactgcatttattctaaagagttaaaaaaaaaattgaaaatacctttgaaaagagttgagattaaacttaaaggactttgaggatatcgtaggtgctgctggtggtgaatgcaccaccttcctccaaattgaggactttaacgacgctgtcttcgtccaatagtgcgtatctcctagacctaactccgagcctaactggcttgtcactcaaatctagctccgcaccgattgccctagtgaaatccccatttccatcggacaatagaagaacctcatcgttcaccttcaaattctccttccaagccttcaccacgaaggcgtctttcactgaaatgtaggcgatggtgtccacgcctttcgattttagctccattgacttctccacgaattcggggaggtgtttctgctagcaggtcggggtgaaagccccgagaacagcgaagaatacggctttcttgcccttggtgaggtcagcgactgtgacggtctggacttctccagctgcgtctaagtaagagaaggttgattccggaagcttgtcgccgatggagattgtggcggagattgttgaggttgagttggcgatggagaaacggagtgggtttgggaggtggcggttattgagagcgaaggaagtgaaagagagacgagaagaagaagaagaagaaggaggaggaggaggagtgcgtgaggatagaaggagaagaagaaagaaaagaaaagaaaaggaaaaagaattaggtttttttttttaatttttatttttttaatttaaatttttttaattttaaagagaaataattagttttattttttattttttttaaatatttatttacgtggaccaataaaattgtgtaacgtgtacactgtatacacgtggacattccaccataggagttaacagctaaaaatgaatggaaatgttaaactgctaatagaatacgagtttaggaggttttaccatcaaaattttagaattgggggttagttgtaaaaatctaaccacttaaagaggttttgccacaaattacccttttttataattaattaattaattcaaaatttaactaatttttttattaaatatttaaaaatacagaaaaaaagttaaatcctgtttacaaggccttaaaaaatgaaatcaagattttttttattcctaggtatattaattattcattttatacgtttaaaaatttagttcaaatttaatatgcattctaccattattaattttaaaacaataattagaaaaattaaaaaaatttaaattgtttttattttttatttttttttgaatatgaatcaaaattttgaaaaataaacaaattacttttctctccacacttaaaaaaaaccaaaaaagtcaaaataaaaattactaaatgcatttttattttttgtttttaaaattacaaaacaaaaatagttatgaaatacatttttaaataaaaattaaataacaaattattttaattttcattttttagtttagaaacattgaaaaaactttaaagaaactcaccctattttaattaaattaattattaaaatactttttaatagaatacatagtgtattacaaaatacatgaaaaaaatttgaaatatataatcacatattgtaatatttatgagcttagattgtattgtgataaagtcggagttaaattaatgtcgatgtttgatttaaaatttgggtttggattttgagtaggggccaaagtacagaatttgaggcccaagccagagtccaaggtttgaggactaggctaggtgcaaggccgagtctggggttctaaggtccatggtcaaggcctcgacccaaggttagggttgggactaaagtgatcaacattggagcgggatcatcaagatgacactgaaagctaagcacaatatcatcgcctcaggtaggagggacctccaggatgccaaagaggaaaaccacgaactcaccgtgaagctcaagtctctagaagagctacaccagactgacttggagacaacaaccaatatatcactgttgaactcaaggagcttcgtgaattctagaagcaaacttgaaaggaggtcgccaagtctacgaggaggctatactggctccaatcacttgcaaacatttgcgagaaacacttcaaagatggggtgtacatgtgttggaaatctaatatgttcgaaccttgtctccactactttcctgatcttaactcgattttggggaaagaacaaaaagctagaagctgccctggctgagtgaaggggtccccgtttacctccacaagccgattgattaattaaacccctctctatttttttttttttggttttt

SEQ ID NO: 30114 - DNA, 3167 bp, Cannabis sativa
actacaaaaaatattacttttagtgataatgttttattcataagaaatcacttctcactaaaagcagtatatttagatacaagttgttactaattttattttagtcacaataagtattgtgattaaaaatacatttagtaataataaattataattttttataactaattttaactacaaaagaataattatttatgtttaatcacaattttttattttttaatcataaattttattgtgaataaaataatttttttttttataataagccatatattttaagtatcactaatactgaataaaaagtattttcttacttaattgaattaattggttttgttaagttaggaatctagctttttctacattaacccaaacatgagtcaaagcttcatttgccaaataaatctctagtatgggacccccaacttaaagttgttctattatatatacaagtaagtaaggggtgtgcataaatcgatccaatttaataatatcgaccgatctaatcacaagtgatcgccaaatattggatatccaattgtgatcggatcggattgaatgttatttttgaatatccaattagatcgggtcggatgttggatggagtgcctaaaaatccaatacatccaatatccaattaaactaatttgtattttcatttaatttagataagagtaattagattttataatgttatacgtaaaatatatatatgtatacataaaaattaacattaaaatttttctcttttttttcttggatgaatggatccaatctaatccaatatatattggacctaaaatattggatagatctgatccgatccaaaaatactagtctaaaatattgaataaattcaaattaaaccaataaatatatatgaaatacatccaacggataaattcggatgttggattggttggatgactgaaatcaattggatcgaatgggatggtaaaatctaacatctaatatataattggattggatctggataggcctaaaaatattagatgtgatccaatcaacattcctatatacaacacacacaacttggcataatatatacttaataaagatactattaattaatttttctggtctaatttgaatgcttttcataagttaattaataagttgaacaaattttaatttggtcgttagctgcaacgaatatggcaatagggtattgaaatttcaacgcaagtaatattattattataggttttgaataaatgagaggaatgttcttcctcaattggttcatccattttcttttagagaggtaatattatacatgcatgtactttatagtattaattaatcaaatttcataccgaaattccataatgaactccacaaaatctcatttagtcacaataaaacttgtgattaaaagtgaaaacatgactaattataaattatatcattcttatgttgtgactaaaagatccgtggctaaaaatattaatcacaaaaattacaatttgttgtgactaaatgtatttagccacaatacttgttgtgacttaaactaaattagtgataacttgtatctaaatactatatttttaattattaaaagggagatatacaaccgagttcatatgaatttgtcaatgttgttcctttggagccgcaaggacgtatgagacagagggaggttagtgatccatttattataagcatctgattatgatggatcctatttcaatggaaaatttggctgtgctgcaatttctatgagtaaagggtgtgatgactggtcttatggatcctcctttggctgcctgtgacaatgcactagctgtgaaaatggaagctttcttattcggtcttcgttggggttgctgatattggctgggatgaattcaccattgtttcagattccaagatcctggttgatgctcttcgatctaagaagcctccggattggcaactgtcggcagtcttttgttctattttacagttaatgaattctttttctgtttgtgatgttgtttttgttaaaagagatgttcttactcttgttgataaacttgctaagaatcctagacattctcaaagcggtttcttaaactgtaaaagggagggatttacccttgtgaatcctattttcttttggagttaatctatcccgaattgaggttctttttctaaaaaaaaagttacaagtaatattttttgtgactaaaatttatatttagtcacaaacaaattatgttgtgactaaaaattatcactaaaagtagcagttttttataatgtaggcaaatccaactatctagtttcaaaactactaggggtccaaaaaaatattactccttttaaaattacacaactttttttttattaattttagaaataccacatcatttaataaggacctaaaaaaatttttgcctaaggcccactaaaatttagaaagtattattatatgtagagtttgtgcaagattcttctttcgtttcttgtaagaatttgtaattagttagactaatacttcattcttgatgttgatgctactacaagaaacgtcacttttatcagtacaattcgctactacgttggcaaaagtaacttttaccagtgcatttcgcaaactgcactggcaaaaaggtcaaagttttactagtgcacatttgcagtaaatctaacttataccaacgcatttatgtactagaaaaaattatttttgccagcaattttcattttgtgctggtaaaagttctagtaacgttgatttgccaacacatcaaaagtaaattctattttaccagcgcaatactaaacttttgccagcacaaaaatgtgctgaaaaaagtgataatttcttgtagtgtgagttgtgccaagtaattgagagtacatttcataataataataataaaaaagcaatgcatgcattttattactatctttgaatcttacttccctctctttcaatattacttgtgttaaaattttgtaattctaaatggaaaaaccaagcgtagtggaggcaagaaaacaaacatatatatgtatatatatttttaaagattataattattatatggaggcacaaagatatattccaattaataaaattacatggaaagtaggagtgtggataaatcgatccaaatgacaactgaccatcaaatattgaatattcaattatg

SEQ ID NO: 30115 - DNA, 4058 bp, Cannabis sativa
catattatgctggtgcatcataggttttcccttaaatatacaatcatgcaaattaaaaagccaatgaaattgcccaataccagaacctagctttgaatatttcattcaataagctaaacaagagaaataataatgaagagatagtaaactgaaccagctccaaacaaataaatacaacagaaccatagcaaaggaaagactgtcacctctgtaaatttgcatcctacgtcacgttcaataaacctgacagccctgttctggtcatgcgtgtaaattagaatagcagcccccttctttcctgcacgacctgttcggcctgatcgatgaacaaatatttctgaattgtttggaagctcgtaatgtattacctggaacagagacatgaaaaacaaaattatcaagagagagagagagagagagagggagagcactttaaggatattacacataaccaccacacctttgttttcaatcaatagcacacttgatgcttaattgagactaagagtctcaatagcaagagatgcaaggtttgtacttggtctcatcccaattttccaaccccctcaccacatatttcaatgagaattgcttaagggcaccactggtgcctagcactctccttagtgtcataccgctattggtgtaattaaatagcaggtcccatataacttaagaaaataaattttaggaaatatcgctaactaatcgtaaggtgacacctatggaaggtgctgagcaccactggtacccaatagcaatgctttatttcaatgcatgtatatacaacatttaacaaaatagctcgtccactaaggtatcataaagctattgatatcagctggacttttccttttaaaaaagaattttacaaataattagataacaattcatttcaaaaaaatttgcacatacttacatagaagaaataaacttaccagatcaacgtttggtatatctagtccacgagaagcaacatcggtggcaactagaatattgaaattcccatctcggaagcctgcgagtgtcctctccctctgactttgagagatatcaccatgcaaagcctcacatctatggcttttcgccatggcatatgccaagcgatcagcgtcacgttttgtttgagtgaatacaatacacttacctccttttgcatgttcctaataaattgagaataacagaaagtaataaggcacagtaattctagtatttctcaggaatttgcaggggcaaagaagattgacaaaatatgaacactcaatatgaatatgaaatgaagtttaccgtaattagtggtccaataattgaaggttttccatgcatatctgatgcaattgaaaacaaagaaataccatctgccaatttctgatcggagtctccaacctacagcacaagaaacttgataagcttacaactcggaagcactcacaaatttgctatcttcatatttctataaattagtttgatttacatttgacgagagcgtaatacacttacaagatcaatattcacaggggttttcaaataattttgagtaagctttctaatccatgatggcatagttgcagagaacatcatgctctgtcttttcttgggcaaactctctaagattctctctacatcctcctgaaatcccacttgaagcatctgatcagcttcatcaataacaagaaactgaacttcagttagatttagggcaccccttttgagaagatcaataacacgaccaggtgttccgacagctatatctacaccatactgaagctgcctcatttgggctgaaataggtgtacccccgtagacacaaattgtatccaaactgggggcagactcttggaactccctctcaacttgccgtgcaagttctcttgttggagccaaaaccaaagccaaaggattccttccacgcctgtagaattaaattattaacaaaaggaataaaactgcttagcacaaatttgaagtctcttcaaaaaaaaaataatgaggttaggtacgatcatataagtggataacaaattgaaatgtatgacacatacccatgcttagcattgaactgaactatcttgtccataatagggatgccaaaagcaagagttttcccagttcccgttctagctcggccaatcatatcacgcccttccattgctggttcaagtacagctctctatccaaaaataaaacccaaacaaaatgagtttaggatttcagaaacacccaaagtggggaaaagctttgtttatcatcatgttttcaacgatcaatccaaatttgaaaataaaacgacaaatggttacctgtatagggaacaacttcaaaatacccctcttagccaaagcagaaacaatctcctgtgcaattccaagcttcgaaatttcaagcccatcatcatttccactggctttggccgaatcttcgtacgattccacatcgacggcgaactcagcctgcaaagccactgaggcacgataatccaatctcccagatttcgcgtggaagtttctaacatggaaaccgtatgagctctccctttgaagcaccccggtattggaaaaggacttgacctcaccaccgaaaccaccatttccggacacaacagtatcggccactgacaaggcggtggcagcgattgagtggttgcgatggcgtagcagggtctcagctgctgccagactccgtctacgtaggacgatactcaacatcttcgctccaatttagggttagggttcgaagagaaagagcccctaattcttgagagagagacttagggttttagagggaagtaagggttttgggatacagaggcggacgagtatgctaagtcctcggagaatagggtgagaagggtttaaggcccttaagaagatatttaggtccggatcctctgtggtcgaccacttctgcttaatgttacaactcacgagttgttttttttgtcattaatatatatgtaaaatttatgacaacaaactcaactacaaccaagcattgtgaatcacgatattgcataattatgcttgcttgtgtcaaaatgtaacaatcatcaatgtctaacacctaataacaagggggtaaaatgtttaaactatgagtgaactatacccacatatgagattctttctcttttccagaaaggatggtcataaacctttcttccttccttcattgttttctttccatcattcattttcgttttgtttctctaccttgattcgagtcttccatcttgttctctatgtgtgagtcttcagttccccttgtcttaactgtttgtttggtgtcttgttgttttgtttatggctggttttgtttaccggtttgtgtgtgtgttgttagttgggattctccttgtctcctgtgttgttgtgtctgtgtttgtggggttgtttggatttattctgtctcttgttgtcagttgttatggactcagttattaccaccaactcctctcttaaaggcaagtgctttacttgcattgaagcctctatcaccttatccccttgtgatgcttctcttaaaacactttctctgtgcttatatggaagggtgattgctcctatgactgtggatgttgccacagtttctgagtttgtggcaaaaagttggaacaaagtggtgtatgtggtagctttatcagatgttcccttacacaccaactgtttcaaatttgggttcgaaagtgctaatgattgtagttgggctctcgagaatggaccctagtgcattcgtggatagtctctctttcttcaggcgtggactccttgcacagtcggtcctgtttcctttgatcgttgcaaggtgtggatggaaatccataacctcccgcacgattacttctcagtgtctaatggcttacccttgggtggacttgcgggtaaggttctggctattgagttggaggaggataaaccggcgacatggaacttttacctcagagtgcagattgagtttgaagttgctaagccccttgtttcaaggtgcttcttttatttgagctcaggagtcaaacgttggctacagtttaaattcgaaaaaaatggaattttttgctacaa

SEQ ID NO: 30116 - DNA, 1432 bp, Cannabis sativa
aaaatttgaaagatacatttatcattatttttattagttttgacttaatatttattcaagccctcactcaactaaatttctggcttcgtcactggtgatgggcacacttttgggaattgcccttcaaatctagcttcagtttgttatgtgggtaaccaaaatttcaaccggaacaacaatccgtactcaaactcctataatccagcatggatgcatcattcgaatttttcatggggaggttaaggagcaagttcaagtggagcacaagcacaaggaaaataaccatttccaccaggattttctcaacaaccaagacctcaacaacgacaccaacctcaaagctctcaaacaagttccttaaagagtttaatgagagactatatcaccaagaatgatgctatgattcaaagccaggaaacctctcttcggaatcttgaaattcaattggggaaattggccaatgatttgaagaatagaccacaagacactttgccgagtgacagcgaaatcccaagaagagatggcaaagagcattgcatagcggtaaccttgagaagtgaaagaattctggagtcaaatttggcggcaacaaagggcagcaaggagccctcttcaatctaaaaaaaggggggaaacaaaaaaaaaaaagcccagcgatttcaactgttgaaattcccccagtagttacagcatccgatcaacattctgctacagaatagcctttgcaaaagccacctccaccatttcctcaacgattcaagaagtagaaagatgatggtcaattccaacgatttcttgatgttgtaaagtagctccacatcaatataccgttagtggaagcttaggagaaaatgtcaacctatgtaaagtttttgaaggacattttgacaaagaaaaggagggttggtgagtttgaaactattgctttgactaagggttgtagtgctatgttgaagagtaaaattccacctaaattgaaagatccaggtagctttacaattccaatttctattgcgggtcgagatgttggacgagctctttgtgatttgggagctagtattaatctcatgcccatgtctatttttaggaagttgggaattggagaagcaaggccaaccaccgtcactttgcaattagcggatcgttcctgtaacgccctgtccaacaaagacgccatgtgtgtgcaaattaataaaattcttatatagatactatataatcataccaaaagtgtggttaattaaaatttgataattaaaaatttgacatataaactatatgataaaatataagtggtattaaccatacggtccccctattttcaaaatattcaaaaactggtttaatagtgtttttacaacataaactttgtactcccaaaatactttcaaaatagagcatcctgattattgggccgatacactgcggctga

SEQ ID NO: 30117 - DNA, 1875 bp, Cannabis sativa
tctcaccattgtaacattcaaagaaagtcatagctataaattacaaggcaaaagcatgtaatctacatagtattatctctaggattaatacaactaacaagagagtaggccactacccaccaaataagggggtcgaatctctatagatcgttgtgtcaattttatcatttgcttttacactttacacgtggtgattatcaataataattatataaggctatactgttagttgaccaaatccaaggttaatattttggtactttcactgagagcattgtttgtccttctgatcaatcatcatgattgtaactaggagaaccactacatccacttctcgggtcttcctcaagatcctatgatggctaatcccgatgttcgtgttcctcccaccacgaaaggtcctactaatctgactaacaccgtcaatcctgccaattttgcaaacccaacaaattcaaccaataccactaatcctattgatcctactaaccaagtgaatcttaatgataagcctttgccgcccaggacagatccaccaacaacacctcgaacaaaagatcttgtcaacacgaaacagcctccacggagcacaactgggactgttccccaatattatgcaggagaaataggaccaggaattggcgaaccagctattggcgaacctcatgtggacctaggagaggatattgagctggccaggtttagagaagttgtaggccaggtcactcaaatagaagaaccgcgcattgttggttgtgatgctttcgcccaacagaaatgtgaattcttaagatggatggatgactaagagaccatcctccgggcccattaggcagagctgaaccgccgtaacatggaagccagtgacctgattataaggtggttcaatgagagaactgtcggaaggagccatgattttataagagaacccttacaaggaaggctcatcgacaggtcaagtagggtctagaggcaggtagacattggacaaactgtccaactaggtccctcgagcacgtggacaaacctttccctgcctgaagacggtcatatcttgccaaatagatcatacaacatgaatagccaatccctaacaccagtatgtgttgggggacaaccaaacattcctagagtagaggcatcaccaatagaccagtctttggcccaaccagcatagtgatgctcctcccagaatatttgagaacatgtcgttctaaggcctatttttgacatactagatcctgggataagtgaaaacgcataggaccacaataattcgaggagcgagatcccaagtgactttgttccaccactgaacaataatttcaagtaggtggatccaccgaatcgtcggccaggagaatctggccagtttggccggccaatggagagtaaccagcctaggactggccggccatatccaactgcccagcttagagttggtcgtccaaaaccagctacctagctaagggctgaccaaccaaggacaattgtttagcaaagggctggccggccaagggcatcagcttggccaagaaaggccattcgaacaagtgtccaccgcatcatatctatttgtacaagtacagttggattaaattagggacatgttaaaaggcctctctagcccaaaattatcagatttagaactagaatatgatgtttattaatttgataaatgtatgtatatatataaatatatttgccacccttatgatcctatgcaattttttctaaacaaaaaagaaattcttaaagtaacgaaagcaaagccaatatatataataaaaataaaataagttttctttggaaacctaaaagcatgtttggtattgttttctgtttttttgttttaaaaaattgtttttagaaatg

SEQ ID NO: 30118 - DNA, 1074 bp, Cannabis sativa
gcccattaccatcaaccaaacgggccctaagatcccatgttggaggaatgactcccaatgagtaaaaatcctatgcataggcactagaccatcatgatgaagtatgggaagtaactcagttatccacacaaaggcctaggctcatggaccatcccatcaccttcaccgaagaagacaccaaaagtgtgcattttcctcatcatgatcagttggtcattgaatcacccatagaaaataaggtggtggcccgcatctttattgatagcgggagctcattgaatatatttttcaaaaatgcattctttgccatcggcctcacagatcaagaattatcccctagtggctcgcaacttacgaggtttaatggagtttctttgatccccatgggaaaagtgtgatttcccatcactctgtgtccggatacccctcagggcactttcatgtacaacacttttgttatttttaactgccggactgcctacaacaccatcctagaacagttagcgttggtggattttggggttgtgacctcgatccgacacttgtgcctcaaatttccaacctaatgtgcaggagtaggaaccatttgtggggactagaaagaggctagagaatgttataatgtagctacaaagttgttggtccttgtagtcaataggatgagctagatccatgtataggggacgagaaagtattgaagcctatggaagaaactgaagagatttaaatttgtgatcaagacccgactaaagttatccgcgttaggaaaagccttgatcccgaatgtagagaagaaatcataagaaccctcaaggagtccctagatgtcttagcatggtgtcacgaagatatgattgggattgaccggaataaaatttgtcatttgttgaatgtgaacaaagatatgcatgcggtgcaacataattgatgtcccttcgaccccataaaagagaaggcattaaagaaataggtggacaagacattagcaaatattttcatccgcaatgtgtactactgtaacgccctaatctataaggacgccacgtgtgtgattttataaactagtttaatact

SEQ ID NO: 30119 - DNA, 3001 bp, Cannabis sativa
caatcgtagctgtacaacaacaaaaatccaatcgtattttattttatttttctgttatatagccacactttatatagaataggtatatatttttgaaaagaaacttacaaataattcagacacttaaatttctgttaaatctcattaaaaaatttaataattaataaaaaaaataattcagacaattaaatttcagttaaatctcattaaaaaatttaataattaattaaaatattctcgtcaaaaaatttaaagagtaaagacgcgagtgagtgtgtgttgcatgaatttttgtcattttgaaaaatcaaataatacgccttctaaaaaataaataaataaataaataaaatcaacgatatggttgccttagcaacttatatatgttttagttggttaattggttataatatattataattaattttatgttttaaagggtatgattccaattagagcattgttattaagcatgcttggtaccttctcgacatgtcgcgttctagcgatactccttaaaaactattatattaaattatatgggtctcaatacttaggtggaccagtagcgatattgacacataggaagatgctaggcaccactggtgccctttagcatttctcttccaattatcatcacagatcatatatatatgtatatatatatatatgaagaaatttgtccccctctaggatataataaataaaagaaagataagagagtactattaattaaacaataatataaaatccctcttaagaatttcaactacttgtagaaaaaataattgtttatttattttcaatttgtagaaaagggtagcttgataggtctcatcaccttatggagatggaaattatttttcattataatttgatctacaagtggggatccttttatattgataaattaggttgcaataattttagaagcaaattctaaagggaaaaaaacggtatggaggcatgtcaaaaacatccatttagttggagcgagttggagctccgacccgacggatcccttctgatccgaaacatttggatacttattggattttggattagattcgctccgctccgtctaatttttttctggatcggatctgatagagctgaacatttagacccgcaaacccgcaaacccggccacccgccccgacccgctaccaaaaaaagccgaaactttgaaaacccgtgtgttcgggttgggtccaacccgaaaatactccacatgggttcgggttcaggttttaaagttaacccgaaacccaaaaattaggcacatattttcgtgctacaaaggaagaaggtacaattttttaattattataaaataaaaaactgtaagagtcactcatgcacctgtcacttataaaaagtaggccatatctctcatccacgtgggtattttactattttttattagatatgtctattcaagtgggaaacaagcttcagtttgttttatttttaatttttttattttacttttatcaaaataaaaataaaaatgttattatttgtattttccatcccacaaccgaacttttttattttattttatttttgtttatagtgcatgctccacaaatttaaacttcaaactgtacactactgattttcttatgcaaatattaaatcgggtgttaatctgaacccgaccacaacaaacccgccatacccgacccgaaacctgccaaactcgaccacccaaaaatcgggttcggttacacattttagacacctgaaatctgaaaacccgaacccgaccatccaaaaacccgaaaattcgacccgtgtgcagccctaggatctgatccgacccgagtaaatttgtttttttaaaaaaaaaaaacttaagtcaagactcggatcccttaggacctggacttggacccgaacccaaactcgaacccagacccaaaccgggacccggacccaaacccagacccgaatcctgacccagaaacagactcagaaccgaacccggacccgggactgggaccccggacccaaactcggacctggacccaagacccagacccggacccaaacccaaaccgggacccggacccggacctgaacccaaactgggatcgtgacccgaacctaggacccagaccccaaaacccagactggggatccgaacccgatccaaacccggaccgggacctaaacctagatccggactgagacccgaactcggacccagactcggacccgaacccgaacccagacccgggacctgaacccacacccggacccgaacctggacctggacccagatctttactcaatatattaatgcatgtcaataccaaacatagtattgtatttaataataatacaaaattaaaatggatataaaattataagttaatatgaaaatttagtaaaaaaaaaatagtttggtcggatctgatccgatccgagtatctgatctagcggggcgggacagatccttacatgatttggatcaggttggatcataatcagataagatccgacctaacccattgacactcctgaccggggtgcagtatggtgatttaataagggtgttttgtagaagtagaaattaatggaaagaagaagagaagaaaatgtgaaaataccctaagctttgaatttatattattattttcattattcaaaaacataaaatgggggctaaaaaatttcactctaatgttatagtcgttctacatcatcatttatatcgaccttgtcccgtaattttaattagtaatagaaaagctattgatttcgattattattatattattatatggaatcatgcatgcatgtttattagatttctctttttttttttgaataaaaataatctttattagacagaaacatccgctaatacaaagacctaaagagcaaagggaacatcgctctcagtaaaataacgacctgaccaataacaagcaccacgtgtcatacagtgcgcggctttgttagcagaccatttaacaagactaatagaaacatt

SEQ ID NO: 30120 - DNA, 4390 bp, Cannabis sativa
cactggactaaatgtctccttgaaatcaattccaggggtttgagagtacccttttgcaacaaggcatgacttgtatttgtctagtgacccatctgcattgagtttaattctatgaacccatttgttgcctactaatgtcatggagggatggtatgggaccaaagtcgaagtattattcttgcctaaggcatggttttcagtttgcattggtgcaaaccactttgggtctgcaagagcatgctttaggtttgctggttctttaggcaatagggattcggtcgggtaaagggtaggaggtggctggcaagataagcttttggcttagatattccagacttggatcgtgtttgcattgagtgagtattactgctgctggtaggatttgaggcagtgtttaaagatggttcattggaaataataggtgtgggatgtatttgattggaaggcattgagtgaatgcaatccaaggcattaatttctaatgtaagacaagaggtgtgctggtgtgagggaggtacagtaggaaaaataagaggaacaactggagggttcatctggatattccctgatgttgcaggcataccagtaacagcagctggtgcatgttgcacaccagaatttggtgtattttgtacctcaaaaaatgtggaaatggaattagtaggcagtataggtgttgaaaatgttgcagtaggcatagatgagttatgagaaggatgtacctgatgtgaaattgcagatggaaggccaggaaattcctcctcattaaattcaacatttcgagctacataaagtctgccacttttatgttgacaaagatatcccttgtgaaccagagagtagccaaggaaaatgcatttatcagacctgaagttcaacttatgagcattatatggtctgagataaggaaaacatgcacaaccaaacggtttgaggaatgtataatcaggtgctttatgaaatgagcactcaaatggagatatgtctcctatgacagaagggggcagtcaattaatcacatatgtggctgtctgaaaagcattccaccagtaagacaagtcaagtttagcttgagcaagtaatgtcaacccagtttcaatgatgtggcgatgctttctttcagcacgcccattttgttcatgatcatatgggcaagagtgttgaaagtgaaccccatgttggtttagaaatttggccaaggacctatattcacctccccaatcagattggacacttttaattggaaaattaaattgttttcaacaagtattttgaactgaagaaaagtaggataggcttgagaatttagggtaagaggaaagatccatgtatacctactatagtcatctaggaaatggatatagtacctatacccttctttggatggtatgtgagagggaccccataagtccgtgtgtaccaattctaatggttgggatgctctagactcagagagagagtaaggtaacctatgactctttccttgtttgcaagcctcacaaaattgtaaggctttcaaatttggtggtatatgtaactggttgaggatcttggcaagggttcttggggcagggtgcccaagtttcatatgccacaaatttacattagaattttgtaaagtaaaggcctgaacaggaagattggaacatgaaaaattactttctttattgatagaagagttattacagagggttatagctgatgtagcagctatattattacaattggattcttattctgatctagagctaatagcaggtgctattggaggcctaggtgcagatgtagcaacatgacattgaagattgacttctggtgtgacaaatgatcgatgagacaatgtgtataggccgtttttaaccctccccttgagcaaaatagtccctgtgatcttgtccttgacaaaacaacaggtagaatgaaattcaagaaagacatggttatctttagtgagttgaagaacactgacaagatttttggtaatatgagggacttttaaaacagattgtaattttaaaggaagactagaggagggtaaagaagtgttaccaacatgggaaatggcaagtttcttgccattgcctacagtgagagcatcgggtcccaagtatggcatttcagaatccaaatgttccattccttgtgcaacatggttagtagccccggtatcagcataccaatcataatcatcaaaaactcaagtagagtgttggatgagtaagcttgaggattttcatgttcttcaatttctacagaaaagccttcgagtctcccatctgaggagtgacagaattcttgtcggatatgtaatgacaaacggctgctgtgtgtccaggtttgtgacacacttgacaaagcagtcttggaattgaaggagtgccacttctttgatttcttgcagggactcggttcatgttaccatacgatcctcttagctgggaattatagaaccgatgaggggcaccagaagtatttcgttgattgttaatgctgagattagcagtgatctttgaggaaagataattcacattaaagtgcctttcaatcctgctctcatgggttagtaataacgactgaattgattcaaaggaaaggttatctacaaggcttgtaacatgaactactacaggatcatattcaggtcccaaaccattgagtaagtgcataatcaaatcactttcatccatcggatggccagcagtggataaagaatcagctaacaacttaactttatcatagtaatcagatatagagagattacccttttggattgttgataactgagacttgatttgaagaagacgagccttggactgacttgaaaatctttgagcaagggcacgccagacatcaaaagacgattgatgttgcgctagggaaccaagaatggtttctgtcattgaggagcggagccaactaagaaggagttgatcctttcgtttacatgccgtgaattctgggttaatttcttcgttgatgaggcgttgtacaggagccacaccattgaggagtatatcatcaagtccatgcccgatgaccgtgggaatcacctgagatttccacgcaaggtagttcgtgcgatcgagacgaaaaataagagacaaattgagtgaattttggaacggattccattgatgcagagttgcaggtggtggtggagtggtagcggaaggtgttgctgaagtgtgctcagggtgtcgaggatccatagatggcgcaagtcaagggcttcctgataccatgaaagagatgcttatcaatacaattcctaactggtaacaatatagaattggacacaaagaattgtaaaagctctgaaatctttatgagctgaacctttcatttatatagagaaacattacaaagaaaagggctgataacagaaacataacaaactctgttaagacagagtacaagtggataaaaactaacaacctgtacaactgtaagaaataacagaatacaatgaattaaaaaagtttgttatttatcatgatatatgacatatatactaaattttaaggtgtcaagcaccacaaaaaatgatatatcgctattgatataatttaatattgacttccaaatattttaatttaataaatatataaaaaattactaattactgacaaagtatcacataattgatgtagtgtttagcatttaaactatctattataggggtgttcataaaatagtcaatccaatccaatccggttctggctaaattaaggattgacaaagctgtgttggagttaaatagcttgtgtaagaatatcgaaggaggttttggggataattcatctggccctatagctgctgaaaaccggtctccagactttggcctgcgtggggaggaggttcgacatgtcatctttactgatgtgtcctggtctaatggagagggtggtgttgctgcaatttgcgttgatagaatggctgggaactggttcgttaatgctcggaactctcctgcgcaatctgccttagaagctgaactcaaagccattcttttggctataacctgggcagtagaaaaaagttggaagcaagtccattttttgtcggattctttgattgttgtgaaggcacttgcagtcaatggaaggcctccggattggaagacatctagtacttatttttctattgttaacatgtcaagaaaacttttggtttgtgatttcttttttattaaccgtagctttaactttttggtggatggtgtggttaaaaacgctattctctagcgatcaagctattttgtatcaaggggagggaattccttctatgattcccatctacttttctagttaatcgaacaagatgttctttcaaaaaaaaatccaatctgcacgatccaatccaatccaatctgcacttgtgcggattggat

SEQ ID NO: 30121 - DNA, 2197 bp, Cannabis sativa
aatggtaaaaatttatactaattggagaaaaaaatgggagaaaatatatatttttttcatttttttttccattcccgacggtttaaaaccaacgcctatagtatagggcacagttataaaccatctcctatacccaattataggcgacgattttaaaccgtcgggaaactcacattagcgacggttttgaatcgtcgcctattatgcccgttttacgacggttataaaaaccgacgggattactttaaacgactatttaaaaacgtcgggaaaacctatttttgtagttaatgataaatatttttaattttagtagtatatacctctatttttagaagtagccaaaatatatctcaaattatataacacaaaaatatagtatttttatgaaaaagttactaattagtttgttttcaacatcataagtaagagtaacgaaaaagttattttttagtcttgacaatgcaaaaaatgaaaagtaatatttcatgattgatttcattttaaatagagatgcacattttttttatggggataggccttgtagttagagacctacccttattctctgtataaatgggaaaatggggcagggacatggacaatttttaatccttgaatattaaacggggcggagacgggatgacactctctgccccgacgaggacccgtttactttattaattatatttttattaatattttatattttataataggtatatgtaatttcttagtatactatagtgtcatttttgtaatttattaagttgtgtttttatataataattagtatattgaataataaataatatataatattttaatttttatgtaatttaataattttatatgtttaaatttttaaaataaactttatttttatattgggattccccgctcggtccacaataaggaataagtagggatgggatggaaggactccccgtaaattttccgtcccgtgtgcattcctaattcaaacatattaatttagaattaggacatttttttgtgacgtggatagaatattattgtaattaagatttgttaggttattttcataattaattagtattttaagtatattattaaaagaaaaaaaatacattgattagttcatcgtaggttaccattttgttattaggttaatgttgtcatcatcaaccccatatgcttttaaattatacaaattaaaaaccatttgtatttttttacggaacgatatagcactgcgagacaaaaaaaaaaaatctatattgaaacggaaggataacccagtactatatataaatataccaataagtgcatatatctgttatacgtatctaattggaaactgtaattaaattgagcaaacatgagttaatttctttctcagatcaatttaataaaaataatcattgatcatcgagcttacaaaaacaatgaaagaactaaaaaattgtagtttcacaccagcctatacagagacaatacttaacctctatatcttacacacgcataattaacatatatactaaacccaaaatttgaaagtttatcaaagagagagaaatcatcataatcaattctcgatctatacttctacagcatgctttaattaaaccatactacctccatggccacctccgccgaaaggatctccgccacctccgtgatgatgagggtcatgaggagctccgccactatttccaccgcctaatccgagccaagtatggcgtcgtcgcctacagaacaaagtcaaagcaacaagaagaatggccaccgaaagaaaaacaacaaggaatatttttgcagtctccatatttttctactgatgataaagttataacaaacccaataatatttgattcactaaattacttatcttataacctctcctagctattttatttatattatatataatgggttgtgaacttgtcaaatcaaagactcaaaacgttctaggatacatatatatggtgggaaacctgtacgtaattacgtattggttattattacgcaagtaataataataattaaaaataatgttgccgtaatacgacaaaagataaagctatgtatataccaatttgctgccttttttttcacatgtgatgttgaatatatcatttaatataatttgtttctattattacgtgtacgtattatatgttacaaacgttaggaattgatgttacgtgacccttag

SEQ ID NO: 30122 - DNA, 1490 bp, Cannabis sativa
ataccccctatacttagtacattttatgaaataaattgactaagtataaatacatgtgagtaatattgatagtaatactttaaactttctctattctaagctctttcaatggttgtaccgtcgaaatcgaataattgataagtcacattaccgatttttttagcaattagatatggcccttcccaattattgtcgaatacaccatgtgctgaattacgcgtattaggcataactttatgcaacactaaatttcctactcacatgtttctttctttagcctttgaattgaaatagcgagatgttcgctgttgacaggctacatttttcaaatgagcttgatggcgtttttcctccagaaaatcaagttgtagcaactaattttttgtattgttgtcgatattgaagatgtcttttctcaaagatcctgctccaacttcaaccggtaccatggctttgcacccataggaaagtgtgaagggggtttcaccggtcgttgagcgaggagttttattatatgactataaaacttgtggaagttcctctgaacacatacctttcttttcttcgagcttaccttctatggtatgcttgatgattttgtcgactgcttcagtttgtccattactttgaggatatttgactgctaaaaaagctttttaaattcccaagtcatcacatagttgatgcatctccttacaatcaaattgcttaccattgttagaaattagtttataagggatgccaaacctatagatgatagcactatagacaaactcgcataattttgaggccattatggttgctagaggcttagcttcagcccactttgtgaagtattccactgcaactacgacatactttactcctctttttccttttggcaattcaccaattaaatctatgccccaaactgcaaatggccaaggactagtgatagagtttaattggctaggtggcctatttacataggtcgctattcactggtacttgtcgtatttcttggcaaagctagttgcatctgcttgcgatgtcggccagtaatatcctcgccttataatttttaaagcaagggaattacctccggcgtggttgccgcatatcctaccatgcacttcgtggagtataaagtagcattcatttccatcgatgcacttaagtacagttgataaaaacttctgcgatatagcttgtcgtcataaatgacatatcaggcagctcgatatcgcagttttttagctttggtcttatcatcggggagcactcccgttgtgaagtagttaacgattggggtcatccaggtgaccttcttgatcgtatcgacctccatcacctcttcttgataaatagttggatgggttaagacatcaacagtaattacatctagaaattttgcttctcttgtcgaggccaatcggaccaaagcatctgcatgagaatgttggaaattattttacaaggatcttagatctgctcacaagtatgttgattaa

SEQ ID NO: 30123 - DNA, 2062 bp, Cannabis sativa
  modified_base (292)..(299): a, c, t, g, unknown or other
  modified_base (421)..(421): a, c, t, g, unknown or other
tatgagactcatcataaaccgtccaagaaaatgttcaggatttttcttcaataataaaacacgttaaccacttatgtgaaacaataataataataatatgggaatacacaatttttaatgatgttgtttatcctggaaccaaaatagtatttttgttaccttagactatctcaaatgggagatgtaaaaattgtgctatatttgacacaaaaaataattttgtggtaaatttacaccaaatttaagttttgtgctccaatagacaattgcaaaattttgatgtaaaatttannnnnnnnttaatgttttattaaaaaaaaaaaatctaataactttataatcaattttattataattttaatatgtaagacaataaaaaaataatataaatgttttataatttaatgtgatagttaaatanactaataaaataataaaaatgacataaatgtaaatgaaaaagtactgcatttattgtcgtgtaaattttacaccatagcaaatattgtgccaactttggcataaaatttgatatgtgccaaatttacatcactttttggcacaccattggagcacattttttattaaatgagctatattttagcttttcactacttatttacaatttcattggagatgctcttagatgctaaatcagttcaaaattacacattttcaccaattttgttaaatttgggtaaacatatttatttagcgaaatttgtgaaaatagaccattgtaaattgattcactaaaacaagatatcaaatgctaagttggttcaaagactaacaaaatgatataatcccttaaaatgtcatcagctgactcttcaaactttataaatgaatactaaatacaaggcctacaaattcaggtaactgaaattttaaattagaaccgtttcagagataatttaaatagttaagaaccagagtttgaagatagtgtgattagaaaagagggaagtaccttgtaaatccaagtagagttggacaagtttacagtcccattgttgaatcccctaatctcaacgtgagttggtcctgcgccaacccattcatagaaagatcctgcattctacagaatcaaaaacagcaaagaggacttcaaaaggcagagcattaaacacattgttgctaaatggggtttaccaaaacataattaaataatttagtactatttatattgagcattgagcactctcaacatcttctatactttatccttcaaaatacatcatcaaaactccactttctttattttacctcaaacttttacgttaaatcatacaccagcttcttaaaacatcaccaaaaccactttcttcaattttttaatatatattcgttcaaatatataacattaattaatttaggtcatttgatgtagtgtgtttttaattagtttctttaaaaatttaactcaatgaattgaggggacaggaatcgggatttagctcaacgaattgagaggacaggaacctgctcgtgacagcaaaccagtccagttataggacatcattgttttttaaaacaccagagaccacagtgcccaaacagtactcctttatctgctggcttacagactcagaaattagggtcaagtacgaaaccgtctctgtgttttgctgtgatgagaatgacccaatagactacaagaacagagagctacaggtttggatattttgcttaggggaagacctgcttgagaaagcaactaccatggtggaatgcaattctttttttttcccttctttttaagatgaattacttaactacttgttatatggtgaatctcaatattaaaaaatagactagttcacaagatagtacatacaaataaataaataaaaacaagacagttcatcatccatttaaattacccctttctatgtatctatatctatgttcaagttttacaaactggccttaattattatcaaaaagtaatttttaatattcagaaatctttacttttccttcaaaattgttcccatactcgtcatctttcgttttaagatgaattagtgaactacttgttatatggtgaatctcaata

SEQ ID NO: 30124 - DNA, 1681 bp, Cannabis sativa
cagaactcaagaaaggagatcacaaaagatatgggaatgcaaatgtagcatcagatgaaggatatgaaagtgctgatgtaatggtagtgaccaaaggatctgtgaagtccaattgggcgattgattctggatgctcttttcacatttgtccagataaagaacaatttcttgactacaaggaaatcaatggaggaactgtaaggcttggagataacagatcctgctcaataattgggattggatctgtacaactacaattaacagaaggaacatccatgaaaattcatcaagttagacatgttccagacattaagagaaatctaatttctattgcaatgttagacaaagaagggtgttcaatcagggttgaaggagggactcttaaggtactaaagggatcaatggtaatgatgaaagggtcagtgatcaatggagtctttgtactacaaggagttacctcaagcaatctggcttcagtcgtttcaaaagaaataaccaattcgatttctctatggcatagaagactgggacatgcagcttgaaaggattggaagtgttgaacaagaaaggactgttgggaaaagatgttttacaagattcgaacttctgtgagcaatgcattttgggtaagtctacaaaggtcaagtttgggacagagagacatacaacaaaaggcacactggactatgttcattcagacctttggggagcttccaggattgtatcttgaggtggagcaaggtattttctaaccataattgatgactattctagatatgtctgggtatcagttctaaaacataaacatgaagccttgagtaagtttaaggaatggaaagcactggtagaaactcaaacagggaagaaagtcaagaggctcaggactgataatggacttgaatactgttctgagttgtttagttctttctgcaagcaaagtggcattgccagacacaaaacaatgccaaggaatccacagcagaatggcctagctgaaagactaaacagaaccatcttggagagagtgagatgcatgttaatctactctggtctgcctaaaattttttgggttgaagctgttgtgactgcttgttcttgattaataggtgtccttcagctgcaatccaagccaacacaccagtagaattatggtctggacaccctgcaaactatgggaatctaaagacatttggttgcaaagcctatgcacatttcaaacaagggaaacttgatcccagggcaaagaagtgtatctttttaggatatcctgagggtgtgaaaggatacaagttatggtgtattgaagctgggaatcaagacaggtacatcataagcagggatgtggtatttgaggaggacaaggtgtataaagatgtcatgaacactcaaacaaaatctaccagtgataagcctgaggatgaattggagtttgaggtggagcctgctggagaaactcagagagagaatcaggcaccagtgacacaagaaggtatttttgatgaagaaggtgaagaagaacaacaagaagtgactgaagaaagaactgcagaacctcagggatatcaactgaccaggggtaggcagaaaaggcaaactaaacctcctgtgagatttggttttgcagatattatacactatgctcttaacattgagcaacgtaataatgaacctagaacctatg

SEQ ID NO: 30125 - DNA, 2449 bp, Cannabis sativa
  modified_base (26)..(35): a, c, t, g, unknown or other
  modified_base (638)..(639): a, c, t, g, unknown or other
aaagtacatcacgggacaaaatcatnnnnnnnnnnatatatatatatttatacataaaaaaacatacaaaaataagggaaattatcccatttactatttttttttaaatttatatgctatgtttatcaagtttttcatatatttattacgtcttatataaaagatatttattaaatattgttaacatcgctaatatgtggaaatataatagaatatataagaagaatgagttactcctcccattgtcaattaattttaaaataaaccccattcacctcatctaaaattctaataaatattattctaatattttatttctcttttaaatttgtatcattattagtttgaatttatagtcattaaagtatataatcatattttaataaataatatttttatataaaataaaaaatatacatatatgtattattttttaaatttatatttcatatatatatatttatttattagttttattttgtatttagtttaaataaaattttacacttttacgttcaaagtttttttaaatttttacagtttttacaaagacacaacaaaatcacatgaaagtaacaaaaaaataacatccaaacaataacaaaatagcaatgaaacaacataaaaaataatatacnnataataaaaaattaacaacaaaataataaaagtatttaaaatacatcgaaagaccatattttatgtaaataaaattttcaaaccgtaaaaatatttaacattttgtacaactataattttgtaatttttttgttgtttttgttgtttttgtgttttttttttttttttaaataatctattttatttgtaatcatattattataaaatgatagacatttatatataataaatatgtaagcttttttttttttatatttttaaaattatatattaacttttagtaaacataatatatatatatatatatatatattttatttttatataaataaaaatattaatttttacacataatacattaggaattataaacattaaatacatacattaatgaaatatttataactttttttttaaaaaaaaccatgtatatgaacatttaatttatttttcattaacttaatttgaaattataataaaaaacacagattcacaatcaatataaaacatgtatatatctagttataagtatgctttttatttgtgttcattttaaataaacacatatattttaattatacatatttattcattttttgcacttattatttaatataaataaacatatatcagtgattataataaataataaatattacacataataaacatatatttattgtaatattctaaattttaaataaatatatttttattattttaattttgtatgtaatttaaataaatgtaatttatttataaccatattataataaataattaacatttatatatattaactttaatttaaaaaatataatagatagttataataaagataatacattgttttcttttaacttaaataaaaatcttcacttttaagcattataagtattgctataataaacaaaatacatcaaaacttatattatagacctaaattgtctaataatttaaacattaataatcaatattttttttttgttaatataacatttttaaataattttatttatttatttaaattacaatatactttttccttcttgaatattaatattttcaacaaagtgatatgtttggtatatataaatatatattatattatattaatacactattatgagtactaaataaataaacaaatataaaaaaattaaagtaagttatgtaattattattatatttaattattatgtttttgtaaatatatatatatttacaaaatgatctgaatattatgtttttgtaaatatatatatatatattttttgtataggttttataatttaattttttttgaacattttttgtaatataataattttttattgttgtacactaataaaaaaaccatgaaataatattgtaattttttttttatcataaccattaataattagatgattaatattgattaattgtatttgtaaatgtagagctataaaaagcagcgagttgacgaattaaaggaagtggtaaggagagaggtatttttagaatgttatgataatgtttcatatgtgttgaagatagtggatgatgttcaacgtttgggattgtcgtatcattttgaaaatgaaatagaaaaagcgctacaacacatttacgataacactattcatcaaaaccacaaagatgaagatttacatgacacttctacccgctttagactattgcgccaacatggatttatggtttcatctagtaagtttaacgcacaatatttttatataatcattatttttttggtgtctacacatttggtaccctgtgttttatctaaatacaagtttggtaccttgta

SEQ ID NO: 30126 - DNA, 839 bp, Cannabis sativa
aaataatttccaacactatcatgtctaggaatgggcctatatatgaacagatgatcgatgggccccatgaacagctttgtaaatcaagacagccccacaaattccctgaacatacccatttcccttggcctgcttatgctgaggaaattgggcttgcagaagaactaatgggcccagtccaagtggacaaatatgagcccattacaactctctaccatgacccattggatgtcacggaacaggtccacccgtgtccacaggcccgaaagagaaaagcttctctaaacttaatgccttttgttcctcgtactgaagagaataccagagaattttctcaagagatacctgctatggcacctttttcctctgatcatgcaaactcttcctttaaagtagggacgggccctcctgcatctacatccaaaaatgagaagaagaaaagattgagatcaagatcccagaactcaagtcaaaggaagaaggcgacaaagaaagtaggaggagtcgatgacaatttagtgaggaacttggaggaaactatgaacttggttgaggtaagagtacaaacttctaatgagatcaaaatgggtgaggaggcggcccttatcaagccccccacctctcaatgattgtcctttcttggaactgtcgaggattggccaaggaatcgacagttcaagctcttttggcctgggtggggagattcaaagtagatagtatttttctaatggaaactaagttacaaagggaagcaatggtgggtgtagccagaattttgggatttagtgaagtagtttgccaaccagctatcggtttggcggggggcttttgtctaatgt

SEQ ID NO: 30127 - DNA, 1935 bp, Cannabis sativa
acactttaaaactttagattagagttgattaactttcggcacaaagtataaaaagataatgagacaatgaatttccttgttttataatcctagatagaataatgggtctaataacatgactactggaatgaattcaatatttaacttaagtgacaaaggccataattaacgaaaccaagtgtgaaccaaaacccatctttaaaagcatagcttgtaaaaaacttcattcaaccctgtcgtaagcgttgctcatttccaacttgatagccatttaacccactttacccaaagattttctctttaagtagtgcatgatctcaaaggagacaataacattattggtagtcaatctttcaggaataaagacactttgagatttcgagacaacatggtcaagatcaccctttaaatgattaacaaacgcctttgaaatgattttctaaacaatattgcacaaagatattggcctaagctcactcatagaaaatggattcttccttttcaagataaagagcaaatttgtatcattcaaaccctaaaaaaaaatctaaccagattaataacatccaagcccactaaattctaaattttttatataaacctggagtcatactatctggccctagacttttattaggatgcatctgaaactcggcatttttgacttcctcatcagaaacaggtttgagaagggtgtcattcaactcaccagagacaatcggcacaatacagtttgtaatatctccctaattattctgagatgtagtaaggagattgaagaaacaactagccataaaatcttcatgacccgacccccaatcgtgcactgacccattttcaccttgaagcttaggaattaaattgctttgtttacgcacactagtagaagcatgaaaaaatttactattttgatctccttattttaaccaaagttgtttggatcactgcttccaaaacacctccctctgtgagagaatatcaaacaaatctttccctacctctccatactttacaagcaagaaaggatcacgcaggcccttcaacctcttaagcaatgatttcttttaagcaattcgtttctgaatatcactagaaaaatattttccccaaattgttagagccttaccaaatttctttatacaggactgaatatgaagttgaacttccttcttcccacaatcttctacaattttctcacataatggctcacgaagccatgaattttcaaaataaaactaatgaggactagtaaaaactttctaaactataagatcaagaagaatcgaacaatggtctgaagtagaaaaattaagattggataacctggttgaaagaaaactatccacccacctctatgaagcaagaactctgtccaatctcacttccacccagttagaacttcccctccctttatctaaagtaaaaggatacccaaaataatcttaatcaaccaaattacagtcagagataacttgattaaaactggaaattaagctctctagataaggatggccaccccgcttgttcgcctaagaagttacattatttagatcattaatgatagcccacaatcaccggtcgtcttcagcaaaacttcgaataaggttccaaatctgagcttgacagaaatgattggcttcaccataaatccccactagtctctaatttagaatatcaagtgttttagtaagaatattaatgtgcttgttggaaaaattaattagctcagcttcttcttcaaagtgccacatcatagctaaacctccactgtggccttgggcctcaaccccaaataagccttcaaagcccaattttaacttagctttttctaaaatatcagtaccacaaaaagtttcacaaataaacataaccagggtctctttttgatcacaacatccttcaggaattgtaaagtccgtgggtttccaagcgcat

SEQ ID NO: 30128 - DNA, 1698 bp, Cannabis sativa
tggtaaaataatctccaacaaaccttaagatctcctcccaatggtggaggcattatctaattctgggtgttattttcttgggtggccctttgttcttggtcggtcttgacatatttttgtaagtgcgggttatttttcctaatgagaaattctatttttttcttgaagttattacattcatttgtgtcgtgaccatagtatgcaggaaaatgacatagcttattggtgtccctattgctcatgtccttcttcatgggagagggttttctgtatggcaccaaagaatgggtggttgcatagattgtttctatgtcttgttttaggatagtaaatttagtgagctttgaggcattctctcgaggaatctattcgtagtttctattgaacatgcttttctttccattaccttgctttttgccattgtttgacctctttccacctttgtttgaactgctgtgattttgagaatttttgtctagttgggtggatgtattggctacagtggtgtgctattgagttttcttttatccatttgtattcacaggctatactgcttctttaggctttataaattcatctgctagatccaagaactctgccatggatcccacagtcagtctttttatgtctttgcataattctcctaagggttcgatacatcctaggattgtggccagccttccttcctcagtcagtcctttcacctttgttgcttcagttttgaacctactgatgtaagcccttaagggctctcctagtatttgcttcacttctactaactcctctaaatgagatggaagctgccaagtagaggaaaactgtgcatggaactcagatgtaagggaattccatgaattgaacttcctcgaagctaatttaaagtaccagtgtcgggccgcctctggcaaagtagctaggaagattctgcatggtacatcacctctcatcgcttgtatgtccatttccatctcaaagtatttaagatgagacgaaggatcttctttcccttagaaagagaaaatttaagaaataccatcttctcaacagcttgaacaccacaagccatagaagcaccagcatcaataaaatcatcaatatcattagaaaataaatcctacttaataaaacataaaagaattaaataaaattaaaataaaacaaacaactaataaaatttaaagcatggcaacaaaacagtaaaacaataagaaaataactcaaaaacaaacctctttcaaatcaacaagaatttctaaagcaacaactaatttatcatcaatttttctacactcttgtgtagtagatgcatctgccacatcttcattaagtttcgcaccaccatcaacaacaacatgcacctcataaattttttaccttttcaacaacaaacacagactgtccacaatcatctccacccccaccatcctcatcagcatctggaccaccatcactagagctgtcattggcattatcatcaacatgatcatcatctccaagctcatcgtcttcctcaaaatcaatttcttcatcatcttcattttcaccatcaccaacaaaatcatcatcattttctgaggagcgaagaacatcttttgtttggttcgaacgatggctataagcagcacgcgaagattaggaaaaaaaggaaatttgaataaaaacctaaataaataataaaaaaaaaaaaacacaaaagac

SEQ ID NO: 30129 - DNA, 1724 bp, Cannabis sativa
taaatatttgtatattaaattgataaataacaaaagatttaaatgcccttaaacctagatatttttcaactactttattgggctgttaagtccacgtgtaaagctgtacagaaaatcctgccaggtcctttcctagccggccaagcacctgcagggagcaagctagctggccatgtgttgtccagaggctagtcggccatagggtcggccaccccctctgaggaagctggtctgtcacttggtgtcccgtttaagagccggggtccctgtaggctgaggtactgacttggccttctcattggtgagttgtactgccacatgacactgattttttctacgtaagtaatgccacgtcaagtgggcaaaaatcatgataacaatgtgtaaatcattttataaagttgcagatttggcaactagagatgagatcaaatgcatattttgttgaaaatggtcaacgatcttaagataaagttactacaagttgatgatatttgtgagaaaggagctaaatcaaattttgaatttggcagtaagattcttgatctctacagttaggagcaaaggatatccgtcgttcaagagaaaataatctaaaattgagtaaattaatagaaataaaaaacaaaagaatactcaaattagctcgaaggaaaaaatacaaagaaggttagtacattttttttttcatttaaaaagtcagatttttttttatactaatattatgtttattaattagtatgatattttttttctttgacgacctccaagaaaatagtaagcaatgaaattgcaatactagtcagattacaacacaagaaattatcaataaaatttgtagaggttactttttgtttttttgatttgatttatatttaatatgtacacatatttattataagtacagggtgttcaaatttctcaagatacatatatatgttgatggacaaattcaaagaattgattaggaacaactactatatacaagttaatgaacaagagagtgatcatattattggagatcttaatttgtctatgtgacctatgaagaattctatatatatagactataatgatgattatcattgttaaagaataaaagaattttatggtagaagcgttggttattatttgactatgaatttttaatttaatttttttttttttgtagaataggtgtgcaagaattaatttttgttaacagacactgttattcttattaatttgagtaattttttatttttgtgtgtgcaatatattttcatgtttcactttttatattaatgtctttaagttgatcaattttttagatggctatttttggtgtgcttcttatatgattttataagaaaaaacatgaagtttgatttttttttttatcaacgatataataataaaaaaaaaaaagatacagagtgaccaatattcaaagaaataaaatttaaaatgacatttaaattagctcttgtgtaatccaaagaaattaatttttgtttttatttaatttatttatattttataaataatgaattaattacgaaatataaggtgtatgtcttttatatatatatatatttatatatagtattatttataaatcatatgttactcattttttttcttctttaatatgtttaagaaaaaaagaaaagaaaagaaaaataggaaagagttaagaaagtaggatattttatataaatacaaataaataaaaagtaaaatta

SEQ ID NO: 30130 - DNA, 1307 bp, Cannabis sativa
ttgtttggccatagtggctattgcatgatgtttgatggccaatgttttgtctttgaggggctggccagccttggcagcttcttggaaggactggctaaccagtgttttttcctgacattgatttttaccttgttttatttttaggcctttgtgaagttaagtttcttgcatggtaactctagggggttttcgagtgttcttcgggagctgataaagaccttggaggctgacctcctcacgaagcgcaaggctttgactaacatggaggttgttggccagcaaaaccggagcatgacttttggtttggaggccatgctcagcaccaagaactaggaaaacaccatgcatgctgcacacgctaaagactaacctcactagatgtgaggagaagttgagggcaaccctcaatggccagcaggccatcaaggacgaatatgtaagcttatcttcataactcatctatgagttaaaggtgtgtaaccctgatgctaatctttcatacatggggaacagtgctctcctaaagagcacatttgcccaaggaagaacgttgtttgagagtaggttggaagtggaccaaaccaccttccaaccagagggttcatcctcggggcactatgatgaggagatggccggctcacctgctgaggaggtggccagctagggctttgaccaggtggtcggtcagcctatagaggcaatggctagcccacactccaatgatctagactttgcagctttcgattcagccccacctgcaccttcacacatgtagatttagcttattagtttttgacattatggttttacagtatagacattattttcatgttctgtaaggcctttgggccttttacttttgaatgctacatattttcagccttagggctttcatgttcatacttttggcctgtaggcattttatttttaaaaactactattgtttagccctatttctttttatcatggattgtgcgaccgaccaggtcgtcttaaatcttggctattttcttatggcattgacatacaagtatctgaatttacttttctttatgccaagctgaattatgcctacacctgacttagaggcagatttagtagcttattctaagcgttaaaatttcttcgctaagttatttgcgctagttcgatgcattgtatggtgtgggtgccccccaagtgagcacacagacttactgtcccttcatcccttgcaattcaccaagtttcataaaccttgcttgggaattttcttagggtgctacctacgcatgaggagctgaaaaaaaagagtaactttaagaaga

SEQ ID NO: 30131 - DNA, 3574 bp, Cannabis sativa
  modified_base (3534)..(3546): a, c, t, g, unknown or other
atgatatttgatacaatactctaatttttttagttttcaaataattataaaaaatttaaaaacttattttgtaaaaaaaatgaaaaccgaccaaaccgtggattaaaatagtcagttttttttacatttgtataatggtcggtcggttttcggattataaaccgaaaactgaattttggattttttttgtgtaaaaaactgaccaaaccgaccattactcacccttacttcagagaattttaggtcttttatgttaactggtatgtttaatgcagccaagattttggcaagaacatttggggcaggatgacttaacttggaatgccacaaattaatatttaatttttcagtaagataaagaactgagctattgacatcagatttaaaagaaatgtcatttttattaataggtaaactataacatgaggaagatgttgttgaaacaacacttttattacaatgctcaataatacaagatttaacttctatgggactagcagggactatagtgtaagacactgtagtagactttggcttggactgagttgtggcaaggtgacaatcaagctgaaatttagatgatggaaatgaattgtgagacaatgtgtataagtcattttaagcctccccttgagcaagactctccatgttactttgtccttaacagaacaacacttggagtaaattctagaaatatattattatcctcagtaagcttagacacactaattaggctcttaataatttgagggactttaaggacatttttaagatgtaaataaacatgagatgaagggagagaggagttacaaatgtgactgatggggagacgttttctatttccaacagcaagggtgtttgatcctaagtatggggtttcaaattcaagatattcaatgccttgagcaatatggttcgttgctcctgtgtcagcataccaatcggggtcatctgaaaattcttgaatggcaaagctggaataaacttgagggtcttcttgatcatcaatttcagcaagataggcacgtgactcattgatcttgggtgtcacaaagcctttgtcaaatctttaatgacatactgcttttgtatgcctagatttgtgacaaacttgacacaagaggtgtggaatagacaggttgccacgaccataagatcgtccctgagatcgattatatgcataattgccacgaccttgagcagcataaggacggtatctagggccagaattcgaacgagagttatggacagtgagattggccatcacttgggataacgaatcattcaaggtgtaatgtctttccagccttctctcatgggttagtaacagagattgaattgattctaaagagagattatccacaagacttgtgacatgaaccacaacgggatcatattcaggtcccaaaccatttaacatatgcataatcaagtcactgtcatcaacaggatgaccagcagtggataaagaatcggcaagaagcttcactttatcatagtaatcagtaataaaaagattaccttactgaattgtggagagttgagactttatttgaagcaatctggccttagattgactggaaaatctctgttccagagcacgccaagcatcataggatgagttgtattgagctaacgatccaagaatcgtttcagacatggaagatcagagccacctaagtaacaattgatcttttcttttccatgtagtgtattctgggttgacgttaccattaacgagagtgcgaactggagcaactccggcaagaagaatgtcatcgaggccgtgaccgatgacagtagggatattgacttgcgatttccacgtaagaaagttggctcaatcgagtcgaacggtgagagaggaattcagagaattctggaatggattccattgatgagctggtgaagcagctggaatcagagcagcagagggctaagcagtgggttcagggtggcaaggatccataatcgacgttggtcaaaagcttcctgataccatgtagaatgtgaacttatctatgcaatctaacaggactcaatcagagaaagaaatcacaaaacttgcaaaaattaaacaaaccttgaaagagagatgttatttatagagagagccagagtttgttacagggtaaaaacgaaaaaacagagcaaaaaaaaaacagccaaaacaagtggcaaaacaaactgttacaacagtaaaacaatagtattaactaactcattaactaactctaactatggttaacatagtccattgttttgtttttcgtctcattgtttattggttgaattattgttcttgccgagttgtgtttcacaacaatagcttcggtaaaatttggtgaaagtttgagcaactactccaataattaaagttacccaaaagttgtttgtacttatattgggcaaaattgcctaattttgattaaaagaagttggtagggtcaagtaagtaacaaaatatattaccccaatggagtggagttgctcaaaggtgtagtgggcatttaataatctcacaagcttaaattgcctcaacttgggttattataagtcaccatcatttaatttccatttattactatatttatatttatgtgtatatacatgtatatatagctctcaagcacgaagaattaatgaattaattaatggaagaactcagtcatgactcacatattttctccttcatatataactatatctattgatcattttacaattatatatttttcatttatttattaaaactaaattatagagatgtataaaaaaatgtaagtttttcttttggttacgaattttatactacaaataaaaactaaaaaggtatataaaagaaaaattaattgtaatttaatttaaacatcattaagggggttgatacactactaatattagagaaaaatagaaaataataatcaattggttatggcccccgttagttgggttttataagttatttttcgacttttgaagttaaatctaaaaatatttctattattagttgggtaactaataaattttagtttttaattttaatttttttaataaaaattaaatatagtaactttcttagcaacaattttctgaaaagttaatagaagacagcagaaatattatctatattagttttatattggataatgtgtgtttttttttttttttgaatggggataatgtgtattaattgctctttagtttagtaatttattagtgtaagaagatatttagttgttacttgttaattagtgtgtgaagagtgatgaccttgttttttccttttactaaattaataatgaataggagtatgtgagaaaaaaattacaattaattaattcaaacatcattaaggagccttaccaaaagaaaaatatattattaaagagtgcttatatatatttataaatttatacagaactactcaaatttattatattttcatttatgaataaatgaattataatcacgggtccatttatttattttttattattatttttgaataaacactacaaaaaatcttacttnnnnnnnnnnnnnaatttgtgactaaaagtaaaaatgttgt

SEQ ID NO: 30132 - DNA, 2693 bp, Cannabis sativa
  modified_base (2622)..(2658): a, c, t, g, unknown or other
tcgaagtcagggacatgtagtagtagtattaattactattactatatctatatatatatatatatattaaatacttgtatgttatgattgtgtgtgagtacttttctgaactgggtcttttaattgtgctaattgagtatatttgattagggtgtgaaattgagtttgttgcaaataataataattagattgtagaggttatatatattaagcttgattaataatatatagttttcaaggggtttgtttaatttgtgatcctcgatcaatataaatattaattaattaattctctctttggtggtggtaattaatgtgtatttattatatataattatgtattaaataagcacataataatatatagctagatatcttgttttggcaaactcttcgacgggtttttgtgctataatatcagaaaccttcctttttgaagagatttttttattaacattttattgtaaaacggaacaaagatattattacttttctttttgtggctaattaatagtattggagaatcatttctttcattaaatcgttcgatatccattgaacattactaattaattctattttataattaaataaataattaagcctccaatattggcaatacatacgaattattatatgatgccaatatgccattaattataatttgtgtaaaaaactgtgtacgtataaatatatacaattatgcgttcatgcataaattaaattaattatatattaaaagagaaataataaaaatagaacgtacacatcattatcttatgcaataaaagcctggcataaaaaaaacttggcgtatataaataaatatatatttatatatatggtgcttttataccattataatttagaatctccaacaagctaatttcagtcaatttttatttttctatatatccttctacaggcacattatattttaattaggaaaaaaaaccacaagaaaatttttattatcttattgttttaaaagtaataattattgtaaaaaaaaagtaaatatatagatggatatagaagattattatcataaattttgctattctcatgactaattgtgtgttataattaactttgacattttttattaaaaaaaaaaattatatattatacataaacacctaatgatcaatcattggcaaatgagatgtggagcaataattaaatttggatttttaggatttttcatcataccacaatcatttaatttgcttttcatgcatgattggtgacgtggactaggaaagagaatatggcatgtacatgttattattacaaagattaaaaacattttttaagaaaaaataaaaggatggagtttgaaaatatattatgaattaattaatataaaattaatattctttgaaaaaagagagaagaaaagaaggaaatagttgcttagacatgaagccattattcgattggtaaaatgtgaatctctgtgtacatgtattatcacgaattttattttgcttttcgaacatttttattggtgcagccaatgccaaagacttgtccaatacatattttgaccaggtctgtctgtatatccaaattgtatggagatagaaatctagctagctagatcatcaggatctctgttgcttcttcttcctcgatatataatattgtttttttttttttaattttgaaattaccaaattgccttttataaatcataatgcagatcttctcaaaaagaaaaaagaaaaaaaatcataacacagtacaatatttcataatcggagaatatttattacgtgtaagacaaatgtttgcctaaaatagaaagaaggaaatcggattattaattcaagtaattttaatttgtcgataaagagccaccaatataattttttttttttttaatttaagcgtttatatattacattaacataatttgggactcgaacccaggacccccaatacacacgcagctcctataaccacttaagctagcctcaagtggttgagccaccaatataattaattaaagagttttattttaatcaacatttgacaattcaactatatatttttatatatataaaaaaaattattaattatataatacatattatccgcgggaaataaataccatgcacgaccaccccttctccatagaattcaaccctgacaaactaaaattgttaatataggtaatatttaattataaatattaattttaaaaatattaaaccattagatttgggtcatatcgaataataaagaaaaaaaaatttaatttctatatttaatttaactatttaattaaaaaacatattgaaaaatagttctttttattatatcaaaaatatatttatatgaaaaatatttaagtcaaatttaatttttttttcttattgttttgacaaatttttttttattttttttttcaggtgatagaacaaccccagcctatataatgtaaaaatgcgaaatttttctaattaaatagaaaaactaattataaaaactcaaattttttcaatattacccattcatgggtaatacccattaagagtgcacatatatatatgtacacgagaggaggaaattatattctatacctattttactttagggacttttttatttttacannnnnnnnnnnnnnnnnnnnnnnnnnnnnnnnnnnnntttacggaattctacataaaaactcatattgcaac

SEQ ID NO: 30133 - DNA, 3874 bp, Cannabis sativa
aacctcttttctcctttccttttcatccacgtcttgtatatcacaaacccaataaaccccaccacaacggcaactatcccactcaagatccccatcatagccctgaaaagcacccctaccctatgtctccctggactttccctcactttaaagtaacccatcttactcaggtccccaacgctcaacaaagtttggatcgggtaatccaccgtgtaacaaaacccggatccgttactgtaaaccgctccccaacaactacagctccgctcacacaaactctcacactgcgcaagagacgacgtcgtttcgtaactcattaactccttgtacggcagctccacaccttctcttctcaaaacccaaaagtgattctcagccacgtcatcgccgcagaagtctccggaagatgagccccgaaagcacgaacccgatccgaaatccgtacggttatccaaacaagaacaacccgacccggatttgcaaaacccgtaggacccgcacggactcggaagctcgcacggttcggtaatcgcttgatagttcaagacccagttagaaccgtcccaatagtaccctttcagattcccgtccggttctaaccggacccggaggagtccattcacgtgtctttggaagctggtgaaaggtagcacgtcaaccgggggtccggtcccgagttggtacatgcccaggtacccgtccgagttgactcgggtgtaaatcgggccttttccttgaacaatctccgctttggcttccatggctttatgcttataatagatttgctccgacccatgtctaaacgcagcgtataagccccaaaagtcttctcctaatctcatggagtatagcccattggacgaaactaaccccattttagctgtgaggttttggttctccacaagcgtatttgttggaaagtcaaaactttgccacatgacagactgagtcaccgactcgccctgtactatttgaagattggacgagttgagtaacacaactcgatctccttccattcctaatgaccaaaatacccttgaccgatgagaatccaaaagcacgagactaccattgaagctgagctgagtgaagtcggaccacggggccattcgggtcgggttagccgcccatagaggctccgaagatggtaaatgaatcacagccacagttagtaaggtctcgttgattcggaggaaacccaaagcgaagttgttagacgagtcttgaaggagagcttgaaacgacgtcgttgatgatgggtccggtgtcgctttgaaccctttgagcagctctagctgggtagtggtaacggcggctgcgctacaccgccatgttggcgcgtatagaagaatcgttatgattattatggttaagataaactgagtcacacgtaaacgagtcaccgagttgatgaaagtttccattgagaaaagagataattgatttttacaggctttgaaagatgcaggaatatatttgatttaaagggccagaactcagaagcagtaaccgaaaatattgttattatatgtacatatatttaatataatattataaaaattacatatattgaagactgaaactttacataaattaattataatccaaatattaattagctattatatattgcaatactaattaaaatatgagaaatgttaaaggacttcagtagtgtctagcatcctcctatatgtcaatatctaattaagtatcggtctcatataatttaatatgagaaatgctacaggttactagtggtgtctaacaccctcttatgtgtcagtatcactattagtctaactaagtatcgggtcctacatagtttaatagaataacttttaaggagtatcgtttgccaatcgcaacgtaacatatcgagaaggtgctaagtaccactggtgcctaatagcaatgctcatttaaaataagcttttagggagtatcgctaaccaattgcaacatcacatgtcactaaggtgctaagcaccactagtacctaataacaatgtacttaaaatatatataaattgattaaaaaaaatgtagcatgtgacatgtattgatcgagtataggtagttaattatagtattaattagtaattaataaatgttttggatacaaaggtctttctaatttgtctgctagtgctagtttaagtgtgtgtatgttaatacaacttgcagcaacatgatctcacagcaaattcttctgaattaattaatttttagctagtttgattcaaatataatataatgtttggagatttgtaattaattaaaaattgtttattattttagaaatagattgttttgttatattgtcctatatcaaaatctatgggtgtgtttatatgggtggatatttaggtaagagatactctgtcgaagcccggagatctcacacaacaaataagatctgtccaaaaaatatgtgtagttacattttctggccacatagttgaatttgaaaaaacaaaaccaatatgtaataagttcaataattatatcaaataattgaaaatttaaataaaataccttaaattaattctaaaatataaaaaatattttttatttaataaaaaatagttaaataagtgttgtcttggtttctcgatggacacatgttaccaccactaaaaagggtgtcgtctccaggaggggattctccaataacgtaactaacactttgtgagatcttataaacgttgaaagagaagtcattgaagatggaactaaaggaggaagcaagcaccttgagatacgatgagagatcccaaagagaatcaaaggcatgcctagagacggatcagaaagcacgacacaacacttgcaaaagctgagacaaagtagtagacgtacaaggacgtacattgagttcaagtagtggaggtgtgcttgtgtcaataccacctaacactggaccaacaatgtcgccatatcccattatcacttgtcatcggactagtacatggtccccatagagtccacttacaactcatttgtaaacaaggtcaatagaacccaactataaatacccctttactctattagaaatggagttggaaccttgtaatatggagagaatataatctgaatacaagataattcatagtttccttctcacacaatttcttttatatttcttcttgaatattacttcaccattttttcagtgcaaaatacaaggtttttagccacaatatagttgacgagtttttaccgtcaacacgttcaatttattttttatatatatttttacgctgttctatataaacaacacgaaaataacaagaaattttttgaaaaataacatcaaaacaacgtaaaaataatatacaaataacaaaaaactaacaacaaaatagtaagcgtacaacataaaaaataacatgaaaatatcaaaagactgtattttttgtaaataaaatcttaaaaaccgtaaaatatttaaaatttcatacaaccgtatttttgtaaattttttttattgttttaatttgtgtatttttaaagtaatcttttatttcttaagctcaggtaaatctctccccattagtgggctaattataccaaattagttcactacaataaaagggaatttttatcccactgggataaaaacttttaatcccacttttacttttagagccttaaataaatttttggaacaagggccttgtatggaaaatggataaaaatggtgttagaaaaggctatttttatgcagttgccaaacacaacttagcattttaagtgagacattttatcccagtttttagataataatcgggataaaaggtcctcatacatttgggctttttaattgttgggtcgactacacatataaaaggaacaataacttttagggttt

SEQ ID NO: 30134 - DNA, 1371 bp, Cannabis sativa
gatttgccataatgaagttcgtttattctcttttttttttcaaccttacgatctgaggaaccaactataagcaagcggatcttagaaaaaaaaaataataaaataacaaaataaaacttttttaatattaaattatttaatatttattataaatttataatataaattattttcacataatcaacaacaaaataaaataaaactattataaaaaaactaacaaaataaattaatttattattgttatacgtctccaataataaattaaaaaaaatacaaaatagactaaaaattttaaaaaaaaactataaaaatttttcagcacggaattttttttactttctttgaacttttttatttactaaaatatcttttcattcaaaataataaaatttttttagttgttttataatttaattgtatagtttatgtatagttatttttatagttgtaaggttaatttctaattatttttttagttaattattgctttttgctaaagcaaagtgtattttgtaattttaaaattttaaaagtgtaaatctataaataaaaactctaagtcataaaattgtaaataaaacataaaaaagagtattttaaaaaaaaaatcgtggtgcggtgctgagcctggtttatcttggcacggtgttgttcttggtttatcttggcacggtactgaccctggtctatctcggcacaatgctgtccttggcctatctcggcacaatgccatccttggtctatctcaacacggtgcctttattgttctatctcggcacgatttcaagtgctatcagtcctttatattttaattgagactttatgttggctttgatcgggcttggactatctctgcaattttatctttactatctaattttttatgggcttttaagctgtctttttttttagggccaagatgcaaaatgaccctaaatttaacaattaagttaataaatgtctttttttataaaaaaaaaattaacaaaatgtcaatttagttaaaattttgatgatgaaattacaattataatcttgaataattgaccctagctatttgctttcctttttctctctcgacactatatatcatgaaggaaaggaaaaaataaagtgcattagtttagtttttttcgtatatttatatttttctaaggtatattatttttatgtgatatggaatacttgaatgaaagaaagaacataaaaactacgaatggaatatcactttaagtttctggtatagttgattttgcattgtggtatatctttattatgtgctacgatatatagaaataaaaaacttttaagagttgtatagtatttttaatttgtggtataatgttttaaagtgtttggtatagttat

SEQ ID NO: 30135 - DNA, 3098 bp, Cannabis sativa
gccagaattcttcaactcagattttagttgcaatctctcaaaaagggaaatctctcaatccatgactacatttaaaagatgaaaaatgttgctgatagtttatctgctgcaggacaactcttatcagatgatgacttgattctctacattctaggaggtcttggccatgagtatgaagctgttgtagtcaacttaacctcacgacatgaccaggtcactctccaggaagttcaatacatgttacaaagtcaggaaattcgtcttgaacaattgaactcaacaaatggagacccatctattgctgctgccaacttagccactcaaatgcgaagaaaccttactctcggaggtacaccaaatgctcagaatcaacaatccaatcgattcaacacctcacgtggccgaggacgtggcaggggcagaaccaacaacaatagaccagtatgccaactttgcaacagacctggacatgtagcctcaaaatgttaccaccgatttgatatatccttccaagtccctggaccaaatcaatcccaacacactcccaacaacaacaacagccactctcaaaatgaccaacaagcctacttctcctctactgacaacatcaatgacaactcatggtacatagatagcggagcaaccaaccatatcacccctgaagtctcaaatctgcaacacaagactgaaccaaaaggtatatctcgattgcttgttggtaatggctatcctcttcatgttactcatctcggctcaaataaaattcataatgctactggttctctactgctaaatgaaatcctgtgtgttccagatatatctaaaaatctattgtctatttctaaactaaccaaagataacctggtatatgttgaattttatgctgaccattgtgttgtgaaggatctaaaaacgaaggaggaactgctgcggggagtgcttaacaatggattgtatcaacttcagcttgctgcatcatgttacaacagttttctaaatacctccaagagtagtaatactaccaaacatctcaagtctagagtcaaccacagtcaatcgagtcctgctgagtctaaaaataatagtcagtccctatttgctgaaagtgtctttaattccaatattaatgtgtggcacatgagactaggccaccccaatgtcaatgtaatgaagcacatgttagcaaatgaaaaagtttcatttaaatccatccccactttctgcaatgcatgccacataggcaaatctaaacataaacactatggcacatcctgcacaacaactcaatctcccctggaactcatccattcggatgtttggggaccctctccaatcttatccaaagaaggatatagatactacgtgcatttcatagatgactatagcaactttacatggattttccccttaaaactaaagtctgatgttaaatccatattcattaattttcaacactttgtggaaagaaaatttgacaccaaaatcaaaactctccaatccgattggggaggagaatataggagcctagccccttttcttgcatccataggagttcattttcaacatccatgtccccacacacatgctcaaaatggaaagtccgaaagaaaacaccgacacatcatagaaatgggactcacacttctcactcaagcctctatgcccctaaggttttggtgggatgctttcagcacctccacattccttatcaatcacctatccacacccactttggctcaccaatcaccaatagagaagttgtttaaagtcacacctaatctaaaatttctcaaggttttcggatgtgcttgcttccctcacttacgcgactacaacaaccacaaactagactttcgctcatccaagtgtgttttcctaggatatagtccaaaccataaaggttacaaatgcctacactctagtggtcgcatctatatagcagctagtgtaacctttaatgaattggagttcccatttgtctcaggttttagtaacaccaccctctctcaaacagaaaactccacatctgtcatccattatcatcattggcttccttttctgtccactcccaacatctctcatacagatgctcatcatgctgaggttgatacaaatcattgttctccaagccccgtggcttctcctccacacacacccatggatccaacatcacacagtcatcaggatcaaagttcaacatccaccagttcctacccgaccattccccttgctgttcatctgcctattgaaccgatatcatcaccaaatttttccccagccacccaaccttccccaccaacaccaaccccttcacctataccagcacctataccaactcatcccatggtcactcgctccaaagccggtatctttaaaccccgaaccttcctctcatctatcctcaaaaatcctcatctccctgccatgtccctcactatacccgaaacacctgcccttgctctcaccattccagtttggaaacaagccatggactcagaacatgatgccctcatcaaaaatcacacatggaaattagtaccaagacaacctcacatgcatgtagtagacaacaaatggctcctccgtatcaaattcaattctgatggctccgttcagcgccacaaagcgcgcctagttgccaagggcttccaacaacaacccgggattgacttctttgaaacctttagcccggtggttaagccctctaccattcgagtgatcctttcccttgcagtcactcacggttgggatgtccaacaaatcgacatcaacaatgccttcctcaatggcactcttgatgaagatgtgtacatgacccaaccattcggctatgttgatccatcaaatcccacagctgtgtgcaaacttaaccgtgctatttacggtctcaaacaggcaccccgtgcctggttcgacaccctccgtactgccctcttacaactcggcctccacaactctgtatcagacaattctcttttttatcttgcggatggtgatgctcgattgtatgtgctcgtctatgttgacgacattctcttaactgggaacaactcacaacgtgttcttcaaatcatttctcaactcagcactaaatttgc

SEQ ID NO: 30136 - DNA, 1484 bp, Cannabis sativa
aaaaggagagaaagagtatgaactatatatgtgactatctgacaatgtcaaagactacgtgtggtcatacaacagaaaaagtcaacgaccaattagccataaaactacactacaatctcaacgaccaattagccatagaactacactacaatcagacgtattcttctatatatgtattatttgtttttaattattctattctattatcttctccttaatttcttttgtaactttacttttttttgttcataataatatgttttttttaaaaaaaaagaaaaaaaaaatttacgttctacgttatgttgacttgaaaaagtcaaaatattccagtagaatcgatttcttttttaactgaattctcgtgttaattaaaatgtatatttgacttggatttggtcaaatcaaacatgtcaaacgaactaagtttgtattgtttttaacccaaaataaaaatatgaaaaaaagagttgctaaatatatgtaaaccacaaaatgttaggataaaaaggaaatttaaataaatgtacacatatgataagagatgggtttgaatgttattgttgacattatgtatttgtgtatttttattattaatgacgtacgtagtagaacatgaaagcacattatcaaaattgagtgatctaatatgataatattaattgatgctatcggccgtgagccgtgagagtagattattagactcagtctagtacatgctttttttcattttattaaattcttcattcaaagttcgaagttcacacagattacaaattaaagttgctaattaaaaataaaatataaaaattagctagtttacaagttttatgaaacattaattaatttcaatggtttcgtatcctgattatttatcatagtatatataagtaaatactattttagaataggcgtgttatgtaagatttaataattggtctctttattttttttatttaaatttatttattttttttaataaaaatgtaaactatcattaaactgaaaattctactattataatgctacttacgtacttcaatagacaaattattttcctaaagaacatgatctctggagaaacaaaaactatgagcgagataatgaacaattttgtttacagatcattctacaaataaaacgtgaagaaatattagaaaaaacaagtaaaagactcttatagactatagtcatgaaccacctgatcaaattcaaagggcatatgtaaactgcttgttattgtttggacacaaagaagactatctgtgtcaagaagaacactataattcagcttaaggtttctttgatgctaataatttttgcaatttcaggttgaactcagccaacatgactaacggtgaaagcctccagcaccctataacccaaattttctattccttactcgaacaaatgtaaatcaatttctattttatttctaactcaaaaaaagtttgattaaaataggggctcaatgaattattgtg

SEQ ID NO: 30137 - DNA, 1600 bp, Cannabis sativa
aaagtcctttaccgaccaagcttcccagataagctttgccggcgcagttagggtacttttgccggcgcatttcttgtagtgggggttgggccgctcccagcccgtagaaattttttattttaatgaactactacttatcctcaagaaaggtgacaagtttaaatatggtttttataagttaaagcacattcggccaacgagacccggtaccttttaactctcaaaagaatgttaaggaatatcatcataggtttttcgtttcatcggggtttaaagcttttaaatgtctcaatctcctgactgaatgggtcaggattcctcctttgcacaagacaacccctacttaattatttctgaatcacgcaaaggtgtgcgccagctaccagaaggaggagttgaacattggagacttggtgaccacctttaactatcgtaaggctaagctgatcctgaaccatcaaacgatcaaggattttaatttatccaaggtgtcttgtaccaacacacaaaatccagagactaaaaagaagctccgactaaaaatcattacagtagccgaagaaaaatacaacaagtattaatacaaaaaagaataagaaatccattatgcctgccttcagagtgcttctaggaagactagccaggagaagatcgggaaagaggctacgcctgccatgccacaatttcccttcccggtgcccaactccgggacctctagacccagtacttctggtgcccataagtcccctttgaattttcattttgttcctccagctcaagagtactctcacttacggtcggttggttttgacacaaggttatatagattttgtatgccccatactcggtggggtaataggaaaaaggatttttatttttctaacatgagtggtttcttgggtcgatctcaaatgggtttcggtctcccgattcctattctctcagatcaatcctactacataacctcaagttagtttctcccttcagatagttatttagcagatgacgacaccatctctttaatttatgaattttcttggaaaaaaattaaggcgtcagtgtaggattagcgttccttgtttaatgtctcctcatgcttatgcttgatgtatttcatgtttttaactttcctctatttggtttcaatagaaaaactcatgcacgacctcctggccatgcagaatgctacattgagccaaaggtggctaatcttccatcagtagtggtgacccccgagggcccaaatgaagaagtgcttggtaaccgggaagttgtgttatttgaggagaaagaagaggaggttcccccactcgattggaaatagaagaatatggttcctaattctaaatcttctaagaggcctaggtcttcagggactcccgctccaagtactaactctgggattccgtttaaggttgaagactttcctgccccacctacaatccttctaaacccacccaacctaacaaagagtgagtccaactttgcattgctaaacacaattatgctgtcgacgagctgacaaaaggagaggcagaggcagaggccttgaaaaagtggctgagggaggctgaggatggtcctttctagggggaataca

SEQ ID NO: 30138 - DNA, 2874 bp, Cannabis sativa
  modified_base (2022)..(2023): a, c, t, g, unknown or other
  modified_base (2826)..(2827): a, c, t, g, unknown or other
agcttgacttgagccactttataattgttcgtagcttctgaatctcttccctttttccaatgccgaacctctgttttgcattccttgattctctccttaaagttgcccgaatagtctttgccccattcaatgagaacatctccacatcctttgatcttttccataatcgggtacccttcaaattgtctccatgtatcctcaaccaccttataacaaagaggctctttcaaccaacaattctcaaaacgaaaagctttggtagttacacctctagaacttagaataaccggcattaagagcaaaggacaatgatccgaggttgaaacttccaagttgtaaagcttaaccgaaggaaacaaactcagccacctttgacacacaagaactctatcaatgcgaacttcaatccactcttccgtaccacgcccacgttcccatgtatacgggtagccacacaagtctaatcatggagtccacactcatctagcatcccacaaaagccctcaataagccaagttggatatgggttaccaccacgtttatcttgttgcgaggtaacattattaagatcacctacaatgcaccaaggtagatcatacttagctttcaaagctctaacaaggtcccaagtcctcttacggtgtgctctatttggctccccatataatccagttaatctccaacgcccactttctctattttgtattgatacgtcaatgtaatttggaccataaccaagcaattgcacttcttcctcatgtctccataacatagctacacctccacttcttccttgaacgtcaacagtaaacgccccatcaaagccaagtgatactctaagtttctccacaatatccttttttgatagagtttcacataagaaaataaaattgggtctcttttggaccacaaggtccttaatgaattgagaggcccacgggttcccaagcccatggcaattccaagacaatagactcataatgcttggtgggcttgggaaccaagacccacctttaacaagttttttggctcagacccaacattactttctttccccaacatttgtttgtccatattgccaacagccacgtgcccattcaaacttaccatatccattcttctttttttattttccagcataatagtcatatccttctcactaaggttgactaaatcttcccctttattactatcaatattgtctcccttgatgaagtgatattaatttgtagtaatgaatggagtaattattattattattacaaaatcattaaacacataaacatatataattagaacaatttaaaattatgttttaatctgttttatttttttttaatttattttaataaataattgataaaatttttaaattaaataatattaattaaaaattaaattaaattataaagttttactagcacatttatatgctggtaaaagtaagactttttccagtgtatatttttgttagcaaaagttagactttttccagcgtacatttttgctggcaaaagttagactttttccagtgcgttaatgcgttgataaaagtaagacttttcccaatgcacatttacgctgaaaaaaatttaacttttaccaacacatttacacgctgggaaaagtcattgttgccaacgctttttgtttttcattggcaaaagtttcaatagtaacatgaattcgcaaaaatttactggcaaaagtaaattttgttttgctagcacaatgttaacttttgctagaataaaaatgcacggacaaaagtcttattttttgtagtgaaaataggcacataggtaatgattgtaaatatagtattatacctataattatattagtccataataataattctaacaacactcaacgttgcatagctaacaaccatatcaccaatagaagcagggccgaccctaagtttaggcaggctaggcccgcgcctagggcccactcattttaggagtcaaaataaaaaaattactttttaaaaaatatatattttttaataatttttannaataccatttatctttatagtaaaagtttaaaaaaaaatttcgcctatgacctatttcaactcaggcccgggcctgaatagaagaaggcgcaaccgccacgtcttcggtgtatcaaaactagtccatcaataagaaggttgattgggatgacaacctgaatttttatttgcattggtttattgccattgcagccaccatggtcggagaaaaagccactgctgcggtcattggagaagaaagagatatcttggatgtgaagtttgacttgatttggttcattaccactgtggctgccatcatcggagaagacaaagtggtcaatggagaagacggcatcttggatgtcaagtgcttctcgagcaaattaaggttggagttccgtataaatgtaaaaaaacatagtcaaaatcaaaaatctccgtgtgaggtgtgaccctataattgtgtaattttttcttgacacttagtaatacatgtaaaatttccaaaaataaaaggagcatggtatttggcgttccacatttattgactgtaatggccgtgtatgaattatgatgaaagctatactgatttaataagtaataaatattaggctaattatgatttttgccccctgaactttgacatgtatcaaatcatgccactgaactttgaagatcgttaaaaatgccctctgaactattgagtttgttagatttaaggactttttttccaattttaaaaaaaaaatctaacatggacgaaagtttatgggcataatttagtacgtgtcaaagttcgagggacatgatttggtagatannaaagtctggggagcatggtttagaacataaacaatcattgaaatagt

SEQ ID NO: 30139 - DNA, 2955 bp, Cannabis sativa
  modified_base (1961)..(1964): a, c, t, g, unknown or other
taaacaattagagagcttaacattttctcaatccaggtgacatatggtgcataactgcatattaactagtttctcaactttagttgggaaactttcaggaaaaaaagaaaaactctggatgctctatttgtataaatttaattaataaacattttatttaaagaatgataattcaaattaaaaccgacgaattaaataatttatatacttggggactaaatccagctcaatcgataatactactgtggtcctgattataatgaatatgaataaattgagaaaattattgtatactcattttataatggatacaaaaaagatttgatccacttcaaattttctcggcggtttcgcttaatttctataagttattttttagctttttgaattaaaaagagaaatttataaaaaatattataatttgggttaaattttatgaaaatattgctatacagttttttttttaatatactatcttttttataaaacaatagtggaatacaaaatataaacaattaaatcaggaacaacaaaagaaatttaatacaatacacattttaaaaaaattccaccctataataataaaaaaaaaagtaaaaaaatttatgtgatatggaaaatctaattaaaaaagttttttgtgtttggataaaaaatattctttcaaaataatttttgagaaactatttttaaaattaaaataatttacataatttctaatttactgacaaaaaatcattttttatagtattaaaacatttttttttcgtagcaagtatttaaacactttaaaaattgcttttcattaatttttttttatataatagttattcaaataagataaaatttatactaatattatatttttagttatattttttttgaaaaatatgtttataaataaaactgaaattagatcttatgatcattacaaaagatattaagggtatagtatatttttagttataagtaaaattaaaatctaaacgaggtctaatttgttgtagttatgactccaaaatgtattgagacatctgttgccctttaaactaattatgataataaacaaattattccctcaaaagatttaagtcattcattaagagcttttttttttcattacccaaaaaagagaagatgtcattgggtttgaaagttgggcatattattatttgttttacaaactttcacataaaaatgtgaaactttttgtctagtgtgggcacgagaaaactccaggcatgagctgtgtagtttagttgaaaaggaaattgaataaattattatctgtattcaagttagtgtttggttcacataaataggagtagggaagaaattactattccaaaaggagtatttacttttctttattatgattggaaaatccattccaataaaaattataattcatataaattaagaaattaattttcctaaataaaattagttgaaaactcattccatataccaaataaaaaattgtgtgccttatttgctattttttttttcccacatatatatatttatatattgattttttcatggaaatatatatttatatattaaagttataataatgtgtaactttttttttattttattttttattttgaagcatatatacatttaatattacaattaaattatatgaataatatttatagtatacttaaatatttaatataaaatagataataagctatttatgtttaattttatggtttaataatttgatcaaataaaatacaattttattatttatttgtttaattagtacaataatggtatttgataaaaacaaaaaccatttttaaaagagttgagggcaatttgaacaacataataaaaactattttattttatattagaaaaattttatttacatcccattttttttttttttttttgaatgagatcccaaaaacttttaaagacaacctattttaataatttttattttnnnnaaaatttatatctttaattatactaagttttttttttaacttttttctttcaattcatattcttaaagaatatatctatctaactaaaataaattaaattttaaatattataacaaaaaaattaaaataaaaaattatatgacattttcttaatttttttttaaaaataatatatacatggttttgaaaaaaaatatcaaaataaaattaaaataagtattgaaattaatataaaataatgtgagatattttttttaaaaaaaaattatgagtaatttttaaaaattatttaagtgtatttttttttttataataataaggcgtttttttttttttttttgaggagaaatactattttatcataaaacaaaaggtagttcgtttacaataacatcgtaaatcggtggagagatattactcaaccaaaaacaagcttcatccaaccctaaaacatatctagctaacccatggacaaccatgttagcattatgtttaacatggcaaatagatacattagggagagaagataaaagacaatatatgtctacaattaagtctttggaagaaaaaatcgtaggacaagaaatagtcaaagcattagaaactatgagtgcatctgtttcgatatgagtaattgtcacttccaattgtaggatccagttgatgttgtggaagagagctttggcttctattttattattattggggactaaataaacttcttattcttactacataagacataataatttttattcagttattaattctgtaatctttataaacaaaacaataaaaatttcatgcctactcctattactatttccattctattttattttgtaaccaaactttagtggctaaatataagaaaaaatttgaaactcacctttccttcactgctaattaatgcacactggggtagataatatatataacatatgtgtgtgtatatatagacacacacatctaccttttttttttttttttt

SEQ ID NO: 30140 - DNA, 2008 bp, Cannabis sativa
  modified_base (532)..(537): a, c, t, g, unknown or other
atggcatagaatgaaaccattgtagggttttctcttggcgacgtattgagcgtaggtacaggcttcagtgatatgaaaattgccaagttatggcatagaatgaaactattgtagggttttatccttgcaacgtatcgagcattggtacgagcgttagtgatatgaaattttctaggttatagaaccgaatgaaaccattttagggtttcctcttggcaacgtattcagcgtaggtacaggcatcagtgacatatgagtaccgagcatatgtacaggctcacttgattaggtgatgtgatattcctagcgacgcactgagcgtaggtacaagcgttagtgacatatgagtactgagcataggtacaatgacatatgagtatgcttgtcctcaagtaatgaaaaaaaactaaaactaacaagtcaattagtggatgacaaatcaagaaacttagaccaaggtaatttatctcataatacaaactctctttccattattcaatatgcacttcaaacaaaggactagaatttcaannnnnntaaacttaacttccaatattgtatatttattaaaactgtgtatatgtcaattctactaactctatatacatgcaattcataaagactttccttaccacaaaacattcaagataaccataggaatgtataaccaatttatctccactaaggtatcaaaaggactttataggcatgtaacgttaggcttaggtaaatggtagataagaatgtcatttaggctagtttcataccataaacttacaaatccaatcgaaaatactaaactttcaacataaatttccttttctctcgataataatttttctcaatttatacccctttgttcacataattagagttacaatcctatcaaatttatctcttgctactattttttttcacattatgatgttttctcttcaaagttgtttatattttttataacaagggaacttttcaacataatatacttggatcataatttaatatgcacgtacattctttccaaatataattctaaaaaaaaaacttctcctcccacttacatcatatttttcatttagtacacgacaaattatgtttatgaagtaaaatagggtaaggataatttatttaagttcatacctcataatcaaggataaatatgcattttatttttaatagagaataaaaattagaaaaaattagggtcaaaataggacaacaaatgataatgtattaaggttagcgttttggctcaaacgattcaaaaaaattaccttaatcatctctacacaactaagatttaggatttcccctcaataaattaatcgcacaagctctagttaactcaatatcaactaaatcaaacgaagtctacaaaggcacataaaatcataatatatagaactagtagaacaacacataagtcatatcacaatatcgaaagcaagcagaacaagttaagtacacaatccaaaagttttgcatacatactaaataatctcaaagactttagcataagttcatcatcgaactcccataagtcataagttaatgttgatatagtcatccaaaactaaaaaaaaaaacttaaatctacccataaaaactaaaataatttaaaaaaattacaaaattaaaaacatgaaaattgccttaccatcttcaaacttaaaataaatagtgtccccactgtgcaataaaattataggagagaaaataaaacagaacagctaggactacaggtccatagctgtatcaccgccatcagtagtaggtggaacgtcatcatgacccccaggtggatatggtaatcggagctcatcagtgcatgccttcagtttacgcttgcttgtttctctctctagtcctccttcaatttggattttttttttccagccaggtgctatagcgcacaacaccaaatttttctccttcgaccttgatctgtaaatcatgcataacttttacgtctgaactccaaatgagatgatttaacatgttttggaaa

SEQ ID NO: 30141 - DNA, 2449 bp, Cannabis sativa
atttaatttctcattaatcttatttttatattaataaagggtccgcccattgaaataagaattaaaaattctcttttactttctccctctcttcatcttctttttttatttttctctattttataaaattataataattttaataacacgttatcagcacgagtctctcttcaaggtaaatatgtttttgttaaaatttttgagttatgttgtgatcacaatacactaaaaaaaatatataaagaatatttagtattttagctccctgaacttttgacactagctcattctgcccctaaaatatacgacttagtatattgaccaatatgctaaaattagtattttaaatcattctctctaaaatataacagttatataatgtcccttcttttaaatctgtttcttttaccattaaaaattagtattttgatcccctgaatattgaccaatatgctaaaatctacctcattttattaaaaaaagttcatttttaaaaaattatatttttttattaattctaaaaagttaaaaaaacatttaaaaacttggtaaaagtattaaattaataaaaaagtattaagtttactttttaataaaagtattaattatacttaacatacataaattattccttaaaaaaatattttcaaactttattttattgataatcacgtatcttaaaaatcgaacaaaaattattgaaacatccaataaaacaaactaagattttgtgaagagaaaatcaaacttatttatatttacaaacacatatcttaaaaaataaacaaaaataattagaatttcaataaaaatagaaaattattatgtttattacttgaacaaatctaaattttttgagaaaaaaaccttggggctaatctcctgacgaaggaggttgatctcctggcaaagtgccaagctttagctaagatggaggtttttggcttgcaaaaccagaacatgatttatggtttggagaccatgcttggcaccaggaatcaagagaacaccatacaagctgctaacattgccaggttgaagactgacctcatcaaggtgtgaggagaatttgagggcagcccttgatggccagcatgccataaaagacatgagtacactggcttatcttcgtaactcatctatgagttcaagctatgcaaccctaacactgatctttcataattggggatgcttttttcctagagagcacactggcctaaggaaaagcgctattcgaaagcaggttggaagcggaccagaccactgtctagccagagggatcttcttcagagcaatttgatgaagcgatggccgacccacctgctgaggaggtggtcggccagggccttgaccaggtggccgaccagcctatggaggctatggccaacccacactctagtgattcagacattgcagctttcaattcagtcccacctgcacctgcacacatgtagtttcaacttattagtattttagatttatggttttatagtatacacattgttttcatcttttgtatggcctatgggccttttatctttgagcactacttatttttagccctagggctttcatgtttgtactcttggcctatagatactctgtttttgaacattactattttttagccatgttgctttttatcatcgattctgtgaccgaccaggcagtctttaatcatggatatcttcttatagccttgacatgtaagtatccgaatttacttttctttatgccaagctgaagtatgtctgcacctgacttagaagcaggtttagtagcttattttctaagcattaaaatttttctgcataagttctttatgctaatttgatgcattgtacggtgtgggtgccctcaagtgagcacgtagacttacggtctcttggtcacttaaaatttaccaagtttcatagatcttgcttgggaattttcttagggtgctacatgttgtacgcatgtggaactggaaaaggataactttaagaagttaagtttagacacaataatttgaacataaacattttttttcattcattatttggtctttattgttgtccaacttacataaattgaatctacaagcttacatataacacatattttcttctagatatcaaatgactacccctgcttgacttgcacaacagaggtcatcgttgaagaacggtaggaggccatgccaaaaaggtcgtcagtactagctcttttacactctaatgttgagttagtaaaactgctactgcaaagtaatgttctataagctggttagtaatagtatttgcaaatgtgctctccattctagtatcttggtaggagaacaagctccatattctcgttgtaccttcccagcttgtaagctcccttactagttatctctataacttgataggaaccttcccagttgggtccaaacactcctaccgctaaatttttggtgttcacaaaa

SEQ ID NO: 30142 - DNA, 1424 bp, Cannabis sativa
  modified_base (544)..(554): a, c, t, g, unknown or other
ataattcacttgcacaataaattttaaatgcatgcaaattctaaactcgaaaatatatgttgaacatgagcaaaatagctcaattgacaaaatcaaattaaaatttatatatgcagcgcgttttatactcattatgagtctcgagttagcttttaaatctcgaaacaaaggcctggaacactaatggctcctactggccgagatgctcatcgaagctccaccgtaggtggtggcgattctcagtcaaatgagacgtacgaaagatcagtccacagattcttgaagctcttgatgatgggaaaccaaaaccaagttcctttcgcttgttgaccaccggagatggccaggtcaaaactaaaaagttttggatccagtgagaaagagagagacaaaaatggagaaggaggaactcaagggatcacgtgagtgtgggtttcaaggtactttgtgttcatctgtgatctctattttttccattaatggtcgtagacacctcgtcgacatgaggccgaacgaaacgctaagagagagagagagagagagnnnnnnnnnnngagagagagagagagagaaggcagaagacacaaatctgaaaaatatcaataccaagagaggaaggagggattcatcacccaacgtcttcaatgattgacggtcgaagatggggcaatgtggccctctacccttttacgtcaaagagagaaatagacgagagaggagagtgagcatgagagagagaccaagagaggaggggcaaagtttgtttgggttgaaggaggaagaagaagaagaagttatagggttgggatggttctagtcgctccagaagaaaaagaaaaagaaacaaattatatttttttactttctaaattgttttttttaattttaaaataattttttgttatatttaaaattaaaattatgtggactactaaaaattttccacgtgtacacttctatacatgtgggcagtccaatgtgacactaaactgaaatttttggacgaaagtataaatatcaaaacggaatgaaaacttagtagattttgtcgtcgaaaaataaatttatgaagttaagtattaaaatccataaagttcggataattttacagctaatatctcttttttttatatatttttaaaaatttaaattttaaatcaatcagaaatcaagtcatcaacttgttttatactaccaaagtttttgtttactaatttttgacaattttattctatttttgtactattttttttttccagaaagttgtttattttaacttcatacttcttaattctttttttcttctttcattttttaacaataaaagaaatagttacattaaaaatataaataataatctataacctttatgaaaaaaagaatgttttaggcttccactaagtaaattacttaattaactttta

SEQ ID NO: 30143 - DNA, 3663 bp, Cannabis sativa
agaaactcaaactgtaaatttgaataaaaaaaagttaaaaaacagtatatggggtaattcccctaaagaaatataaagaataaaaaaaaaatttataaaagttttaatgaataaaaaagagtaaaaaaaaatagattggaaagtataaatgtgaaaatactcttaaaaaaattagtatattaagtaaatactattgtagaaagacatgctattaatttttttttttttttacatatttatctaattataacgttgttttacgttttatatatatattatagtaatgaagctcaggcagttcatgctattttcaactttgtacgagacaaattaagatccacatcttcatcttatcataatttgaagcaaggaattgttggaattgacgactcgattgcagatctcaacaaactattgtcaaactcagcaagggtaggcatttgtggcatgggtggcctgggtaagaccaccctagctgaaattgtcttcaatcaatcttgttatcaatacgatagtcattgtttatttccaaatgttcgagaagaataccaaagtcatggaccacataatttgaaagttaaattttttcgtcaattgtcgaaagaacaaaatgtacattatgaagatttgcttgggctaaagaaaaggctacactatcaaaagttgctcatagttcttgatgatgtggatgatttggaggagtataattgcttacttgaagatagtcattcttggttaaactctgaaagtaaagttattataacaagcagaaatcaacaagtacttcggaatattattggcaatgatgagaggatgatatacaacttggaggaactaaaggaggaggaagctcttgaacttttttgtttgcatgccttcaaaagaaaatcgcccgaagaaagttacgaagatctttcgttgaagtttgtgaattatgctcaaggccttccactagctcttaaagttttgggttctcttttattttcgaaaagcagagaagcatggcaaagtttgctacgccaaataaaagtagaccctgataaaaaagttataagtaaattagaaataagttttgatgggctatctcttaaacagaagagtatatttcttgacatagcatgtttctttcggggtgaaaaaaaatgttttgtgaaagaaatattggatgattgtggtgattttgacattgccatggaagttctttttgacaggtgtttggtaactgtttctgatggtgatacacttcaaatgcatgattttttgcaagaaatgggttggtcaattgctcgtggaccaaaccataagtgcttggaaaattatagtagattatggatggtcaaagatatttgtggtttcttgaaaagtaataaagtaagtgttaattattctataaatgatatattagaaagtcttaataataatgttctcaatgccaattgattttaatatcaaaactcatacatcttactatacacttatttgtaatgatggaattagaataaatttgtattgatttaaatttgcttaggtagatatgaagaataagtatttaatgattattatggtaattgaagtagtgatgttaatgagtagagttgtagatttagtatgtgagaatgattttgacttagaagagagagttttatgagaaattatatagtaaggtttattgatagtttggatgttggtttgtttggtgttggttgttacactagctcctcaacccaaacttggtatttatagggagctaagggttgatactacaattttctaattttttttttattttgaattacaatttaactttctaagaacttctaaaattttctaagtaatttcttagcttacaaatatagtttcaaggtaattctagttttctctcaattttcttggttttgtatagttaatactagaattttctagataagaaaaatgtagaattgtgtagcacttttcattgtaattttgtgattaattgttatgagtaatattattagttgttcaaattgaaaaagttgtatatgtgtgaggatttattaatttgtttaaattttcaattcttaggctactcccacaattgaaggaatatttcatgttgatggtggctattacagagtaagagatagaaaagaggtcataaacttagacccttcaatcttcaaaaaaatgccaagtctaagattacttaatctatcagcaaaaaattctcgaatacaatttggattccctgatggtcttcatggcacttttcctgatgagattagatacttgggatggtattattaccctttggaatctttagggacagatttttcaccacagaatcttgtttatcttagtatggagagaagccaacttaaggagctgtggaaagaaaatcaggtatatgtgtaaataatatattgatcattagtttatattctcattttttatttgtctcaacatataaatatatacatatatatatatatgcaggatattgacaacttgaaatatgtcattctttctcactcaaagaagcttacttgtctcccgaatctctctcaagctaatcttcaaatgctatgtctacatggttgtacaagtttacttaaccttcccccattaagatttcacaacatttttgacaatcatccaaataaagaaaatgaagtgatacacaagtataatgatttgatgcttcagtttataaattacgaggcatatgaaaaaattccatttgatgatgaagagcgtataaatttgacccattcatggaatcaatcccatccttgctgaagtatgcgtggacagatggggcctataattgcttgcttgatctcaaagggtgctcgaagctcacaactcttctagaaatgtctggtaatataaaatttatatgtttgcgtttgacagcaataaaagaactgcacccttcgattggctctctcgaaaatcttcttgtacttgatctttgtttttgtaaacatctaaggcaacttccaaatgatatttgtgagttagaatcattggaatacttagatatgtatggatgtgcatccatcgacatgtttcctaagcttccgaaaagtataaaaggattagatttgagtagaacatcgatacaacaagttgattcatcatcattcgactgtttaccttctctcgaaatcttatacatgagtgattgcaagaagcttgaaagtctcccaactattctttgtaagttgaagtctcttgtgtttcttagtcttaaaggttgctggcaattgaaaagctttccagaaatcttggagcctatggagaaactagagaaactttatttaaatagaactgggattgaagtgcttccatcgtcaatagagaatcttgttgtgcttagctatttagacttgagtgggtgtaaaaatctcaagtctattccaaccaccatctttaacatgcccaacatttatgatatctggattgatgaatatccaaaactccaaattctgccatatgatgattcttcaagtgaaaccacttctagtcaagtactactaacacatgatcaacaatatatgtgcaaaagtggttgttgttctaaagcaagtctaaatttgcaatatgatggtgttgatttcacctgttgtcagtgctttctattctacaccatacataacattttggctacccaatatttca

SEQ ID NO: 30144 - DNA, 4117 bp, Cannabis sativa
  modified_base (648)..(662): a, c, t, g, unknown or other
  modified_base (1318)..(1339): a, c, t, g, unknown or other
actattatactttgtaatagtaattaaaaaattattattattcgtcctaaatttatcttcggaattaatgaaaatactcatctagttaaaatccaaacattcaaatttaatttaaaataatataaaatttagctaattctaaatatcaaatttgaacataatttttaataagaaaataaacaatatgaacaaatttattattaattgcaaattaattatatttagacatggatgctgaccctttacgtggcaacatctaataatttatttttttttatttaaaaaaaagtcacccaataatttctcataaactacgaattttattataatagccacattttatatagaatagatatttaaaaatagttatatgtacaattaacattttttaaacgtaaaaaatattaatttaaacatttttttatgcaatggccttagacactttagagtattttcaatacaaacaatgcttagagtatctccaataagtgtatatttttggttaaatttggcctaaaatataccataaagcatatatatatatatatataaatttttttttttgtatttgtactttaataaaaggtgcaaattaattataaaaattaatattatcattaacgttcattaaaaatatacaaaataatnnnnnnnnnnnnnnntattttaatatcttataaatatatcttattcgaagtcaatattgagtagcattaataagtggcaaagaggtaattaaaaaatatagtatttattgtgggttaaaatttggctatgctatcttttgtgctaaatttagcacaatttttagcttaggccaaatttagcacacattttatatcaccattggagttaaattttaacaaaatatttaaaaaaatgacaattttaacaaaatattctaaaaaataacaatactctaaaatataatattttattttctctttcctccacattatttctggtatcttcctactaaaaaatactctaatgctaagcgactctaaaaattatgtctcatgcactattatttaatatatcattcattttaattataatagtccattttattattttttgagtaatttacggcataaatacttaagttaaactctcctaagtttaatttttggcggtaagaatacttaagttatatttttagaactctgtaggtacctaatttaagtcattatccatgtgtcatttttttattagtacatttaaaaatttaatgacttggaccaatgaggaattgccatgtggcaattcacttaaaacttaacaggcaagtaactacaaaagtttcaaaattataacnnnnnnnnnnnnnnnnnnnnnnattaaacttaggtatttatttataactgagagtaaaacttaagtatttataccgcaaattactcttatttttttaaaaaaacaaaacaaataacttttatttttatttgaaattaaaaaaaaaaaaaaaaagtcagatatcaccattgcttttgtagttcaaccatttttctccaatatatagccacacttaaatgtaccccacatctaaaaaatcaaaatctcctgttaaaaggtagtgtcctatattctgttaaattaattaaaatttgacacattaattaattatttatttaagaaaaaattaaacctctaattgaataaacaaaaatagttaacataataaatataaattagattagttggtgtgtcaaattttaattggtttaacacaatatagggtactaatttttaataggggatgttgattccctccaacaagctcggatgagcaacgttaatacatagtatagaacattggagttgcttatatatagtgttgctataaatgtcattacacacaatttattcacacacttctctccaaaaaagacagcaaaacaaaaaaagaaaaaaataacaaattggtgtaaaagaaaaagaaaaaggtgataattaaactatggagctaaggattacctcaagagaaactgtcaaaccatcttccctttcgaagtaccatcttcaaccctacaaactatgcctcttcgatcagtttactcccatgacatacgtctcactcgtcatcttctaccgcacccctcttcttcacaactccaattccaacctaacctacctaaaaaactctctctcggaaaccttaaatctcttctacccactttcagggaagaccaaagacaacctctacgtcgatgacttcgacgccggtgtcacctacatggaggccgaagtcagttgcagcatggccgagtttttcaagctcggccaaaccgacttgctcaacgagctcgtcccctttcctccactacgcaatgaagtagtggaagcttcaccaaaaagagaagtactaattcctcatgttgttgggtttcaagttaacgttttcgaatgtggcggaatagctttgggtacttctttcagccacaaggtagccgatgcaggaaccatgagccattttctcaaggcttgggctacaatatcttctcgccaccattctgcttcttctgatcaggatggtataataaccggccctaactgctcccacgcgtccttggttttcccacctttaaactcggtgcctcaaaaatacaaaaccacgacggaaaagatgtggttcaacaagaaaagcttagtgacaaaaagagttgtgtttgacgagaacagcatcgcggttcttaaggacttggccaagagcgaccaagtccttaggccgtcgcgcaacgatgtgctgacgtgtttcatctggaaacacgcttctattgctgcagcgacggctaaaggaaggaaagctaggccttctgttgcaggcctagctgtgaacctgaggccaagaatgaaatccaaattagctttggacaactctattgggaatctcttctggtggaccagatcagcaactgtccccgacgtccgtacagtggggataagtgaacttgtgagagtgatgagggaatcgctggtgagttttaatgagagtgtgaagagatcggaggagagcgatgatgttggtttggccatggtttcggagtactacgatgcaatggaaacttggtttgagtcgagggaaacggactattatatattcacgaactggagtgggttctacagcgaggtggatttcgggtggggtaagccggtatggatcggggcccatgggggaattggaggtgagagatttatgaaagttcaggtgttggtggagataccaggtgggaagggagtggaggcgtttttgacattggaagaagatgaaatggtagttctggaaaaagatcccaaatttctggagtttgcttctttcaatcctcaatatgttcctggcggggattaattatatatttatcatcatttgatgactgatttaagaagaaagtattttgttagtcatatataattaactaaatagcctccaactactgtttgtgtgtggtatcatgtgttttttttagtggaaaagtgtggtgtcatatgtttaataataattccatgcctatgtatgaatattttccgtaataataacgttttcctattgtaaaacggaggagtacacatggaaattgaaatatttgccaaacatgtgcaatttttcaaagaaaataataatattaataataataatttaatttgtatatatgggctgtgactatcaaaaaagcaaaacaatttaggggtgaaaagggttcatcatgtgcatttaaaggaaagaatggcgaaactatgaggctactgatcaagggagttgatattagagacaaatagtaatatggtgaagcaaaaaatgaagagtttcataacacagcagcagcaactgctaaattgcaaatattctatcagctatgattatgagttgttaaagaccatggttgaaaaagtgaataggcatgaatagtagggtcgggcataggtataggcgggttaagctcgtgtttagagcccatactttttaggaactaaaataaaaaatgaaaagtcttatatttaagtaaaattaagtctattgtaaacaatagatattctattaactacattacaatagtgttagttcgagcccactgtgacaatcagtagttccgtgatccgtaaggggaaacaccgggta

SEQ ID NO: 30145 - DNA, 2695 bp, Cannabis sativa
  modified_base (251)..(251): a, c, t, g, unknown or other
tctggaacccccatcttgagggaacagttagcctttcagaactggaggacgactagcttccctgaagattactttcgtaatggacaagctagacttccgaaactcattttcagatgacttctcacgatttgctcagcaaaaagtaaagttttaaatgtacaaatatacattttgctcagtaaaaactaagaaaataactgaaaaacaatgtgatttcaacctcacgctacaaatttttttacttttagtcncaacaaaatttgtgactaaaagtgaaaaaattgtgattaattataattatcattcttatgtttgtgactaaaaggtctgtgactaaatatattaatcataaaaatcacaatttgtatggagactaaaactaaattagtgactacttgcatgtatctaaatattatgttttagtcacaagtaactttttatattgcgactaaaagtcacatttagttacaaaaaatttatgttttgactaaaatattgtcactaaaagtaggttttttctatagtgataatataaatataaataaactataaaataaaagaaaaataatttattatttataccaaaaatgtatttttataaataaaaaaaagtttaaaaggtaaaaaaaaaattatacatattgatatattcttataatttattaaatttttggtcaattatataatgtttatttactataggtgattttgttaagtgaaaaaactacaaataagtggtaaaaacaaaatttattgaagtatatggatacaagataaagatatgagtgtaattaataaatttggggtgttgggctaaaatattgtctgaattatataatgacacgtagtgtatatagtctgaatttctattgaatcaattctccattattacttattgtttgtttgttgggataataccattacattttctcagtaatgacagagatatttactgtcaaatattacacttatttgttttatagtgataaataatccaaaaactgcacaatttcttaagaggtgaagttaataatatcatttctcactttttagtcaaactaactagtttaatatatagtttgaaatgtctatatatattgaaaatgatcacatgcattaatcatattcaatagtaaaatgttttttacgttcaattatataataacaaagcgagcaaatacaaataaaacaacaacgttacgtcgatcaattaaataattctctggctataattaattaaagagtttaatttattttctttttcttttttttttcagtacgtagtaatttataatagttttttacgtacatactttttatgaatttatatgatgaattagggcacaaaaagaattagtaattaaactacatcatgaaacgggcgggaaaaatctcatccaaaatcaacaatagaacacttaaatatttatcgtcccttccttcaaaaaaaaaaaaaaatatttatcgtccctaaaagttttatgggtaatatttatcgtccttaaagccgttcgaagtgaaaagaagttactaattaaatttttaaaggagtgacacatcgatcaaagtcgtttataatacctatatcttaaaatagtcgtctctaatatttaaaattgttgtagtgacataccaaaccacactatctctctcttttttttttttgaaaagacaaagtgtatcttaaaatagcaactgagaaaatgggaaccacactatctctcttggttgagcaaaaaatgtaaaattttcattgtggacaaattcacatctagtttggtaaaaaaaaattgtatatttttattcccataacagcatcatcacgtctttaataattagaatataggtacaaaatatgactaagcttatatagaacaaaaatggtttgtcttgtgtaaataattcgaatctcataaaatattcataacaacgtctttaaaataattcaaaaggtaaattacaaagaatatatgttaaaattgtattccatccaatgagttatataaaagcttaaaattttacattataaatattattcgaacaatattttaataatttctcgttcttctttattttctatatatatatttaatatttaatatttaatacttttaatttttttgtttatataagttaaatatataataaatatcatatttaaatgatatagagaaagaaataagaaaactggcataaggtagaagtgagaaaataaaattttaataaagtattttagaaaataaaataagtataagctgatggaatactctaaattccaaagtgatcatatatttaatttctacaattataattaaattgtgtaattatttgaaaaacatacttttatatgattgtgttggatagggccagtagctatatatagtacctatataattagttaatatataaaaatagtgatcatactagctagctagtacctatatatatatctatgtgtatatatatgtgtatacttataattagagtataagcttctagattgagcattaataatattaattataaccacttttgtggaggaaacgggtatgcatgcactataaacttcacatcaaaattaagttgcacgcttcactcatactatttatatatatatatatatctatatttatatataatcttttattataattttttaaataatgtttacgttcaaaattcgttatgatgataa

SEQ ID NO: 30146 - DNA, 1887 bp, Cannabis sativa
  modified_base (1842)..(1842): a, c, t, g, unknown or other
cacttaattttgtatcacactttataataacatatacattatatgcatgtgtccacataaaatttttaatccaacagatcatccataacatgaaaatttctaacaatcaaataagcaacccgattagcaaaatattttacaaaaactaaatcaacaaatggttgacccaagaatagccttacactcctcaataacaagaccaaaagtaaataacatttttaacaaattacgaatagactcaacatcactaaacaatctgatactctacaacatccaaatgcgaattaattttttttttttttttggtgttttgacaaaactatttattcattttaagaatatggcatattctgataggttggacgatgcagaataacttctaacaaaatacaaatgaaagagaaaaaatatatatattgttttcatatacacataaaaaaatcttatatattattagactcacaccacacacatataaccaaatacctttcgaacaaccacgacgacgaaataaataaagcatttcttaaaccaatatatatgtatattacgtataaacaaacgttttttttttatatataaatttaatttattcctcattaaatagcacaaatctgggtataaatatctgaagagttgaattgaaaaagtataagtttgttttgttatctttttattaattaactaaaagaatatgcgtacatttgctaaagtactgttataaaaagaagcatagctaggtttgatttgtattaattaacgacaagtcatacgtagtcaaatcaaaacatatactctcactcactatatttttttatgttaaagttgtgcttaatactttcctatgtgtcaatatcgctattgattcaattaagtgtcgtgttccatataatttaatataataatttttaaagagtatcactaactaatcacaatacgacatgtcgagaaagtactaacaatgttcattttttatagttatgactcatattaattaataaatatctttttttaatattatagtaaaaaattaattatttgtatttgtcttccttaacacgtctaaagtttgaattgtaatcgcaacttacctttattagtagatagagacgagtagtggagcattcattcatggccattttttctttaaaaaaagtgatgtgtagaaaaatttacatcattcattaaaattttacaaaaaaaaaaattcaaaaataggtgaatacattttgttttttacattttgaactttttttatttaaaaaaatattttttcagtaaaaaaataaattatttttttttattgttttataatttatttataattgtatcatatagttgtcaattgtcatgttattttttttttgttattttatagttgattaatagtttttgtgagaaagatttttggttatttttttttagttattttcttaatttttacttaagaaaatgtatttttataattttaaaactttacaaacatatttttgtaaataaaaattttaaaccgtaaaattataaataaaatataaaaaaaatgatattttttaaatttcccttatattgggttttttttttcatcaattttaaccaaaaaaaaaaaagtaacaatattataaaaatacttcagctagccaaataaacaaatatacagtttaaataaaaaaaaaattacacaaatatcacttacatacaccttcaacccagaattcatgcttcctgacagtaacggacccagaatttttactttgtggggttatttatcatttaaaaatatttatacctatattataatcttttttactacatttatttaattttatgggggctttttctacnattttgatctataattatcaaatttaaaaaattacatttaatttt

SEQ ID NO: 30147 - DNA, 1325 bp, Cannabis sativa
ttcctctattgttattgtagttttctcttctcattgtggtttctacagcttctccacttagaagagtggagtccactacttgatcaactctttctggcaatgccatctgaacaaagttatggagatttagatcatccttgaatgatccatcagttgggctccttcctgtaaacatctccatcactaagattccaaaactatacatatccccttgctttgatggctcactgcccatcgcatactctgcatctcataaattgttaaatatacaattctttattaaaatatatgttttgtacaaaaaaagttaatatctagaaattaatgatttttgtacatctaacttctgcaaatgttaaaaaaagaataaattgattgggttcgcgtcatgtgcattaaaaatatataagatagtacatcaaactttgtgtaatcttagtccaagaaaaagtatctcaatgcactctagcccaaaaataaacgattagtcatttcagtactatttgcattatttttgtgataccaatgtagtttgattctttgccactaagcttaatttacttatctatacttttgcagaaaaaaaactatgtagagttcaattattacctggtggtgcatagccaatggttcctttcattccaattgtgctgctttgagtttcacacaattgattggtgttaaagatcagctttgctaatccaaaatcactgacatgtgcaaccatttcattgtcaagaagaacattgcttggtttcaaatcacaatgaatgattggatcgtcacaatgattatgaagatagcatattgcagaggccacgtcacttgctatagttagcctctgaaaaaacttcaaaccccttgtttggttttctccatgcaaccacttatctaggcttccatttgtcatgtactcaaagactaaagccttaaactcattcccattaaaatctatgcttgagcagcatgtcaagatcttaacaagatttcggtgtcgaatatttctcaatgcgttacattcggcaatgaaactcttggaagctcctttctggtttagattgaggacttttacagcaacttcatctccttcttgatcaagtacgcctttgtatacagagccaaagctaccaattccaatcatcatgctttgagagaatccattggtagcctggtgtaaactatggtaagaaaccttcgaaagaaagttgatagtagagagttcagaattagataaagatgatctccttattgatttcctcctccaaaacagaaatgatagtgatgcaacaaataagacagaggcaatcacacagacaattatgatt

SEQ ID NO: 30148 - DNA, 3290 bp, Cannabis sativa
ccgttacacaatacacacacacacacactccacgactcacatgcgagcccccgcatgggctcccacacgagcccccaactcacgcgcgcgcacacgcccattacacaacacacagacacactccacggctcgcatgtgagccccccgcatgggctcacacgcgagccccaactcatgcacacacctgtcatttaccaaaacaaatttacaaatatttattttaatacttccaattatttcagtataaaagtaagttaggatcgatccgacaaagactatgcttattaaattattcaataattaatgacaataattagaaagaggaattttaatatgagaattaaataaaatacaatagaagaacaattaaatgtgataatactattattttaattctaatacttttaattatttcagtataaaagtaagtaagagctgatcccacgagaactatgattaatttattattcactatcaaacaaaaattcaagtttcaattaaatagcataaaagaaaataaaaaataaatgataattacaattttaaaagcagttaagaattattctccacctccaacaattaatcaagaacaacaataataaatattatattttatttcaaaattagactattaaccccgcagataattacttatctcagtctccttaatacaatcaattatggagaagtgctcaataattaaatctttttattaaacagtagacttacgaagcatgcaatctatttaacttgggaaaagtattaaattctgtgaagacaagttaatttaagcaacaaatcaatttagcatttaattcatttaacttaggttatatttttcatcacagataatgatactcgtcacaataccattaaaaacaaattatcacttaaacctagaatcttagactattaggtgaatagaattttaagaatgatagtagaataatataaaacctaatttagcggtcgtttaaacaagatcaaaatattaatcataaaattaagcatagaagaatataaacaattcaatgtgaaggaataaaataataatatttatcaaagcattcaaaaagttatggctcaagttttgaaataactcttatcctaaaagaggactactccataatttcaaacataatcacaagcataatataaatgaaaataagaagagataataagcaaaactagatgtagatgtagatttttctcttctcttgagttctccctggtatttgatgtgtgtcgtgtaccacaacgaatttactaatctttatttctatattgccaattacttcaatataacagtaaatacaggtcgattccacgaggactgatatcaatttattattcaaaaattagtaacaagaattaaaaagagggattgtaatgatgaagattaaataacataaattaaaaaaataaatagaacgtgatactacgatattcaagaaatagttaaaaggttaatctccacacttgacaatcatccttaattcctaatagtgaatgttattttagatttctaatcaaactattaatcccacagataacgcatccacgaagcatgtaatttatttaacttagataaagctttaagttcaatagagatagataaatctaggcaataataatgaaatatataattcatttaaattaggttctattcttcgtcacattaaaaatacctattgataatattataaattgtaatttatcacaaacatttagtatcctagactattaggtgaatagtaatcctaagatgacaatagattaaagtaaaacttaatttagtgatcatctaaataagattgaaataataatcataacattgaatataaaagaataaaagcaattcgatataatggaaactaaaaattaacattcatcatagaaattaaagattcatgtcttgagttttgaaataacccttaaagaaactactaagaactagacattataataaaaatcataatataaagtatgagtttagggagaagaaaaagaataatgatgtagaacaattggttctgcaatctccgtattgttctctctctctctctctctcatttgcggttcaaaaattcccaaaaacgaaccctaaaagtcctataaaacacctaaaaatcctatgattttaaaaaagataaaatttggaaaaatctagagtcgtgctctcgccgcggcgaagattgaggctcgccgcagccatgacttgctgtcgaaatttttttgtagcgtgtttagattaatattttggccataacttctttaacacaattcagaattaggcgattcaagatgttcaaaaaaactgagaacaagatttaaaactttcatgttcagctttaagtctagttctacttctaaggtcatcaaactttacaattaagttttgccttattaaactgagctcatcgacttccactattttctaccaaaatgtgctaaaatctctctaaatgactccaaatgcatgattagtctttaagataatctaacaaattataaacacactaatcaataatttaaagaaccaatttaaaaatattaatacataaattggtcatatttatagacaaaatatcgacttatcaaatttccccacacttaactcatgcttgtcatcgagtaagttaatgataaaatgaatgatgtttaaataaattggtctttatgaaaaataattttaatttcaaaaattatatatctacttataattttgagaaaaatccaaacttttcaatcattagaattttaactcaagataattacttttcaaatttaattttttatgtgtgtgttcaatcaacatatcatattattaacattcaaatcaattcatgtatgccaacaatcaatgtttatctcaaaataaatgtgtatttcaacaaaaatctactccataagcttaattatcatcgaactattctcaactaatataattacacgcaatctaaagatcaataggactttatagacttataatgtaagacttgggtgaaagatagataagaaagttgatttaagctcaaatcataccataacatatatatattcaacgttatctcaaataattcatatttgtactcctcaatcacttctctctacagttcaatcttgtatctttttttttcataaaatttacgattaccccacacttttgcaagtattcatatatttctcattgaattttttattcattttttgtaaatacttacaacttacaaacattcattcattctaagagaatagtaaccataacttatacataatcatcaatattt

SEQ ID NO: 30149 - DNA, 958 bp, Cannabis sativa
cattcattctgtgagtgtaagggcccaatagaggcttgaagcagagacgttacaatctatctgagaacagatgttatattgaccattccctcctaagtaacgagcttgaaaaacttctcatctaccatgtggctcacagtttgactctatgaccttggattggacgacttgtttccttggatttcctgagtgtttccagttggaaattcttttggcccgtactaaggtccaatggggatgtagacatttgtcctttggctcggattctatataatcggagtgtctgccattgatttttgtccagttatctgataggcctgcctaaccaacatggtagcctgcttggaacggttatcaattacctcttactaagctctcataatttccatttgttgatccatccactcttagaattagcgtctttactcctcaaaagaaaaatttatagctgctttggtatcttgttgattgtggtgaagagtgttggtatgctcttgcattttccctaaagtgggttgtaagttctgcagttcgatgtcatcaccaatggtcctttagggatttccaacagatggatttagggaagtatacttggcctgggtactggtagctccagttttttacacgccctgagtgaacccagccaaaaggtttatcactccttctcttataaattgaggacctaccggaggttgaggaataattaggtcaggattcaacctcactggatcttttctatttgtaggagtttgcacattaggatctgtaatcaccgaatcaatcgtatcgttttgatttcctccccttgtagttatatccatcttcgtgtgtcttaaaaagactcaaacaaagattgtgtctctctgctctcagtgaaagtactaaaaaattgatctcgtttttagccaacgacaatgagtcaaattaaagcgattaaaaataattaaataacaataat

SEQ ID NO: 30150 - DNA, 1441 bp, Cannabis sativa
ttcgaaaataataaaataaaattaaataattaattaaatttaaaattaaacctataaatttgaaaaattcggttttcaacaaacataaatatctattcaaaagatgcaaacaaacttttcagattttatgttattttaaaatagaataaaattgggaccaattgcttgggatcatgtttgccaaccaaaagaagctggaggaatcagtttgaaaagaatagcagagtggaaaatagcagcaatgacaaaatatatgtgggcaattgcgaacaaagaagataacctatggattaaatggatacattgtgtatacattaaatgagaggattggtggacttatcaagctccacctcaggcaagctagtactggaggaaattgaatttggtcaaaactcaaatcaaaggtgttatggacactcaacacttcacaagcaccaaatacagtatatcaaatggctacaagactcttttccctccctaaagcaaagtaaaatggagtcatgaggtatggaatagattcaatattcctaggcatagattttgcttgtggattacaatctaagatagacttaaaactagagaaagattggacaaactcaacatcattagagaagactactgcttgttctgtaaggatcatcttgaaacttcagagcaccttttcttctcttgtacattttctactatttgtctttctcaagttaaagcttggctaggttggagagttgaagcaacagatttgagcaggctgtgcaggtggctggaaagagcaaaattaagcaggtttcggaaggcagttataactgctgcagtggctgctttggtgtaccatatatggaaaaatcacaatgagatgctatagaattcagggagaatagcaaaagatattgttgtccatgccacaatggaagatgtaaagaatagagtgctgtgtaattggccaaagaaccacaaaccagctgataccgactggtttgcactactatagcatcattcctttttgttttcagggtcagttttctttttgttgcagctgtgaaataggcgctgccactacttgtaaatatatatatttatacaaggaaaggaagaaagaaagaggataagttgtgtaattacaattgattgtattgtatagaaagaaaccaggtcttcttattgaagatgctaataggctgtaaatgttttttagagtaatgaagtacatgattgattgattaaaaaaatagaataaaattaaatatccaataaaataaaatgataattaatatcatttatctgattttataatttaatttaaataaaataacaaaattttgaaagttaacaaaatatctagttagatttttaatattttctagattaaaatgaacttattttaaatttcaaataaggtcattttataaaattaattaaataatctaaaatataaaatatctga

SEQ ID NO: 30151 - DNA, 1828 bp, Cannabis sativa
  modified_base (47)..(49): a, c, t, g, unknown or other
  modified_base (261)..(265): a, c, t, g, unknown or other
  modified_base (798)..(808): a, c, t, g, unknown or other
  modified_base (1785)..(1801): a, c, t, g, unknown or other
tttgcatgtaattgagatttatatctctgagaagactataaattacnnnagtaaacctgctattgcatagaatttggtaacagaaagataatcatattatgccataatcaataggtacaattgaaatcgaagcgccaactttaatcattgttaatttctttttttcttgatttatttgcttcttaatttcactgtttctttagtgtttctaaatttaattttctcttaattttgacataaccaaatagaagtaaagatttnnnnntaaagtacttaactacaattcttgtgggatcgacctcactctttgtgagtctaatacttgttaccgatacgtacacttgcgtgttaaaaataccacaacacctggatcttctctccttcgatttggttagacatagtcttcctcactatgctaggtattgctttgacatatgtgggcatactctcaattcaccaaaggcttcgaaaatttgaggaagaagaagaagaaatttcgaattacaaaaggctctctttattttctatttttctctgacaaagtagtcttaagtcaatctagaaaacaagagtcttcttattctatttataggattccttctagggctaggtttagaattgaatggaattaaaaaaaaatgataaaattggttttaattaacccttatggtcgaacccttagtagaccctactggattttaattttgccattttatttaaaacttatctttttctttcacaaataccataatttaattctaactctataaatgttaattctatctatttaataattannnnnnnnnnncaaataaaattgtcatttaacttcattattaattagaccttataaagtatcttaattaataaataaactctaaatcatcttttcttctcaaataagcccttacttagtgaaaaaaattcataaacaagacatggtcttatttagaattctaattgattaattaaaaccaatttattgagactacaaaataatattatcctagttagtgttggtcctatgtaatcaagctcccaataagtagattcaaaatttactaagtaaattttttaacttattaattcctcatgactccactatagattcagaattgcactcctaattacatagaatgctctatataccaagaaaaatgtgttttaaattacccattgtttcaatctaaatagtcaaaaaacatctatagataatccacatccagtaataataaatttatcattctactcttttgattcgtagtgaaaaatacacttttattctttcttaaatgctaaataaattaagtataaatcattatatttatgcaattaatgtaaaatattttgtatctgattttgacttagtttatgtttattttgcacaaataaaatgtattttccatatatttgttggatagaaaggagttggaatagagataaacaattggcgtttttgaagctttaaagtccaacttaaaatgttggtcaaattgcataatggcccagcccaacacattcttctccccacacgtatccttgggaccttggctgtccactcttcttctccaaattcaatcacatgcctcaccctcctacttaactctctaattactaaaccaattatttctaagcccacgaaaatggtataaagggattcaatcacattttgggtatgttggttatattatgggccaatgatatagtttgatcaagcttcaaagttttgagccacttcaatttggggtaagttgaaaaagaccacttttattaatcaattaatcnnnnnnnnnnnnnnnnntatatttaattgaaacatacctctttt

SEQ ID NO: 30152 - DNA, 2728 bp, Cannabis sativa
aaaaaatacaaacgcatatataaaatataaaatataaaatattaataaaaaaataattaataaattaaacgggtcccgtcggggcggggagtatcatctccgtcccagtttaacatttggggataaaatttgattccgtccctgccccgttctccatttagacggagaattcccgccccattaggggcgatcctcgcggggccattcccatgggaaaaatgtgcatccgtagtgtggtgctagcagttatgttctttactttttccgcatcacactaatgttttcatttcgaatgctgtaattcccaaaatagcctaaactatgaaaaaagaaatagtttttgtttgacagctttattttttcttctgaaaattgaagcaaccgaaaagtataacgaaccctataaagtcggctatggcgttttctaacgtggtcatagctccagcgtcagcgacgaattcggaactgccacgacactgtgtcccctacatgttctcttaacacaatcatgagccaagaacactctagaagcatttctcccatggatgatttactcaataatctccccaacgtctacccacaacaacaacaacaacaaccgcaacaacagcttcaggattctcagccactggcttcgttcccgatcgccggagcagacgaatcttggtcaggagccgtggccggtgggagcgattggaaaactgattccgtcgagatcggcagcgggatgaccttggaggattacttgacgcacaatgaagctgttagagaagacgttagggctcccttaggatacggtcagttccatatgccaccaccgttgcaatttcaggcagtggaaaatccgatcggcgtttgtgggaatgggagcggtagtggtagttcgggaagagggaagaggcaagcttttgaaccacctgttgataaggccactgcacagaagcagagaaggatgattaagaatagagaatctgctgccaggtcaagggagcgcaaacaggtttggtttacagtttctttcttttaccattttcttgggtgaattctgtttggttgctctggaaattagaaaaatgtgtgaaaataatgtcccatctaatacgattgggaaaagtgaaaagaatagtaaattctttagttagttagtgaaaggatatcagcttcttagactaagtatggagacaagtagataatctaattgctaagctctggtcatttgttagagaatatttttcttctattttctttttctattttttgtgtggcaagaaaggatgagttcagattgattttctaaaatacattttgagactttccgtaaactttttgattcgagttctctttgagcaggcgaaaaccaccgagtctctatcccttaatgcctggtctactacttgcagccaagccacgagggtataagtaggagacttcgtcccatagcctcaaatgaggttagaatagttaagaaatgaactgatgcgttaacatttgaaaaaactgaatagaagtgtgaaaaacatgaaatttagttttctatttttctttaattattttattgttattatttaaaatatgaagctagattctgttaaattaaaaaaaatcaagaatcaagattgtgtttaaagaaaattctatctggggagctggtggagtgtggggtattctaggcaaattaatgtcattggttctttggatggtgaattttgtctttctattcttattaagggaggaaatggattagattagtggttttagttgtctacaggccgcgtaggtatgaaggaagtgattctttttaggatgaacgaagtaggactgaattgttaaaccccaagatatcattaactttaacacagtgtgttgcgggaggtgatttcaacatagtgaggaaagaaagcgagaagtgtaacaacaattaccaacacagagtatgcagattttggatggcctagttgatgaattaaggctactagactctcctctaattaacatgcattttagtcgggtctattttgagattggatgttttcttttagataaacgaatgggcatctttattctttttctcaaggcaaatggtggaagcaagaccactcttagatcgttgataataatagcttaaaggagatggggtttggggaaaagttcgccgaataatgaaaggaagccaatgcttttgcttttgaggaactacgttcatgaataagttgaaaaatgttacaagggagattggacaatggactttagagtgtacaaaaacatcagattggaagaagaattaaaagctggatcttgaggacgctagtggaaatttgtactagcatttcttgggggaaaagaaacaactgaacttagaacggcagcgggtgcactgtatgactgatgagacgtatatttgtttgatccctaaaaagtataattagaacacagtgaaggattataggccgattaaagggggtatggggaatgagacatgtgttttataagtatctaacatctggtttctttctctggattccaaagatggtagtagtgaaagtggaacgatggatggacatttttatatgtgatttgaaaaagggatggtgatggagatcagttggtgcgataaagcttatgttgagttttggcagtgtcatagattgcaacaaagctttacgtttgaaatggctatgtctattttctaagggagataggacagtggactttagagtgtacaaagtta

SEQ ID NO: 30153 - DNA, 1162 bp, Cannabis sativa
ttctcattaacagaatcacatggacagtttttccatcccctattatttcctgagtacccgacccattattctgcacaactctagcctgtagattgactggtctgtttcattctgttggggttaggcagttacctttttcttgttccgtggaacattgtatgtgggttttctcgaaggggcgcccattacaccatttcctttgtcatttcctagggtggacgacttagctcaaagatggttaaacttcttagcagaagggttttcttcagggaggttagattgagcatgtaaacatccaagagattcttgcatttgatgtaagattttctcttgatccactaacctcctttgggtatctgcaagctcttgctgcagaagtactacttcatggtcttgctcatagtactcttcttcataatccttattttggtttttgttgtggtcatccttagggtcattttcgtgacctttctgctcatcttcgtcgatgcaatcatcagcgatgtgctcttcacggtgttggtcttcttggtgcacacggtttcttatctctggtgcttcctcgtcccccacgacacccacttgagcatttaatgggggacatggttctctccgtcattggcaacattgtccctaccatctcgagcaggtagtttcaccactgcctttcgggttgcaaccattgttgtagacaaattgtatggtaaatctttctttgtctctccattaaagtactaaaatatttaccgagattgttagaaactaaattgtaaaataaataagcttaagaaagaaataattaaaaaaagaagaaacaataatttttacgtggttagggcgttaatgaaccttagttcacaagtcaatattattgagctattaaagcttcaaattattcttacacgagtgttttgtccctaactgaagaaccctaattcttatctcttgatagcataaatgatttttcaaacatttacatgaagggataatgctttatttatagggtagaatcgagtatgtgtgaacccaaactcgatcggtagattttagaggtgtcaactaggcctactgatggggtaaaatacaatatacattaactttgggtcaattcacaagataacggtcatccatgcaagtgaggatcttttggtgatgtcaggtg

SEQ ID NO: 30154 - DNA, 1595 bp, Cannabis sativa
tcttcgattgaagcatgtgttgaatagcttcactaggaacaatattggggatgtggcaatggaatacatggctgccaaaggtaaattctgccttgttcaagaggcagcagctaccaacccaaatgatttgcagcagcaggctgctgttactaagagcagcaagattttatggtagctaaagatagatacacacaacttcttacgtagaaaagtaagataaggtggattaaattcaatgatgaaaactctagctattttcatatggctatgaggaaaagaagaatagagaatagaatcactaccttcatgaaaggagatactattgttgataaatttgaggaagcagtaaaacactttgtgaagcactttgagacgttcatggacaacaagagtaatccttcaatcaggattgacaatgattgtattaagaaggggtactgtcttaacttgaatcaacaagtcaacttgattagaccttttaacaaaagtgacatcaagaaggatatgatgagaattcacccctcaaaaagcccaagattagatggtttcagttcaggcttttacagagatatgtggatcaagattggagatgaaatttctaatgctgttttgggtgtcttcaccaatggtagacttcccaaacactttaatgaaacggttatctccctaatccccaaaattgctaacccgacttcagctagagattacagattgattgcttgctgcaacgcaatttacaaatgtatctcgaaattgatttgttctagactatcagaagtgctccccaacattattcagaataatcaaggtgcgtttatcaaaaaaagattacttgcccataatatcatgatattttaagaccttcttaaggggtacacaaggaagaatatttcagcaagatgcatcatgaagattggccttagtaaggcttacgatactattgattggcaatttgttaaggatcttttgaggtctctctgtttcccctcgaggtttattagttggattatcacttgtctggaaggaactcactatcacttgttattaaatggcagaattcagggcaacttcaagaggaaaaaaggtcttcgtcaaggtgaccccatgtcccttttgctttttgttgtgataatggagtatcttaccagactctgtaataaggttgctgagaagaaggggtttggttatcacccgatgtgtaagcacctgcgcttgactagcttgtgttttgcagatgaacttgtgattttctgtaaagggaataccagctcagcgaaacttatttttgaagcgatcatgtgtttttgtaaagctacagggctattagccaacatagctaaatctcaaatttactttgggggattaataatgagtctaaactgaagattcttgacatagttaactttaaagaaggttgtttccctctcaaatacttgggggttaatcttcgtccaaccaaatggaagttagctgattgtggagttattcctgacaaaattaacaagaatctgaattgctaggcgagtaggaatgtttcctttgcaggtcaagcccaactaattcactcggttttgcttggaattaggaatttttgg

SEQ ID NO: 30155 - DNA, 1436 bp, Cannabis sativa
aagggcccaatggaggcttgaagtggggacgttacaggttatgccgaatgaaattttccactaagctaataccatccgtcgcatccaaacggggttggggttggagtacaccattggggacccaagggtggaaccaaatcgaagtggttttaccatcaccgattttacgacacagccctttggataagaggcatctcgcatttaatattgctttccacagaaaagaatccgcagcgctagcttggaggtccatgaaatcacggttgtgtatgtatttttcattggcaaccctgctccaaaggctattgttgtctataagagctttccacgcccatttcatgaggaaagcaacattgatggattccgttgagcgaaaacccagtcctccacaaaccttggggcgacacaacacatcccaggcaattgtgtgcatcgaacgcctccctggctggtctccccaccagaaatctcgaagagccttgtcgattttcctcgctgtgggtaaggggatgacatccgaagcaacaacatagttggagattgttgagtcgacagatttgatgaggcaggacttcccagcacttgataataattttgttttccagccttggaccctctttaggaccttctcaacaataaactcagggtctttggttcgtttggtagacttaaagagtggaattcccaagtacgaagcatttggcgacattcttttcatcgcaaggaattgagagaagcatgcgtcctagcccggggaactcctctagtgaaagtaaccgatgatttcaggaggttgattgattggccagaccagctacaatattcgttgagacaatccataaacgctttggcttccttcagagtagcttgcccaaacagaataatgtcatccgcaaacatgagatgggtaaccgaatcaccttgtcttcccattttgaaacccttgatccgattcttattttccatttcaaagaagagtctcgatagtgtttctgccgcaatgataaatagggtgggagatagcggatccccttgttgtaacccgcatgtaggtttgaacttccccattacttaaccattaagaagcagtttaatctccttgactgtgatacaggccttaatccaaattatgaacagagtagggaatccgagagaggagaggacttgaattatgaagttccaatccaacttatcataggccttctccatatcaatttttatcatcataaagcctctcgaacctcgtttcctcttcattgaatgaacaatttcccttgcagtcattgtgttctccataatgcttcgacccttgacaaaagctgtttggttgggagaaactagccttggaagtagagatctcattcgattagcaaggatcttagatatcaacttataggaaacattacataatgctgattggtggtgaataatgcata

SEQ ID NO: 30156 - DNA, 1247 bp, Cannabis sativa
aattttattccattcctattcatattctcattctcattcttattcctatattttcattaccaaacgcctcctaagttctattggtgtcgattttgtccaaaagtttatttttcctcactaccaaacattagggaacaaagtgaaaatctttttgggaatagacaagtctagatatttttctagctagtgagtgctcaacaaatagaaaacaagtgtatgtgtcaaaagtgaaccaaaacctatatttatagtgtaaggataccgcactttgaaatacaagcactctataccccatattgttaccaactttttaattaactgtaaatagacttaattaggttatttagaggttaatgggtatatgttagaagcaatgccaacgttcaaaaatcaacactcgtgataaagttgaaaaatatatatagaaactagttactagttaccaatttcttcaacttttgtcaattgttctccaaaacatccaaatcactcccacttaattttatatcaattatacatgttataaatgagcattggaaaattttctaagaccatctccaatagattgtgtatattttagattaaatttagtcaaaaatataccataaaactatatttggccaattttttgtatttgtgctccaatgcacaaggtgcaaattgactatgaaaataaatattaccattgatgctcattataaaaatatacaaaaataattaattttatttatattagtttaatatcttataaatatatcttattcaaaatcaatgaatatagtattaataaatgacaaaaatgtaattaaaaaagtaatatttattgtgggcgctaaaatttggctcatactatcttttatgtcaaatttgacacaatttttaactttggctaaatttggcacacattttacatcattattagagttaaattttaacaaaatattctaaaagtagcaatacatcatattttgtagctctccattagagatgctctaacagttagaaacatgtccctttgatttcataacatctacatgtaattacgtacttaattacaaataatcaaatgtaattcttaagttacaaaactatttttaaattttgtaattccacatatgtgttagaactttatgtgtattattaaactatatattatataatttaatttctaaatatataatatacattaatcttatattattatataatatgtcacatatataatttgttaaataacaaatagttta

SEQ ID NO: 30157 - DNA, 1262 bp, Cannabis sativa
ccaaataaaattataagtatagtttagtagtaattaatccaattccctatgattcaacctcatttgtgtgagtatactgcttgattgcgtacacttgcgtagtaattaataattttcgcaacaatgatattctaaatccattcaagtatttatcaaatccagaaatttatgttaaagtaatgaggaaaatatgcataaaagaataattaggaaatcaaacaagtcaacaagactcacctgggaaagatgaaacggtcttcaaaacaccttcagtgctggcactctttttttccttcaaaacaaatgaaatggaagaaagaaaaccctttcagcttaaatcaattagagaccacgtgcctctgtggctgaagtaatcaaaatgagagctccaaattttaggtagcatcaagcccatttaacttattctttcaaaaaaaaaaaaaaaaatcaaggcccattactttgtcaaaacaaatattggattgaaaacatcacacttatacatttgtgaattgtgacgtcattaatgcataaagttccattagcaaacattacatattattattattattattgttattgttattattaagaatatcatattaactattattatttttaaccacatattatttatttcacatgtatactactcatttaaattactactaatgcaaactcaatatttatatattcttcaagtgaatcaatgcaacaaaaaattaaaattatcattgatacatttattcgatttttttccatatctatacaactactcttcaagccaacttcacttgactcaaagaataagggacaaactgtattggccaaagattgcattaggcccaaatgcccattacgacccaactcagaattacaatccttcaaaactaagtaagtaaatatagcccaatatacattgggctttagctaaaatacaaggcccaaacgaactcagtagttacaagaccaatctaaggcaaatgatataactgaaccataagaatcgatccttcctcctgggaaaggggaagaccacttcccacgttcattctttagaatgggtgaatttaaccatcactcatctcatcttcactcactgaacactcacccaagcattcacgcaatacattaccattattattaccagtccttctccatcactctacggtggaaatatacgttttctatcttctttatttacattcagatattctttatttgaattatttacagacttgattggcggagtcccttcggct

SEQ ID NO: 30158 - DNA, 1116 bp, Cannabis sativa
acctactttgggttgtatttgtttctgatccttgaggttctcctcagacgggtcttcacctttcaaacacattagcgaaaatgccccttattcaagtaagtatacatactgtccctttcttcccttcttggtccacacggtggacgtggagggtgagcagatggattgggtggctgatcatttatatctttgtcatttctatgagacgactgttgaccccttggttgtgcttgcctcgaagtagtggcaccccgattttgtggaccatgttcatcaacaagaatttctcttatttccctggtcattattcctgggaataagtgggattatttggctcctattctatgacattgggtccttgtgcccctctagtttgcaacctgtggggtctttctcgtggtcgtcggacaggtactggcggtgcatcatttggagttgttctggctgcatccattgctcgttctaactcctcattccttctattagattctgtaagtattcatcagagtttttggttttctaaatccatgattgggacatacctcgtggggtcatatgcatctgaatctcttctctttggaatttcttcctcatggtcatctctttggaagttccttttagtaggacccctttcttggtttggtctattttgagtttgtgatccctggagcttttttttttttggtcgatgcaccatctcttctttcatgactgattcatcgggttgagtattttcgatgatgtgaaagtctgggtttgtcggggagttgtgttttgagtttttaattttaaataaatgctctcaatgaaagcaccaaattgttacaataaaaattcgttaacaataatgaagtattataaataaaattaaaatattaattataaccaaatataaataagacaaaaaaaatacgtggttttgtagttaaattctacatactccatgagttagtattatttatgattattcttttatagtgtctctaaaatttcttcttctatttctctcagattcgatgtgatctcctcctccttccaccaccaatccagctctaggtctagcagcctcctccctttgtcgtgttcgtcaagtagtggacaatcacctcttttgtc

SEQ ID NO: 30159 - DNA, 1940 bp, Cannabis sativa
gcgaggcaaaccgtggccgcggccacaacctgcctgcccatgccacgacgagccaaaccatggccgcgatgaggggccttgaaaccccaaaaatgttatttttttcattccttcgaaaatcaacctaaatttcataccaaacttatccaaatcatgcataacctcaaattcaattcaacatcaactcatctaaattttgggacccaaaagagtaccacaacaagctcaaaataaccaattaaaactcattacaaagcatataaaacacaaatcacaccattacacaaaattcacaagcttgaatttcaaagcattcaaaccttcaggatatgcccaaaaaattcagagcataaaccctgaatttaatcacatttctcaaccctaaaatccacccgaaaccatctagatgcaatatacacaattctagtagttcaaacacacaacaaacacaaaaatcaccttcaacttcatcaacatggaaccacaatttaaagaacatcaagaacatcttaattcatcatataacttcagagattaataaatcaaaaaggttaagaatcaataccacaagttcctcaagcttccccaagcaagaacatctacaaaactacaccaactcaagccttttcttccacaattggaatttgaaaaaaaaaaaaaacaagataagaaggagagagagggttggctatggggttcaaaactcagaatttgattttccaaatttaacaaaaatatgattttccttctgttgaaaaatgcattatgtggtcaaatgactaaaatgcccctaaggcataaataatgtcataaacaaataacaagggtaatatagttatttcactcacacatacatatcacaatatttaaaaatttctcatttatcataaatcccaaaaatgtattttaggccccgaacccagttcgagccaaaatacccattatgactataccgcatcgatttgtcagaaaacacctacagaaaaacagaataaacatactatataatatatagtctataagtacagtatatcataaaattacgattttactattctcgggtcaaaattacgaaaatgcccctgacacaccaacgaggtcttaaaatacaataaaccaaatagtttcacatattaaattaaataataatttaatttctcattaatacataattaatctagttagagctgctaatccggttattaaacttaaggtattacaataatattcaacataatctctttcaacaaaaaaataatcaacatattaaaatgtgccactattgtcgttgagtcataaaatgtgccaacataatttaaaaccttcgcctagtgaataatatgtttataaaatatatattatatatatcaaaataatttaactttttagaaaatatatatagttttaaaatatttaaataaaatatttttatacgaaaaaataaatgaattattaaaaaaaattattttatgtattttaattcgtgttttattttgtgtttatgtgttgtgctttcatactaagaaatttttattttcatgttgtactttcatgcttgccgagttgttccatgttcaagctcatatttttcgtaccgtgcatagacccatatttatttatgtcatgctaggcctaagcccatatttttttttgtcgtattgtactcgtgtcacccgtgctcgtgccaatttcgtgtcgtgccaaaaaacatagcttgaatatacaacttgaattatgatccgtaaccatcagatcagtggtttcagtctgatttcccctccctgtttgtacaaccatcttgtgtcctgaaaagtcttaaagtaaagatttgtgtttcttttaggggtgagcatcggtcggtttggtcggttttttctatataaaaatccaaaattcggtttttggtttggattggtgcaatctgaaaaccgaccgaccaa

SEQ ID NO: 30160 - DNA, 1782 bp, Cannabis sativa
gaattaacaagttgtttgacaaccgcacgcgaggcccgggtcgttttctagtttaaatataattagtcactttcatagtatatattttaagtttaagatatttaataaatcttgtaattttctatttaatttaaatttaagtttatattatttttaattaaaattgtagatttaattattgttataaatatatttaattagatacatattataatttattagtaaattaataaccatataaaagaaagtaaatatggtttggagacatttgaattgcataaatataattataaataaattgaagaaaattattaattaaatttttaatttttatttttttcacggaattattagtgaaaatgttaatgtttgttattattttttttaatgaacaaatgactttttttttttatgatatagctatacatataaaattcttttcagtcatttttattgttgaaaaagtaatagaataagatattttactatttttattattaatattttgaatgacttgacataactgtacatataaaattattaattttcttaaaaaaaataaaaaaaaaaaagaacgaataagtttttaaaatattaaataaacaccaacaccatgccactataatatctagatatgatgaaaaaataacacgaagatgttataatatacgatttaaaataaaaactttaaatatgagtactgaataataataataataataataataattgaagaaatacctaagagtatagtactattatacataaatcaattaaatttgaagttatgaactcagaataaataaagaatactttttagatcatgtaggaaaaaaaatagaagaagaaagtagagatatcgccattatgggaaagagatattaaaaattaaaaaataaatagagaacttactcaaaattaaatatctaaaaaaaaaagaaaaaattagaaaaaatttaccatctaatattggatttgggtaaaaaagaaattaataaaaatatattatgaaaccttattaggaagaaaatatcaaaaaaaaaaattatagaaaactcacaaaaatttaagacataaagaaagaaaactcaccatattagatcttgtgaagcaaaaaaagaagaaaaagagttatggaaaaaaaaaaagtatatataaaaaagattcaaaatatttaagatctatacaaataaaatcatatattttggcaaaatatatagattatatagaggaatagagaagaaggttgcatactatgcttggagctctattgattatctgaaaaaaaaaaataaagaaaaagaaatatcaaaatcttaacaaaatctttgatggatatagaatttaaatttataaagaaatctatatacatgtcaaatttctgtacggttgatatttttaaaattttttatttacaaaaatttatatatgtctatataaacgaaataacttaaaacaaataaaagtcaaataaaaaaataaaaaaaaaagaattaaataggtaataaatagagacatttgttgatttatattataataaaaaattaaaaaaatgagaaaattaaggaaaagaaagaaacatgactttaaattgattttagactatcacgttaacatctcacgtctctcctatatatatattatcccaatttttgcactctgacgtggcatcacacgatggtgacacgcagcatcaactccaggtatctgctcgcaagatatagtccgaacaggatacctcatatgcatgctcgaggtagagcaatcaacaattcgtgcaga

SEQ ID NO: 30161 - DNA, 1115 bp, Cannabis sativa
taatcgattttatcattttaatgtgtattttttttttatacagataaaagaaacgccataagctaaaagtggaaagtttactgtctatcttaagagcatactaaaccaatcacgggctgcaacattaacattgcgacttatacaagaaagaaatgtcttcgaaaagctagataataaaactttaatattagaaaagaaacttatattttctttaatgcgtattaagtactgatgtttttgtattctgtttttaccagttggtcaatagtggcgggacagaagaaccttcttcaacatagatactctactcaacttgccttagtataatggtgttattggagaagtgttttgagatcattggaacttgagtgaaagctttgcttgtcttatgattcttgtgtcactcgtcttaatataaacttttttttatcaattcaaaatagttccaatttaatgagaataatttcgattgatttccaattttgaacctggaaaaatgctttaagtaatatatatatatatccttagaatttaatattgtatgttatgaggcctacttggattattcttacttaatcaactaatttgagtagagattatcactaatcttcttggacaatcacaccaatgctcacattgcatggacaatcacaccaatgcccacattgcaaggattctttttgattgtgacattgttgttcattttaacttaaacccatcatgataatgttgatgccatctttcatatctttcatttcacttcttaattaaaagaaacaatgatatttgcggtataagtactcaaaatattgaatttgtaattgatatagagtataaatacttaatattggtaaaattataattttcagtgtcaattatcaatttaattttctactttaggtaagtttaatttaatttaatttgttacttaaaataaaaaatttaaaaataaaaggtattcaaagttttagtacatattaatgagaccatattacatttttattggcaatgtatttttgctcaaacaatgtgggatatcttttactggttggttggagcatattttccaacaatttgataaagatataaggtggtggaaagtggctatgctttgt

SEQ ID NO: 30162 - DNA, 1212 bp, Cannabis sativa
ccataaaatttaaaaaactcgtatattaaataggatacctttgacttctatggtatatgttctaaacaaagagaaaaaatgtttaaaatattaaatatgagatttaaaaaaatatgtataataatatcacaaacctaagcctataaaaagtgaaaaaaaattccttataaaaataaataaaattaaatttgctatatttaattagtgaaaagcttttaacatcctatgtaatttttgaaaggaaccattaaactaattcaattctcattatttcattatctaattaggaatttttcctaaaataacacattttaagtttattattaatatttttatattttacaaaaataaagcgatgatagctaattttgcaatttaacaatttttttagttacttgttagattatttatttcggaaatacaattctgaagggttttttttttttttttttctaacatatcaaatatataaaaaagagtaataaataattcaatttttacaaaattttatcggatgtaaaaaaattatctaaacattctatcaaaaaaaaaaaattatctaaacattatttaaccccacaacaaaaaattgaaaagaagaaaagaagaaaaaggaggattgcagcataagaatctcaattatgacatttagtgctcaatctttatgtgtctaataacaagtagaactaattaaacatgtgatacaagctatacttcatttaatttaataacttgagacctttcttaagacaatatggtaatattttgaagggaagagaaagtaagagattatttcatgcaaaaacttacaagaggtactagctaagcaatacataggataaggacattaagctaggaaaatacaaacatgttatacaatatatacttcatttaatttgtgacagaaaaaagaggattaaaggcttaaaatcttaaaggacaattgactgcggcttgctttttcgttttattttttaactcctgataagtagtaagccgatagctgttactataagggtggagggaaagccaaacttgagatgagtccagaaggagagagtgaagccaactggcttagcccgacgagcctgctcgcatacaatcaagtttgcagctgagcccaacagtgagaggttcccagctactgtgctaacccaagccaatatgagccatgcccttttctcttgactcggagatatggctgctgctgat

SEQ ID NO: 30163 - DNA, 1398 bp, Cannabis sativa
  modified_base (791)..(806): a, c, t, g, unknown or other
gacatgtcgtgttgcgattgactagcgatactccctaaaaactaatatattaaattatatgggacccgatacttaattggaccaatgacgatattgacacataaaagagtaatagacaccactagtgccctttagcatttctcattataatactagtaaacaagtaatactgcggtttacaaactgtggtactacactactactgctgtactactactcagtcactgactatatatacataaagcaaaacctaatccactccattcctactattctatatactgtttctctctagagctttctctcatatatggtccccacattcacacacaacacatcttattgcaacgtttattacttaattactatactcttcttttagtcttttttactgaatacttctgcattgcatgcaaccaaattcaatgtctgtataccactgcctgtcacccttttctttttattattaatttatatcctatttctcatatcaacttgctctttgtaaatattcttcttcaattttttttcatttcatgatcattgcccatagtttttccagtactcttattaggtgttatatatattgttattggtataattcaaaactcaatctcacttattttacttttatattaattatatagaaaattaatgactctagctatttatagagcatcacctcatatcagggttgaccctgagttaagacaaaggaggcggccaccgtaggccccccaccgctcaggctccatttcgaaaaaaaaaattaaaatatagttagtaataannnnnnnnnnnnnnnntttaatgctaaacatgtgttgtagtctagtagtaatttaattagttgaacaactaagagattcagaatttaaatccaattagcctcactttttcaccaagccccaattttcatttttgctaaggcccaaattaacataaggccagccctgctgcctcataataatactaaacaccatgatatctactagcaatgttgatgcacatttaattagttgtatatatttttaagttgacatacatactcataacctcataaatctatatacacatattggtgtaaccaaataattaatcaggtgaattatttgtgccatagattgagtagagccgaagaggggacctcagaatcattttgtttgtgtatataaatattatatgtatatatatttacataacagatttatgaaaaggcattgcatgcgcagagatcaaatgttttctcatttttctgaaagatcgatcgattgatcgaggaaagctttaggtccaaaagtgggagagagaaaaaaaggacaaataaaagaaaagcttcttgagcaacttgtggttaaaatggaatatatattatatataaatataatcccatatata

SEQ ID NO: 30164 - DNA, 2965 bp, Cannabis sativa
acatgtgaaagtgtggatatccctgggagccttcctaagtcttgctaccagttgaagaagtccaagatggtgggtcctaatggtatcccaaagaagccggtgtttagattttctaaccgggaccttgagcctagcatgggggctaaacttaagaagtcgttgggagaggagtacacaggtgaaagtactgggaaagactgtattgcttttgtggagaaccatagggtcactgatgtgtttggagaaggcagcgccatcgtggctgtcggtgatgatggggatgagggggagtttatttctccatccaaaaaggtgcatcttgatggtgatcccattatgggagggcctttggccaacccgacaccaagccattgcaacgagtcttacgaatctcagttgttggtggaatctgcccctgctagattggatggtcaacagaaagtgggtaagtcgtgcatttcggatgtgagaatatatcaccttacaaattgatactgatgagagatcaaaagatacaaattttcgatggccgaagaggcgagccttatcatgccccccaaatccccatgaacctcttgttgtggaactatcggggcttggggcaagctcgagcagtgtctaccctcagggagttggttgtgaacaaaaatcttgatgttttttctttcttgatagaaactaaggttaattcggttaggatgaattggatttggcgtcaaatgggcttctctagtgcgattgaggtggatgcgttgggcacggcctagggcctttgtctttgctagaaatagggagttgatgtcgaaaacctcagtgcgaataaggcggtattatggtcttctctagtccccccatatctcatctcatgtacacggatgacacgtttctattttgttcggctaaagtggaagagatcaatgttattcaaggatgccttaggaagtactgtgactggtctggacaagttcttaatgcttccaaatctgccactatcttctcaaagaatacttgttcagaggtgaaggtcgagattaataatcttttggggttcgatccctctcgtctaatgatagcttccttaggaactcgattttcttctttaagagcggcacccgtgactttagctttgtggttgacaaagtcaagtcgcgtttggagggtggagaagtaaattgctatcccaagctagtagaactattctcatccaatcggtcgctgcaagtatccctgtatactctatgtccactttcctttttcctaagaggatctatgaagaattgcagaaggcggtgcagaactaataagactctcttcttggctttggccagttgggattcgatatgcaagctgaaaggatttgggggcttggcatcaagaagttcttagacctgaatttggctttgatttcgaagctttgttggacgtttgctaatggggatgggaggttgtggttccatattttctgagccaagtattgcaagcgcgatgactccttttggagtgttaacctccctgatgcgacttccaaggtggcctgcggtatcctggcttctagggactttattcggtgcaaatcgtgttggctcgttgctaatggtagaagcaaagatatctggcactcgccttggattccctggcttaactggaatgactacatagctgccttcaatccaagaattcaacgaccaagagttactctgttaagtaatttcttcaatgagaagggggaacttatggccaatgttctggttgactggttttctccccatgtggggcgacagcttgggcgtgtggatttactgtctaatggggacaaggatcgattaatctggcaggagtttattgatgggtccttctctgttagccaggcctacctatctctcattaagcctcgccttggggtgggctctaatatttagaaagaaatttggaaagctcctcttcatgaacgagttaagttgtttctttggaaggtttgtaaggatatcctcccttgcggctcccgtcttcgaactgtgtttggcaatgagtctcactgtgttttgtgcaatgatgatggagaggactccctccacctcttttttcattgtccttttgctaaagcctgctggtttagcagttgctatggaattcgcagtgagtggatggccttctgcagtacttcggagattgtgaatactagaaatttgctgcctatctgtgtttctctctgtggaatactagaaattaggtcaaatccttgtattgtttgatgtttattagtgcattatgtttcagaaaaaaatacagataaaataaaattatttaggataaaaattaaattatgttggataataataaaaaaaatacacgtagaaataaaaataaaaacatataataatataaattaaaaaaattagttttatgaggaaaaaaataaaatatttaaagcatatttgaatactattttttttctatacaaaaatgggtcctattttatctcctattattgttgataccatgattaagaagtaatttcataaatatgaaaaaaataaagttagtttagataaatatggtaaggaaatttaatatgaaaaaatatagtatttaaaataaaaacttaatatatatgggattgaattaccataaaagatattaaaattccttttcgtatatttatttttgaaaaaataaaacaaatgaaactaaagtgatcgccgtagttgtcaccggtgccggaaaaggcactgaagtttgctgtcggtgctgggaaagtcgtcggagttgctgtcggcgccgaaaaagtcatcgaaattggcattatcgccgaaaaaatcactaagaaactgaactagtttcttggtgagaaactagtttcttgtgggggtgttcatcaaaccgctcaactcgctcaaactgcccgcaccgcaccacaccgaaaaaaaaaaatggggttaaattctttgcggtgcggtcgcgattt

SEQ ID NO: 30165 - DNA, 2135 bp, Cannabis sativa
cttatggccataaagttggatatgcttaaggcatatgatagactagagtggaatttcctaagggaagtgcttagaggaagcggattcgatgatcaggtgtgtgctttaattatggaatgtgtaacaacaatatcatattctgtccttattaatggtgtgcctcagaagaagttctatccaaagcgggggccccgccaaggtgacccattatcgccttttctgttcttaatgtgccataatatcctatcaaaaatgttattgagagaacaaggtaatgggaacctacacggaattgctatatctcgcaacgccccggcaatcagtcatctcatgttcgcagacgatactatcttatttgctcgtgcgaatatgaatatggtggagaacttgctgcagtgcataaacaagtacgagaggtggtcgggacagaaatgtagtttggcaaaatccagtgttctcttctctagcaatatgggaggccaccaaaagagcattattctgaagtctctgaatgttaaggaatgtactgggcaagaaaggcaccttgggaacccttttgtttttaaaagaaggaaaagggaagaatataattttttaaaggaaaaggttctcaagaggattgaaggatggaaaacaaagctactgtcttttgcgggtcgcactactttggtgaaatcagtggctctatctattcctttatatgcgatgtcgacaaataagatccctgtctccacttgccatgaaatagatagtatcatccgtagattctggtggacaggaggttcggaaaaggagagatttatggccttaatgagttgggatcggctgtgtcgccctctgcttgctggggggctggggtttcgaaaaatagaagacatgaacaaagctctattggcaaagctcgcatggcaaatggctgctaatgccgatagaccatgggttaagtgtctcgcagcaaagtattgtagaacaaactcaatttggtgtgcggaatcaaagaatactgactctgccttttggaaggggattttgagttcaagggatattctctacaagggtggtttgtcaatagcgggaacaggtgattcgatagatatttggagacaaccatggatcccgtggttagagtatggggaattcagagatatcatggaacaagttaagacaaggtacccgcatatgaaatctattgctgatctttcaaatgatgatggaagttggaatgcagatatagttcatgacgtcttcggggttcctttaggtgaaaaaatttgtaaaatagatcgtttgcctgtggatcacaatgatattttagtttggaaggaagcaggggacgggatattcactgtgaaaaggggcttccaatccattcatccgactcaagacaattcggacagcagcttttggaaactgatctggaatcaacgcactcatttcagacattcgacaaacatttggcgtttagtttcgggatgctttccaaccagagatcgaatggtttttgttgcggacaaagtgtgtccgatgtgtgacgtggaaaacgagacggctctacacatcttttgggaatgtcattgtgctcgagcaatctggtttagtagtcctttcgcttgtttcggaaggaatactatgactatggctactgtcaaagacaagcttcaggggatgcttaattgcttaccgaatgatcttaagggaaatttccttaattttttgggaagcttgatcgaaggagtgtggcgagccaggaacgagctgatctttaagggcaaaaggataaatatagaagcagttaggtgtgcgatcatgaggaaatataccgactgtctaatggttggggaagccgattcaacaattggcatgagtattaagcaagcaagagcgggagggaagatcactagtgctactgaagttgttattgtgtgtgatgcatcgtggaaggaaggtgaagcaagcttagcagtgggaatgatggaaaccagaggaaaaaaagtctgctggtttgcaaagaaaacgaaggctgagtcggctgctgaagctgagatcaaggcgaccagatgggcgatggatatcgctgctaaagaaggttacgctgctgttgccattgcatccgatgctatggttttgatcagggc

SEQ ID NO: 30166 - DNA, 5960 bp, Cannabis sativa
ctaccatgaattcacccatctatctaaccaacggcctcagcacatagaaataaaagggaagtagatttgtataaaacccccaaaccacctacgaagaatcaagaatttgtatgtctaatcgaataaaatctaggaaaataagagaaactattatttattatttaaaaaatcaattatctgttacataattacaaaggggtacaattaatcagaactaggagaagaatgtgggacgaaacctctctacatgacaacccaattaccagactacaacatactaatctaatgggcaaccccgcccttcagcaaacctaacaccaatatccgtatttccactcatactcaactgaccttgcacgctcatcagatcctgtgagcagcaacagccacagctgctgcaccaacagcgccaaactgcgattgtgcatgcaacagcttactgtccatggcagccatctggtcaacctttgattgcgcttggtagtacggattggtgttcatgtcaacaaccatcaccgaagattgcttgctggccatgtttatctgcggtgactgagcttgttgcattttcaattgtgaagaatctgacttgtcttgattggcagtgtgagttcggaaaaagcagtggggagagacggcctgaggaggaaagatcccatttctgaccctcggatcatatgcttctctcacgtttcttccattctcaaatggtagaactggtccaacaactctccctggtttacctgttgcaacagaaacgtgtaaggacggcagaatattgggggaaaacaaaaaacagaaggtcaaaaccaatcaaatagagtatgaattcaaatgataattctacacccccagatcaaaacaatgggtacttataagctactaaacacggataactcaataataaagtcagtacctgctggcacccgtggcggaggccgtaaagccttcgatggatttccagaattaacatctgttgccataccatcgttagaagtatgtccagtcatttgccgattctcatatgaaaccatattagggtgttcgttagaagaaacagtcatactcgagtggactgtagacctgtaaatgaaaaatattagaataatgtgacaaaatgaatcgcccttcaaagatagatttactacacaaatgatttgtactggccaataatcacgcttgaagattagtaccgtggaagtgaaacatgctttctctctggaggaataactggtccacttttacccaaattctcctcaagatacgcgaactgctttttaaattgacctatagcactgcatcaggaatacaataacacacgtcatcatcggataccaacaagatagagcattaaattaagagatgacatcaatatgtaaaacaagaacaactttctacctagggtaaagaaaatttgttccttcagctccattcatgtagtcttttagaagttggggatggtattccaaaatctctcggtatattaattctcgaatatcatccttagtcactcttctcctctcaaactcaaactcgagctttgagataggttgacatgaaggttccctctcaaccttcgccaggcccttgaagtaagaatcagccaatgcctaataaaaacatcaagacttcagtccaattgcatgcgccttgaaaaaaaaaatacatacatacatacatatatatacatacatataaaactttccaaaaacaattacagtacaaacctcttcagcagttggccggtcctttggatcaaaagctaaaagtctttgcaacagtctgagggctagaggatctgcatttggaaacttctgtgcaaatgatacaggaggctttttccgtaattctgtcaggtatcttctagccttctcatttcgaacctgcatagattttgcatatctacagcttagtaatgaaacatttcaagccagaaataggagaggaatgaatatttatctatgcgccacagcaagaaagttaaaacatactcctgcaattgtctcaggcgaaggcgtccccagaagatcggtgattaagtctaattgatgaacaacacttttaccaggaaacagtggcttcccagtcaacacttcagcaaagatgcaaccaatactccacatgtctattgctggagtatactgcaaccaaaaacaagcaaaagttagacaactaaaatacaataggaagttcacacgttgataaaaccactccagagaaacaaacataacctcacaccgttacctgaatgaaagatatttcaacttccaagagagttcaattgtcctccctgaacaagaattattgtaatctaggcattactgcttactataataaagcactcagaacatattccacacagaaatatatgcattaatgaactaaactacaccaaaacataggcctgttaactttttccctttattatttcgtcatatgcacaccttctaacataacaaataagactggagtgggtaaaagttgacaattgtccaaaattgcaaatgtctccttatgtcacgttaataatagcctaaaaaaaactcaaaaccaaatatctaatgaatcaattactttccagaaagtaatatgtctaacttgaacataccactagaaacatcacttaatccactctccagccattaaaatcagcttaaattgaacaaacaactaaataattctaaaagaagagcaactccgccataattaaagatactgtaacttgaatatactaccttgccctcaattagaagaatcactaaacaatgacaagaaaattgcaacttcgatcttgcacccagttgaacataaacaaatatagcagcaagtgtaaaaaattgatcctaatgttcaagacttcaactaatgcaagacacatatagtactataaggacaaaatggtcttattattattacttcaacacacaaacttgtagacctcattcaggaaaaatgatgcaaaactccatgtagtataaaacagacagcttctccattagcaagtactatggtttaccaagactaatattgtcaaatgtccatcttatttaacatatcaaaacaccaaaacaatcaagagggataaaaactaggatttgcctcctcaacataccaagagaatgaaagcaagataacctattaaaaaaattgaatccgatacgagagagaacacataccaatttaaaatccaagcaaccacagaccaagcttctatattatatttaatgaaggaaagtgaataaagaaagggtaataaatagtaaaataccttcgaagaaaatgagccacaaagctctggagccctataccatcttgtagccacgtaatcctgtaaatgaaccaaaataaccacgataaaatacaccatttacaagtaaaaattcagatgtaaggcacttataaatgccataatactaataggaataagtgcaagtacttactgtccaaaatatagtggtcggggtatcactaaatgcaactcttgctaacccaaagtcacaaaccttaagtttgcaattagcatttgccaaaatgttcttaggcttaagatcacgatgatacacatttgctgcacccaaacaaatgaaatcagcaacccaccctctaggatcctcaaaaaaaggatttgatagcttgtatcagtgtaaattgaccaggagaaagttaaaacacacctgtatgcatatatttcaatgcacgcagcatctgatagaggaaaaactggtgatgttcacgggtcaaatcatcattagctttgataacttggtgaagatcggactccatgagctcaaaaactacataaatatctttaaattcccttttcgagggcggcagcataatgcgcttgatttcgacaatatcaggatgccgtaatagccttagcaacttaatttcacgtaagatcctgatagcatctgagagatgctcgaatacatcatttattttttttattgcaaccttttccccagtatgtgtatcgatggctgcacaaactactccataacttcccttccctataacttcaagaatcttatacctatttgcatccccgtattctgtgaaaaattccatgtctttcatctgaaaattgaaaaagttatattaaatatgaatgtaaatacttcttaaacaaagaaattacatgacactaataaaaccaatgctgtttttgtcagagctcatctctggctgcagttatattttaataaaaagtagctaaagcggccaatggctaaagtatcaagatatccatttgaaaattaattagaatgtgataacagaatcgggtgctacgaaaaagcaagcgcagataaacagatggcaatagtggagtatcaagcacaaatatgtatcaacctagattcctttctttgattactttcccgcacaatgacaaaaccaatagaaaaataaagctgtgaaccatacccgccactcaaaaaaaaagcaaacaaaaattccaaaacagactctaatctgttaaacaagagatccataaatgatgttgatggactcattaaacattcaaaacatcaaactaataacggcaaaaacagtagaaccggaaaaaatgttggcaaaaaaacagaatggctgaattggaaatgatgcaaaatatataatgataaaaattcatctcaacacagtcttgcgtttaaaaaaaaacggaaaaacaaatcttccagtaaaatttctctttatgcaaacaattagggaagcccttttctaccgaccaaagaacgaaaacccataaacctagagattcttaagttaaacgttttagtgtccaaaattcatttagtcacaaagtcaatcggggaaccaaggaaaatccaagcaagatcagtacgaagttgaagatagttaaggcgaaaaagttgaagaaaaaagagaaagaccttcttcgagcgatctgggttcatcatcttgttcttcttggtgttaaaaacacaaaatcaaatcaaccagcgaattcaataaatttagaaagaactactagcgacatcaaccccagcaatacctacttcgaaacacttgctcaaagtcacttctcttttacctcctctctcgtccaaaaaccacactatttcccgttcaatttaccagatccaacactaaaatacggcaaattttctctcttaagaaaaattgaaaccctagattccaaatttgtaatgaaacgcaaaaaattataataatccaaagctacacttttgttcctttcactttctgaggaaattgaaacgcaaaataaagaaaggaataagaaccagagagatctgataggaacttagagagagaaagagagcggagaaacgaaaggagggtaaagcttcgtcgtcgtcttcgtgctcaatttcttctttcttcgctgcttctttacttttatatatccactagttgccttttatatatatctaaacatttttagtattcattcatagcggctttggtgccagtggccatatttgtaattattttgaacttcttgccccttttgttaagctgtttttcctttacatccttttaaattgcactctgtcggtcaagaaaatgaaccttcacctcaaccacatgatgattgataatatatatgatatattttattatttgtgctttctcttctctaataggttgcctaagcctatttactagttttcttgtcaagatgtgctcaatcttcacaaattttacaatttatgatgtaaaataattatataatatccacggaaacaaaaattagaaaaattattttatatattatttttttttgtaaatttatagtttagatttctaaagtaattttttgggtaatttttacatgggttgatatacgatttttgcttgcgatttaggctgttccgctcattgcaataggagtttctatgtagaattcagtaaaaatgcaaaataaaaaaaaaaaaaaaaactattttaaaattaaaaaaaatccaaaaaaa

SEQ ID NO: 30167 - DNA, 1468 bp, Cannabis sativa
  modified_base (109)..(113): a, c, t, g, unknown or other
attcctgctgaaccgctcttccgatctcagcaaacgaaagtgtctaactgggctggttacatacaggtacagccccttttcttgttccttttcttcttcttcttcttcnnnnncttcttcttcttcttcttcaaacatagtaaagttttagattttcctttaggtcaatactaagataatgtttttagagatttttcatttttgtactgttcaactaatgttttttcttttaggcatgtgtatttcatgtgttaactgttattttcatcgtgtgtctccaactgatggtagagattggtaatctttttcctattcaatttaagctctcacttcctattgaattgcatgtttttttttctttcttttttttgacatcatttgtaaattgtaaatcaacaactctttataaactattaacaacataaaattttaacataaggactcaagagagtggtaatattggttagaacttttagaaatgaaccagacaatctgttccctacaaaagaacaaatgaatatctcaaattctcaacagtatataaatatagtgaaactttttgtatctgttttaaattataatcccaatacctgagaatcatatttcagaatcattgtatagaaacaacaagaataattagttccctctaagaagataggtctgtcatagccacatgaccagccctacagaacataagctgtactaattttctaattaacttgtgaccatggattatcatagctagaagcaaatgtatcaaaactcaacgtgaatggaattatcaccaacttactaataacttgtggatttaaaaatgatcacaatctgaggaggacaagtaagtagacagataataaatattggaaatttctgttgaacactcctcttttggtatggtagatttttatctgttttagcattcaaatattaaatattttatcgttgcttatattataattatataagaccatattttagagtgtaaaaattatattcaaataattatttaccacttgtataaaaaaataataatctatatttttgatattataaacaaactacttaaaatattctaaaattttacaggttgtgaataattattgcatacaagatcatgaaaaaaaataaattaaaaaattcttgtagatgctgaaatagataagaggtctatcgaaatactcaaactataaacttacccataaaatttattagagcattgttgtgaggcaccaagttgtcgtagcagtaccactataaagtgatatcctataattagttagcggttcgttataatatttattaaatgagcatattattaagcaccagctatgcccaacactttctatataagttgcatcccacgattaattaacaatatttcttaaaaattattttttaaattatatagactcaatacttaattacactagcattataataccagatgattaatagcttttagcaaata

SEQ ID NO: 30168 - DNA, 2146 bp, Cannabis sativa
tgctccaattttaatatttataggaccaaattaaaatttaaatatttttacaaattttaattaactttttattgtatttttatggagcctatgaaaaaacgtaaaaaaagattgaagaaaacatgaacacaatataaaaatataacaatgtaaagtcaataattcgtatttttgtattaaaaaaaaaatacttctagcacgtaaaatttaaaatgattcgaaacttgatatgttccttttaatatttagaagatttattgattttgattatgttaaaaaaattattgaaaatttactattaaaaaatatcaaatatataaaataattggtccaatctacattcttaaatccaattgtaccttcccaattatttatcaaacaaaatttcttataaaatcataggtgtatcctgcatatatataaatatttatataactatattatgtactgtgtaaaatgaaataatactcttaaacttatataggaattgctaaaataatcaataactaacattttctttacatataaataaatatatatagtattggtagataaaactaaatgatcgatgatacacgtctaagttcgactagttaaacacataatttacaatatatatgtatgtcttgtctagatacatatgataattaattaaaagagacctgtttggttaatatgcatgtatctacagtactaataatacgatagttttaatttctatacaccctttttgtcgtctgtgctggtgaccatggattgacgacagttaaagcaaaagtacaatcatgttataatagtgcaatgatatatatacatacacataaatatgatacattcagaattatttatgtatacatataggtgtttaaattctaatagcatctttataagtgtccaggttcattgtacctagcaaggctttagggcttcaattcagtggaacttattaaatcaaagtgaactaattataagtagcttcatgacttttaatataatcaaatctcatccaagataatacagtgatacattttggcttctcacttcatgccacatgtattttcaacttatatatatgttgaccaaatcgatctactgccattattattcattttcattactttttaaacaatatttttgtgtattattgattctacgcagtgcaagatcgatttctcaaatatggacctctactttttagaaagattttttttcttcatacttttcaaagggttttgtcaacactaatgtatcaaaacacaacacttttcccattaataatattttactgaaagtatcttttcctcaagtaccactaaataagaagaatatagctagtgtcatccccacaataaaaataaataaatgtaaattaagaagaagtagaagaatctagtgtctacgttcaatgtatacttcgcttgtgattttgcatgtaattagaaattgaataatgttaattactttagtttagattagttgaagggctagtctatttaaaatccatgtaattgaatcttttctactattatactgagttctcacttttaaatttgaaatttttagtatatatacaaattaaatacaaaaatacttcaacacatcctaattacaataatattttgttgtattatcaaaaaatatcgtagtactaataaattatcactactacaaaaaaggttattcccaacgatttagaagagggtcaattataggaaccgttggaaaaagtaagtgaaagtttttcccatcaggttagcactgtagcaaaaaaactgttgggatagttacaacggtgaataaccgttggcaatactaaatagatttcttttttaaaaaaaaaaaaaaatagtttattccaacgttttttaactgttgggaatagtaaggatacgcaacgatttataactgtggagaatagttagtatacccaacacttattaactgttggcaaaagatgtattttatatctaattaataatttattgaaaaaaataaaattctggactgaaattttggagccaaaaaggctgaaaatttcagaccaatatacccaaaatctgatcatttgtctctaaccctaaatttcagaccaggctctctgtccgacgagctcctcaccacgacgtcaaggaccagcggcctccgc

SEQ ID NO: 30169 - DNA, 1431 bp, Cannabis sativa
tctataatagagttttagtaattaaataaatattatgtttggtgtgattttattaaaaaggaaaacttactgcttttaactcatttattaatttgattcattacgtattaactatatgagagaagtggtaaacttgtgtttttatattctgtcatgtcgatttttttttgtcaaacttggttgacccgacattgctttatctttgcttgcgtaataaaatatcagtaagccaagactcaacaagacaaaaaataatacaatatgataattattataataattacacttcatatagtacgccactgcgtacatattgtgtcactgcactaaatcatattattccatatataataatgtcactataattaatgtttatgtgacatacttacgttttatgctcacacatctcttttatatttaaggtcttactagaatttatctcgattataattaccaagtctaacctgattatgcttttcttatataacactactcaaatatttatttaacaaattattgcatatttataagaaaacgtacttaaggtgataatcctaggtcacgattttacaataacaatcgaatatcatataattgcatgcgtcaccgctgtagtctatgtgcttagttcactgttttacttgatttttaatgtatgtggagaaattctgagccacaagtaatcctgatcaagtgtcggtatttttagtctcaattcccaaatttcacacaataggttaattctaaaatttttgtgtttgatctatttttgatccgttttgtgatttttggtgcaattaaagttgtaaagaaagaaataaatttaattttctactaaaaaattatatttttttttatatataatagaatatatatataaaagaactagttttttgtttaaatattttcaatcttcttttaaaaaactaaatttagtttttttataatttcaacatgaattattaaatatatatttctatacaattatttaaaaaaatgtattgtgtaaatatattagtatggtatttgatatgtttacctttaatcttcctaaccttaattcgtaaaattcatgacatttaactgtgtcgaaacccgttttgtaactcccacacccacacccctttcgttgcccctccccgagttggacacattaccttacatggaaaattttgaacccatcttactccgtctgtcgtgttaaatgagttttcgagagttcttcacaaccttcattttcgacctacaataatcgatcctttttactaatttatgaaatttctattttcctcagggtaaaaatgattgaataaattagtaaaactgagtttggtaagataagcaccttaatacatataatgtgaataattagcataacaaatatattataacaaaatctatgtaaggtaatgtgtgcaactcgggggaggg

SEQ ID NO: 30170 - DNA, 1314 bp, Cannabis sativa
tttgtagattttaattaaacttctctatctaagtggattttttcatgtataagataaaagcagttagttagtgatgtttgatttattgtaatggtaattataatgctaatgaataagtccattatattgttgcttttctcttttggtttttataacttattataatgtaataatgattacataccaaaaccaatataattcccattacaattacacttcattacaaagaaaaaataatattttaataaaaatatagtaaaaaaagtcaaagtgtaccctttttttaaaaaaaaaatattttataattttatagtaaaagcaatagagttattttggtcaatacacattttattctttaaacattctaccgaggagccagcttttgtcaacgattttgtgactttaaatcatggatacttgagttgagagccttaagagaaaaattggtcataaacatgagttgaagattatataaaagtaagataataaagatcactcatcaaatcatattgaaaaaacttttcatttgaagagcaagcctcagcctctgatggaacatggttagcattaactatattttaaaatttaaatggtgttgtgtggtaatgttaagactcctaagattatgagacattaagagtcattaacctcacaacttgaagaaagttctttgcctatcatttgatctgagtttgaccttgtatttgagttatattttgtttaaaagggaaaaaacaaaattaaaaactgaaagtcaaaatatgatatttcactaaaattacaaggactagaatgatattttcatttcaaaataagtaaatatcattttggaccctatacttaacaaaaattactaattagactctattttattaaatggcaaaataaattttacattttttttcaatatagtaaaaataagaccctgagcttaactttcaataacacgaacaaatacagaaaataattcagggtcatatttgtacaattttgaaaaatacaaggtttattttatcatttaacaaacaaaggatccaattaataacttttacaaaatataaagttcaaaatggtatttatcctttcaaaattgtcattattattcttaatcataaagcacaaaatataaaatacaaaagaagcaccttttgagacagttgttgctaaaatacccttcatacattcaggactaaaccagagactgataactccatgaaaatagaattatttatatctttttgggcattaaattagttttgttctcaagtatttttagtttattttagtgacttttagttagttttaaataaatat

SEQ ID NO: 30171 - DNA, 2128 bp, Cannabis sativa
aacttcaaaaagaaaatataaactcaaccaaaacatacaacagctaaatctccaacttgcatgcaaccctaacctaaaagcttgaaaattcaaagagaaaagaggataagaagctcaccttggtttaagctatcacaaatcctattttccctttgctgcaacaccttggatgactcagaattgaaaaggattttttttgttttgtgacggcctcttcgggtcaaactagaagacagaggaaaagagataatggattcttctaatttttttttatttattttcctaagtgtgaattaaaagataatagctaatttttttttctttcaaatattcatcatatacaattaaaacttaaaaggattaatacaaatccatcaactttcctaaaagacaagattaaggtaaagaagacctatttgtcctttttttctctaagtaaacccataacctagtgctaatatggtaaaaaacaattactccaaaaaaactgacattccaaatatctaactatattgctctattatttctaaggtaccaaattatatttaagtgactatacaggccatatgttgcatttcattgtcatgagacataaaatatgaaaattataaaatttcacatatatcacgattaatacacctagaattcaaatatatctctataataataaaaataataatttaaaagtatatttctaaaattaaaccctagttatttactaattctcatattaaaggaagcgatcattacatgaattaacaatttctgtaccgcgctggatttgctcatttatgaggttagcaatttaaaaaaattctgtaaaatattgctccacttcaccaataatctctttctcaacacaaattttggccaattttcattataatctcagtaatggcatttttattcttcctcgccaatgctttgttatgaaagtattttgtatttctatcactagccatcatccgagccgatcttgaaatctgttcccaatataattcctctttatttataaggtcctccaatttaaattctaaatctttcaccttatccattcgaacattgggagcattaatgttcaaaagtttatctatctccttttgagttttcgcaacttacttagataaagacccaaatcattgcttattccaagccaaaagatggtttgcacaatattcaagagagacacgaagtcccaaagggtctgtcacatctaacctacaactttgccaggcctcaaacataatggattaacattcatcttctttaagccaatgaggttcaaatcagaattgccattaaacttgctgacaaccccatatcacaacattctcaagtttagtagctataggacaatgatcagagcaaagaaaattaccatgtcacactcgaactgatgaaaacaactcagacaaggcttgattgcacacaacttgatctaactcagacaaggcttgattaccatgtctcttatttacccaagtgaacatcgagcctttgtaccccaaatcatctagcaagtagtcatcaagaaatttctaaaacaaacgcagagccataacattttggtccctaccctccttcttcttatgacaataaaagatctcttgaagtggcctcacagatatacgataacgtaaagaactgcttgagacgccaaagaagtaaccatgaatctttccggaggtgagtttttgcgttaccataaaaccatatgaattgccacaaagaaatccctggacattgcacaagagcatcaatatgtcccctagtgtagcttttaacagtaatatcccaatcatcattccacattaataagagtccaccactactcccatacaatccacatgaaagctattagcaaaatttctttgtcatcggatacatgcccaaataccacaaagcttagtctcaaacaggaagaccaaagttggggaatgcttacgaataatagtccgcatcctatttagtgcacccaagttccccagacctgggcattttagcataagatactcatcgggcctggcgagtctgctccgcggactgcaccaataagtcatcaaccaccataggtgatacaaatggtgtaatattcaatttcactcttctctcttccatcgtaataata

SEQ ID NO: 30172 - DNA, 1187 bp, Cannabis sativa
tttatttatggcacaaaacccaacaataagactctactggtagagtgaagatataagaaggtctgtttaatttagagaaggtcaggatagaggataatcctgttgatgttgggactaaggtcttcataaaaaagttcaagcattgcttgaacttgatcaatctcagaagttagtatagtgagattcctagaacaccaaccatgatggctgcattctttcttcatcgtcatacgtttaatttgaagtaactaggtagaatttgtggaatagttcttccaaattgaaaaggtctctaagaagttatttcatttctagaaagttgttaactcgcgggtgcagctcctggaaggcttttttgtcctaccgagaagggtcttcaggaaagctagtcctcctttgaaaaggagttccaaatggatagttgtttctcctagaatgaggtccccaatagttgactccagctggctctttcctattcaggaaggtcttttagagagtgccttggaccgtgactccggaagccttcatttggaccaccgactttaggatcttgatcttaagcctataaataccacaaacatttatcatttcaaaaaaggacgatcagattgagtttagtgttagagagagatacaaagaaaagagagagattagatttgggttttgtaagaagagtcttttgttgatgaagaagattcttgggtaagagtgtgagggttgaaacactttgagagacctaattagtgaatcgatctcgactgtattgtacatattcctgctcaatcaataaagaggatttgagtttttaaaaaaattaaataaagagaatttggtggtgttccagaactggaatagagccatagatcacatcgatctatcaaactaaaaatagcatatatcttggcgttgattttattgtttaacaactttaattgtttctggtttttccatactttattcatccctgtttttttcgattattgttcatgatttgtgcttgtcattactaattgtttaattgtttaaagtttagttgactacaattttcccaagacttttctatttatactaaccttgtaagtacaattagtcactaaagcagtaccattcaacaactctaacaaaacaaaaactagttaataaaaacaatacttaggacatcaaaatatttagacgatgcaaatcta

SEQ ID NO: 30173 - DNA, 1207 bp, Cannabis sativa
ggttttttgtcaaagtgtatcacacctttttcaagcactaaatctcttgtagcctcatccctaaagctaacaagagtgaatccagaatgcattctcactatcttctcaactcctaagttcccccacactctcttcacaaaaccttcaaacactctaaaaggcgggtcagcaccaagaactatacatactatagcatttttccaataggcagcctcaacttctatttcttccatatccaattttgcaataacctgatccccaactctcaaaggttctgtaaattcaagtctagtagaaggagttctcacctggtttgttttgaaattgctccacatatccttagcactcgattgataatcgacttgctccatctcatctgcccagatctgcgataaagggttgctcgctggtttctccattactgatattttcggttcaagctcttcgcaggggtcgagaaaaaccttcgccaggttctgatcttccactccatcttggctcaaaggcagctcttgatcttcaggtacatcgactatggctggtttagtaggcttcaaaacatttctcttcttcttcgcaattggaagagagagaacacaccctacgcccctaaactgaacataaatcttcataatgagaaataaattgaaaagaaaaagatgtaataaattaatacataaagagagcacatgatgtatagcttaatagtgttacatacacaacttaaattactattacaatttgagcttttaaacgttgatttttactactataaatttgaccttcagatgcagtttttaaagtttttcagcgttgattttaacaaaatttactatcaatgttgattcaggcaatgctataggatcgaacataaccgacgctgtaatgtacacattggcatcggttattatataataactgatgctatacatgcactatggcatcgattattaggatataaccaacaccatatgttataataaacgacgacaaaagcttaataaccgaagccacattcttaacaattaatttatttttccagtttaaaacctattataatttcataaatttaatttatttaaattatatatttattaatttaaaataaatattatttaatttaaatataatattatattttttaaagataaattaaatatctttaaattaattttatgattagccaatatacttaaattaatttcat

SEQ ID NO: 30174 - DNA, 1379 bp, Cannabis sativa
tatgtagaatcttacaggagcatagttgttttataagttgttttactttttgttttactttactttttgtttagcaaggttctttacctcattttccaattctcttccataggtttattaatgactttattaaaaaaaatacacttagactataataataaattaaattatataatttttaattaaattaaaaagtacctaacataaaactaagtatacgtgctttgcacgtaactttttttctagtatatatatatatatataagtataaacttagaatgtgttttcgtaacataatattctcaaattatttataaaaagaagcattaaaaaaagagaggagctcatcatcatatttttaaaaaaaatcataaatatatataaaaaaccagtacaaatgacagaaccaactcatcaaattaagctctagctctcacatgacatagtcatgatgataagtacatgattgcatgagcttaattaatttattgaaactaacagaaatagcaaatgatcaccttataactaattgaaatcaaaacattgcttgtgaatttgcaacggattaatccttattgataaaaataattaaacatgcatgatatgaagttccaaacccaatagtgtttgaatcagatcaatcaatattttgtaatgcaattttgaacagatgaagtattatcatcatcttttggtggcagcttttcgtttcgagcaatgaaatccatgttgaacgtattcaaacccgtgaaaatgccgtcattcagcttgtggatgatgacagttccgtcatgtagaatatcgcgctgagtataagagaagggaacatcacacattccttgtgtcgctacaagagtaactattgttcttgtcataggaggcacttttaccgtgtaggtagattcagttgtagtttcaactgtattagttttttgccatccaactgttccggtcaactcataagaacattcaatcttctctttagcaaccaatggaatttcatcaacttcgagagatgtttggacacctacctttagggaaacgctagcgctgaaagtagtagagcttgaattcttgtaggaaaatgtgaggcttatagtgttatcctctttctcgtcgtggttttcagcggatgcatgggccttttctagggctttgacattgtagatccttccctcctctggtcgaaaatcgatcccgtagatactcctagaaccagcggtctcaagcactaccaacttcgtataagagttaattttgggaccattggccttaagaacatcggtgtatttatcatcagtacaaatttggatgtatctatcctcgctacttgtgtaatttttatagaggagggccacagcgctgtcggcgacttttac

SEQ ID NO: 30175 - DNA, 2044 bp, Cannabis sativa
tgttttaatttattgtgtaaatttttttaaaaataaagaaaaatgagtattttttacatcaattaaacataacattaaatgagtgagacccattttaaaagccaattccaatttcctacaatataccacattttagtggccatgaacccctctttatatctacaaatataatgggacccattttatttttaaattcctaccgacagagtatttttttaaatccccacagtagtataagaaaggtaaaagaaaagaaattacacatatgtaacacaacacacatatataatatataagaacatgaagagacaaaaagaactctcactcacaatcttgagtgtaaattagtagacatcaccatgacttggacaatgtattattaccttttttaaaaagcttatttcttcatatctctaaccactaagggctcatagaaatagctttgagaattatcaagccttgtattttctagtaagtgcttgttgatagaaagctacactacaaaaaattctactttttgtcacaacaaaacttgtactgataaaactaaaaaaattgtgactaatcattaccacaacaaagagctttaggggcaatcattttttctgaaaaatgaaaaaaaaaatacagcaaaggattgttcatctgcaaaagggttgtaaacccctgatggcgtcagttatttggaaattactgatgccatagggacatgataatattgacatgtgtgtcctatgacatcagttatttccaaataaccgacaccataaggggtttataaccctccccaatcctttgtcttcctcattcgacatctcctccctaatttctaaaccaaagaaaaaccccaaactccctgccaaccaccaccactacaagaaaaaacgttttgctggcagaagtatgagtaagtcactggcattattttttcggtgagcttttacgatggaaaacggtgtcgacaataatttgtcagcataaggtgttttgccagtaaaataccatacctcaccgacaaaactttttatgcctgtaaatttattggctgacataagttccccgctgataatgagctcttggctgaggagtcattgatgacgttttgtcagcaaaatattccgtcggcaaaactttcgtgccaaatttatttacctacgaaagttttttcagcgcatcttactttgccggcaaaactctccattaaaaatttattttagttttgctggcgagatatagtttaccgacaaaatatatatttttttaaaaaattatatttatttatatataataaaattaaaataaaagtaaagtaaatttttaaaaataataataaataaatataatctgatctatattataaaattgaaatttatattataattacaaaactatataaattatctaaaacaaaataaaagtatcgttagtttgtaaaaattaatattatttacactgcaaactaaaagataaaactacaagtcagcaacgttgtcgttgttgtcgtcatcaggaggggtaggttgtgaagaagacctagcgttaggaggccgaaatggtagaatctgtagaatcggaagcatcgaggcatgttgaatcctagaacaacactagccagatattgttgctgaaattcgctcatgatttgattccgagtctgcatcatttgttgatgccactcgttccgtgcttcctgctcttccaccctttgcttcagggcctcatgttatagtttcagttctacttttatttatatccatctacttttagtaacttttccagtgacttttccggcaatgatgacttttttagtgacttttccagtgacagtgacttttccggcgacaataactttttcggtgacttttccggctctgatgacttttccgacgccagtgactttttcggtgaaatttattattacaagttttattaaatttatcaagccttatatttcctagcaagtgcttgttgatagaaaactacactacaaaaaaaatcatacttttagtcacaacaaaacttgtgactaaaaataaaaaaagtt

SEQ ID NO: 30176 - DNA, 3324 bp, Cannabis sativa
  modified_base (1003)..(1020): a, c, t, g, unknown or other
tttttttatttgagctgtatatttgtttatttggccagctaaaagtatttttgtaatattgttacttttttagttaaaactgaaaaaagcctaaaatcatattactatacacacatatattactagccatcacacctctcgtacacgttgtcattcggttgctagacatccaaggtctcatggcctctaatttgatggtgggagaagaggatagggaaactagagaatggattccaaatcgatgaagattgagcatgcgtgggcgtaggagcagtggtacaagcagtttgagttgtaggatcggagtatgaatcgagtactccattggaggtgactgataccatgtagaagcttgactagagcaagttcagaaagatggtaagaactagagaaagtaagaaaagaaaaagacttgacagaaaagcttatctctcattaatgagagattctttatttataagcacaaattaatacaagtggccaatgcaagagcaaaagaaaattctgtcaaaacagaaaaacataattgtaaagaaaacaattaactaacttctaaccaattggtatgtgcccgcaagggatatggctctgataccatgttgagaaatatggggtttcatctcaaaactaattggtaaaactaattagggatgagtggagtagcccatgttcttacatatggctcaatattctactatttatttcatgtgggacaatgttcacaatattaactaactaaactaactgaatgttatgttagctaacatggcttgacattatagatacttgtttaaagctcatgatactgccaccttcaagcttcgtttttggctaactttgacagtaaaacagcgagctagttttagcttatttttttaatagttgagctcaggttgtctgagctgtctaggtgttgaggagaataatcttaagctgtccaaggtatctcaattcttctctttattttcatgtcttataccttatatcattattattattattnnnnnnnnnnnnnnnnnnattattattattattaattttttctaattaatagttatgtaatttaacatatttttgtaagaaaaaatttgtagtgaattttcaaaaagagtatttatccttatcatacttttcaaatttctcttataaattacatctatattttaagatttctcatagttgaaaatgtgtattgacatggccgccaagacgagcatggcatagagcaactgatatcagaattacatattggtttgcaaatgagaaattaaagtgacatcagcaacaaaatgagtaattaagagttgtatgaaaagcacagtggagtagagatgcagaagcatctgaaaagaattcaatagaaacataatttattcaaattaaatttcgcaacacaaagtaagttagatgagtatgatgtaattttaggaaaaaaaaattgaagaactttatattataatgaagacattatagacataatttttttttcaggttatagacataaaaacttgtatatgtattcgatttttggtttctttctgaataattataacgttccatttgtcattgcaaagaacatacaaatatgatattaataattgtactttacatagcttaattcttgtttctatgacctccattaattaatatagtaatattgagtatctttataatgagcatttaaagaaactagctgatctttaaaattattgtttggtaaactcccaaccttttattttatattgattgagttgtaatataaatataaaataactattcttacgtaacaaaaaaaataaaaataaaaataatttaacataaaattcaaacaacaattagcattattcacaaattttataacctttcaagaacaagagtcatcaaattgtaatgaccaacctaaaatgaaaaggttgacagtcattttctttgcaattaagccaaaagaaaaaaatgttgacacataaattaaatttatatatgcaaaaaaatttctaacttttagatttagacactacttaaaggagagtacaagttatgaaaatgaaaccatataataatgacaaacataaataggtattgttgtgtggtacttttatttttgttgagcttagaattttgtatgattcaaaattgtggttgttttgttgaagcaagagtcaaagtccaagtagtgaatcgaatggacgacaagtcaagcataattgatcttcattgtcaatcgaaagacgacgatcttgggagtgtcgttttgaaagttgggaatgaaacagagtggagtttttctgttaattttttgggcacaactctattctattgtgatgtgaaatggagtaatagtagtagtcggtactctttcgatgcatacgacgcagttagagactatactaggtgtcgaactcaatgtcgttggatcatatctggccaaggctctttgtatggctatgatcaacatcatgatatttgggttcaatttcccttatggaagatatgaataatatgatttgagcattttgctacacatcttgatacgtatatttattgaaacgtaaatttataaataatagttatatcatgtcatcttatttatgataaaatattataatagattttcatgagatgtatcatttttcatatgatttttttttgtcatcacaaatagtcaaatggcttaacaaatttgttacaatacttttatttagttttacccaaaatatatgttaaaactcaatggattgacagagaaaaaaaaaggacaaaaaaagaaatttttagtgatacttagtaataccttgtagaaattttttattcatttattattattattttgaaaaaaaaaaaaacaatttttactttcaggtatgagatcagggacaaaattatgtaggatattgggatgctatggctcccatatattttttgagaatgcttttaatacacataatttatataaattaaattaagttcattattttttttattgagaatattaattgatctttgtgttagaaatttataaaaaaccatgaaattaagcatgtcaaaaaaattcatttagttagagtgggtcggagcttcgatctaacggatcatttctgatctgaaacattcagataattattgaatcccagatcagattcgctccgccccgcctaattttttttcgaattgaatctgatccgatctggtttcaatatattagaaaaaacttaattgaagactcggacctcagacccagaccccttgggacctgaaccctctcaagatctaaactcgaactcgggacccgagatcagacctggacctgaacttggaacccaagcc

SEQ ID NO: 30177 - DNA, 1170 bp, Cannabis sativa
agtggatacttgttctcgatcatcaatttgtttaactctgatagtcaatacacattctaagggctccatctttcttcttaacaaacaaagtcgaagctccccaggttgatacactaggtcggataaactcaagatcaactatcccttggaattataactttatttttttaaagttttgcttgagctatcctatagggtaccttagggactggctccgttccaggtgccaaattaataataaaatctattttccactgtggtggtaaaccagttaattatttgggaaatacaaccaaaaactcttttatgactctgatttcctcaggacaacctattttgaatctactaatgtaacgtcctgatccgtaagggtgccacgtgtgtacttttataaattagtttgtagtaataaactaacggtttgtaaaaagtgtgatttaattaaaacttttagtaaaatttatttaaattaaacttaacttttcattcaaattacggctagatttaaggatccccttccttataaatctttacaacatattactaaatagttattacaaaatagggttacattttcaaaatacaaccaaaagatggatctgatccactgagagccaagacatggcagttgatatgtacattgtcaggagacctctgactcatggctggtccaatttttttttccctttacctgcaccacgaagcacccgtgagtcacaaagactcagcaagaaaagcaaattaaatacaaacatcgtataaaactccatattataacaatgcataacatacaaatgcatcactcattataaacatatattcaattcataatcaagtatcagataagcaattttttgtcttataagacaaactgactttgatacctcataaagcattcttaccactggttaccaacgagctttatatgtcactatcgttgtctaattaagcaaccgataagtaagaaacctattagcaatttcaaagtgagtaattactcattctcaataatggtaattactgtatctttacctcgatcataatcgagtgacaaacgataattatcgtttctcacttgacatgctaagtgcaacgtgtgtgctaagatggaaagttacaagctaagtgatgcccacaagttggacaagtggtggtcaagtggtggcgcat

SEQ ID NO: 30178 - DNA, 1407 bp, Cannabis sativa
ccaaggagatcctctttcaccatacctttttcttttttgtgcggaaggtttctcctctcttttatgtcatgcggaaagtacacacaaaatttttggatataaagtcgcacgaactgctccatcagtttcccatcttttctttgcagatgacagtattcttttctgtcgggcaactcctactgcttgttatactatgatgaatatatttaatttatattccaaagcctcaagacaggtaatctcattaatttcattcaactaagttttatttttcttattttatattgtggtaggatataggaattcattcaattatactttgcccatgaatggtatactggttttaagacttaaaattacagaagatctcaaaaaatggaaggattatattaccaattctttctacaatttatttatttgaaactgtaagtatttaatcgactgttttattttatactgatggtagtttattaaaattatatttagaactaaaaattagacataaataactctcgttctttttttcccttatttatgtatattcatttctttcataaaacaacaatttgttgtaacttagtactaaacaatctagttatcatcaatttaatgaaatggttggttttgttggtgtataattactcaaaagatctatagaattacatagctttgatgattgttataatactaataatgtactagtatttttcaatgaataattatttagggctgagcatcggtcggtttggtcggtttttttctatataaaaatccaaaattcggttttcgatttggattggtgcaatccaataaccgaccaaccgatccagaatctatcttaaaaccgatcgttttgaaccttggtttggtcggtttaaaccgcccaaaccgaacttttttttttaaaaaaaatttgatccaatatattctataaacacattattttacattttacaactacaaaaatacaaattaattgttcaaaaactaattatcttattcttttaattttaatattaataaaaaaaataatatattatttttatatattattagtaactataatacatgcgaaaaaaaaaacaaaagttaataaattaatatatatatgtataacagtcggtttcggttttttcggtcagtttattacccaaaaaaaaaacaaaccgttcaatggcagttttaaccgttagcgattttttcggtttcggttccaacggtgttcggtaggtcggttgaaacgttttttcacttttttggattttatgctcaccctataattattatagattatttcttacctattgcagcttataaattttcactaagtccacattgtatttctccccaaatactccggaggatctgtaatctctttatgttgaaacttttcaaatgcaagtgact

SEQ ID NO: 30179 - DNA, 7137 bp, Cannabis sativa
taattttagtatactctgtaagaggttggaaatcgaagcattgatctcttttaactttccgtcaaaaaaaaaaatctctattaacttgaaataacactcgatcactataataaagactattttaatatatattttattatttaatattttatttatatactaattatatttcttttatagtaatatacaaattaaaatcaaaaccagactcgaataatttatggtgtgtgagtgcacacataataaagtgtaatataatttatattactaagatgtatgtttttttttaaaataatattaaaaataaaaaaatttatatgatatactaattttttttaatttattacaaaaatattgtcaaacggtatttttttctttcttactttgtatatttttggattttatacggcagtatactgctttttttgtacaaagtttttttttttattttttttttgatgtacacgtacttttatagtattttcccaaactaaaatttaaagtttttcttataataaaaaggttgattgggacatgagctgtcacaaaagtgacagattctttaatttttttgatttaaatggatactctctctatatactgtacactttattcattttttatgtgtttttttaattaaaaagaattagtaaaaatatttgatgtgatgtggcttatcatattgttggcacacctcttttttttttttttaataaaatcaattttttttgttttttaaaaaaaaaagtcacaaataaagcacaataaatgatgatttgaaagtgattgtcacatctcataattttttttttaattagaattaaaatttaaaaaaaaaagtaatacataaaactcctttaaccttgttatcgttccattattcttcttcatcgttttttttttcttccatttttgttctagtttcttcttcttctttcttttttttttctcttgcttttgttagtaacttaaaaatgggaacgaaatatttcaaaaaaaaaaaaaatcccatagccttacttccccaattcttgctaaaagaaaactaggtgttggtacttcgaagagcactaaatcaaaataccctcgacctatgttggagaactccaactctgattttgagttggagccagagttcgaaagtctaccaaatttgataagttttttttttttttttaatctattgatcttgttttgttttaggggttgtttcaagttgattattatatttctcatttctcatttttttttctgcatgtttttttgttagtcctcctattttatagttttctgtttgtttgactctgtgtcttgttgttttggttttgttttgttaactcttaggaaaaaggtaaatccctagtgaagattgttcaatcaactgatctgtttgatgacataattgggaaaagggttattgaggtgtgtgattttattattttagttctaatatttttttatgcttgttttttatgctctttatttttttgtgttgttttagtagtatttttttttatgttttttttttataggattgggaatccaagtacactcgatcagaatactaccattccacagttataacctctggttattgaagatattaaaaaaattcttactgaaacccaattaaatatgttttcaaaaactgtattggaagttgtttttgattgcgtagtagatgatgacattcttcagtgtttccttgtctttgtatgcctgacctttttcaaattctgggtggtgtttgtctcttattagcttcgcgttgttgatgtcgatttttggatcaagttttttactgttgtttttaagtttttctaccgtttcttcagcaaccagattcgtatagtcaactatgtcgaatttgacgttcttaaattatcttgtttctgactctcctccttcttctgattggtgttcgagtgtgtatgattctgttgttgctgtgctgttttcaattattgttgtgttgttttcaagcattgtcacattttcttgatatggtgttgttatggatgtggtatttgggattacaacaggtcttgtgttgttgctctgttcgttcccaacgaggaaggacgcgtcatttttccttgttactgttcagagtacaaaagaaaaaaatgggcctgagaagtataaaagaaaaaaaaaatgggcctagacagtataaaagaaatttgtgccatgtgacagtatttttgtaaaaattagaaaaaagtcagtatttttgtaagtttcccacaagttatttaataaaaataaattgttatctaatatatataaatccatacgctctattgtaaatttttttatttttttagtcactacaaaaattagcttatttatttctttttttatggaaaaaaaattaaaatccaaaaatatatatatttatatattgagactcgtttgaggagaaatctctcacaaactctctttttacatacttaaggtttcattcatgagtttccgttagtaagtggtattggcgccttgagccttctcaacttttcttaggatatttttattgatgaagtgttagctctttatgctttctcaacttcttctatgatatgtttgatctttttattgagggagtatttgtcctttggcatttctgaatgtcatttacgatgtaggattctttaaagtgagggagtgttagctacttgagccctcttaatctcttatatgggttgccactattttggtgagggatttttttacctcttaggctttcgttatcatttttaacattttctatatttcttttcatggagaggtgtcatgcttgcttttaatcataatactatttttttcaagcgttgtttcaggagcctatgcggctagacgacttggtcattctagactttcatttgtggcatgtagaatggtgttggaggatgtaccttgcgactatctcatcttgagatggtgttatgttgggaggtcttcttttcctgtctacaacttcttaaacatacttttcattttttgtttgttgaggttatatgatcatggccttttgtttactctttttgttctacaagggtagctaatcattatataagaaagagtcttttatatagatatatgctccttgtgaagtcaattgtgttggcatcatcaaacacttttgatttttctttttgcttgaagtggacccttttgattactctactgttttgcgcaccttagcaattttaactgataagtatagaaaacatgatgattgtataaactatgtaggtaatatgaaaaattgaacatttctttgataaagataaagacatggctacatgggtacactaggtaccaccacatgagggcaagtagagtgtaattgctatcattggatgctaacttagatgccctctttaaaatataatatattaaaggaaagaaagctagagttgctactgccacttaaggctaactagagtatcctctttgatcgttcatagaaaatatgacaattttacttctaataatctcttagattattgatgtttatgggttgagagatgatgttgccacttgagtgtatcttttcataggtatcaggtacatatttcttaatagtctctacaggggtctgacgagcttctcgattagtacttacttgtgcctacatttagtcttcgattttcttcttccacactaatatatttctctattctttagtagaagtcatctagattacttaacactctcttcaacatgctttcccattgcctctgaggtgtactcctacacctatgtcgatcttgactttatctttggacaccttacctactttaataactttggcattgaagcattgaatgtagcttcataatatttcttgttcgccttacttcacattagtgatacttataatggacatgatgaaaatacatgtagcatgatgttgttagaggaactcttctaaaaatttctttcaagttgtgattgtacttaactttagcctcttaaaatacttatatgtatcttctttaagcatgcccatgaagcattggtatctatccttgctcaagactttttttttcatcttcatctgcttatgaaaagtaagacggtacggtactacaggttagttgtgccatcttaaggtgtcattttttgttcctttaagttggatggaagtttttgtacttggattttcttcgaggaagaagactcttcatcgaacttatcattatcaaggtctcccttcaaggcaatatcgatcttgtggtgaaagtcttgcatctttgcttccacatggttcatcccctttcaaagattagtgggaaacaccttggtcctctttgaggtttatatggggattatgtaaggtacttctcttgtccctactctgtgtgacttctcatcaaattcagaggatggggccttatgtttgcctctcttttcgaagggagccataaacggagtgcccctatcaaggcatcttttgagttaagtttttctctaggttatggggtattttcttcaatccaacattatgagggagggtcagtttgggctgcctcaacaaacccataggtacccttatagtgacatgtgtttcctagcctagctaatatggaggggtatcattagtagagagcatagagctcccttcattaacatgtagtactaattccccctctcttttcatttgcttttacacttgaagagtgttgcatgggtcttctctttgagtatacaattcatcgccattttcatgttagccgccgtagtctccaacctttggttctttcaacaaattaaggttgttttatgtagtcttctttcttgatctattttggagatttaactactcgagttcaaaagcttggactaattaattaagtgtactcgttaatcctttcaagatgtgcactctaatgggttcaaatcttgatgtttatggcgagatggaatgagatactgtgaggcggatggtcgcattggtggcagtaccttattagttaattgtttggttagtatcttcctaattctagttgagggtagtggccctaattatggcacttggcccactaagagaatggtaggcattgttggatgtcctactataaaggtggtgatctcattgaatgaatgtcaattttcggacccataaatgggtgatatgatataagggaagagacttgatcctgctctttcccttgggcgtatctcttcaagaaaaaattagtttctagtggaggaggatctctcgtggaatacattggctgaactccatccaagtacacatttatttttcaagatgtctccaacaattagcatttttgaataatggcgatttcttagaataaacgtacgtagcttgaatcttatcattcccacagatgacgctaaattattaatggtgaaaattcaattactatgttgaacttttaaggtatctaaagaactaaaaaaatgggcaagtccttaatggtgacaaaattttgcactactttaggttcatggcataaataattttctattttttttttctaaagaatgaataagctatttatagggggctctagtggccctaaagtacaagttatcccaaagagaataaaatagtactctagttgaacatcagtgggcagtggaggtagtagtggtcaggtgtcaggccatactaacacttagatatggtgtctccactacttgtactgttggtacctacatataaaaccactacttgttctcaaacttggcaaaggcatgactcatttgacttgtccttgttcgtacgtctcttttgtatcaagtaccttgtacttaacatgtacttatctgtttggttttaagtaggtggcctcaacttggtgtccaaagtaaacgcttagaaatattttttaagtgttggatgtttttctttaattgtaaggctttttctatgtattatatattatagcattattggagaggggaactcctaagcattacatgggactagcttgagcgtattcctcctctaaggtggagtagtgaggtttgggccctttcttattgtggtgtgagacaatgcgaggggtagcattagatgcgacagagcgtgagcgaaggggtgaagtccaagtgagggagtgtgatcgaaggggtatggtcccagtgaaggagtgtactgaggtggtgaggcccgagcatgggagtgcgagcgaaaggttgaggtccgggtgagggagtgagactgagaggatgagctctaagtgaggaagtgtagccgaaggggtgaggtccaattgagggagtgtgactgagggggttagatctgattgagggagtatgactgagggggtgagattcgtgtaaggaaaaatgagcgagggggtgttgtccactaccatgggctaggtggattaaggtcaagtacctcttgtataggtctcctaataaatgacttgaatttatgatttaacattagtgcgtggtaaatttattttgttaacagtattaagggaagtagagaaaatgtaacaattaatatttaatttgtcaaaaaaaaagtatataagtgtataaatctaaaaacaataagtatttatgactcaaataatcctagacaaaagcttgatcaagttgagaaattttgttcaaaaattttatttattggccctaggataaattgtttgagattatttttttaatgaaaataagacgggagatataaccagcctaaaaaaattatcaaattaagcatagacagcttagctgctcaagccggtgatgtccttctctcctaacacgaccttacctattcaaggcttcttccatagacaactttcaatgcctattagtgagtgccatgaaaaatatcttggcctcccatcttactccggaagagacaaaaaggagctattaagcaatatcaaagacaaaatttggaaacttatgcataaatggagtgagaaaattttctcagcggggggaagagaagttcttctaaaagctgtggtacaatcgatccctacatacaatgagttgctttcaccttcccaactacttttgtaagcaacttgaatcaatgatggcaaatttttggtggggaatgaatgaagaaggctctaaaatacattggcgctcatggcacttactgtaacgccctaatctatagggacgccacgtgtg

SEQ ID NO: 30180 - DNA, 1138 bp, Cannabis sativa
actggattagacaaattagcctgtctaatccaatccagtcctgcgtaccaaacgggccctataggaataattataataataactatatttataaatatttattatgtagatatagattttttttttaattttagtattggagacacgaaaaggttatgatctttcaactttgatttcataaatattaattaaataaatattataactaataaatagaaacaactttatagaattgattattatactaattacttattaatattaaacctattgtatgtgtcaatctatatctatatatctatataattctattattagggtagttgacatagcatcttatataagtttttttgtattttctttgctttcttattttttctatttttcaaaaatcttttcttaatactttttccatttaatcatttattatttaataatataacatgtttaattagtgacctttcattttcatacactaatactataactcctttcattatttaataatgtagaatgtttaattagggacctttcattttcataacactaatattataactcctttcatattttactattatcataattatattttacaactattccatttcacctcttaattatcaaatataaaattagaagaagtgatattaaaaaactatttatatattctttatatacgttttcttatgtatgagatgagataaactattagagtgggaagctacaaagcaaaatgaagagagtacaatgacactattggaaaagaagaaagaaaaaggaaaatgctacatttgtgtttatcaatctttgcatccatattcaagaatttaaaagagctaatagagtttattaactgtgttaattttaattttctccaactcacattctcttttttagctatattttatttatgtgaatgatgattatgtcatactaaataccaacaagatttatactattgaagcaaattgtgcattgcaaacaattctgtcgaaaaaataaaagtttatacagaaattttgtttgctaatcttggcgtgcaataaaggtaaatctctctctcaatttcaatctaatttagaaatttatttatttttctttttgtaaatggtacaatattagtcatttattattg

SEQ ID NO: 30181 - DNA, 2176 bp, Cannabis sativa
ttgaagacatatttatctttttttatttttaattaattaaaatacaataaatttggaaaggggaagaatactataaaaactttatagggaaagaatctttctttttattattttttcctacatttatgtggggctcactaatttgtcaaatttagtgtaaaatcaacactaaaagagtataattttagcattaaattttttttctactccaaccacaacactaaaaatattatttattattatattattttattaaactatctcacattataatttatatatacatataagagataattacataaattactattttttgtaaaaaaaaaattacatttttacatttacagaattttttttttacatttttatggttttccataaaaataatacgaaaacaataagaaaacaacataaaatatcattataaaaattttgaagaagcactatatattcattctctagatggagagaaggtttagtgaataatgtagcttctttaaaatgaaaaaagtattttttatcatatgttttttttttttttttttgagtatttgttatcatatgttggatcacgctattagtaggtttttttttaaaaaaaaattgaagattgatgtaatttgaagaagctattgagaatgctcttaggtgtatgcaatgaagaagagtttcaactttcaatcacaaaatggattataatgagtgaagtaatctataattttacaaatgatattagtaggatcggtcctgaattttaggagtcataggaaaaaaaaataggtttttatttagaaaaaaatgtggtatattcaaactcagtaaaaaaaaaatacgtgtattttttaaatgaaaaaaaattgggctcatgagatgggtgggccctaagtacatacctaatctgcgacgagcttggatatcagttttcacacattatcaatgtgaagttctttgatattctctcatgattgtaaccaaatttgctcaccaattttacaccattcaattaaaacattattttgtagttcacttttaagtatctccaatagagatgcaaataagtggtgcaatgctaaaatattgagtcatgttactaaaaaagtggtgtcttattatattttagtacacttaagagaaatactactccagtattttaaaaagtgtaccaaatttgatacatgctaaaattgtgccaaatttgacacaaaatacaccattgtgctaaatttggcctataataaattttacatttttattgccacttattattatgattcattaatttttacataacttagcttatttatttactatattaccatttgtttacccaaatttaacgacggtgacgtggaaaaaaaagatgatacgtggcacgaggataccgagatcgaattaatgaaaaatgtgtaaagtcttgactgtgagacatgacctattgtcatgaccgataaaaaatgagtctgacagtcactttttctcctagcttgaaaaaggtgactaccccaaggggacgacaaactaacacccttataagtaggataaacaatcatcacacacctacaggagtaaaaccagtctaaggggaatataccactacccctacctcaaatgtaatgatatattcaaaatgtgatgaagttagtccatgggtgtactcctaaactcctacatcctcatggtccaagtaatgcattccacttacataaggcatggttgatatggtacatcttcatgacgctaagactacccacaacgttgaagatcaagtggaagggatcttaggggtaacacctcgaggtggcaactgtcacccccttcacgatgggtctcaggggtgtcaccccgaagtagtagctactagcccctgagaaagttaaacagtcataccatactttgggatagaccttcatcgttagtaactaattcaaatatttaaatctcagattaaactcaaagatatctacaaactcacgaaataacgagatattaccataagaaccagatttcaaccacttctgaaaaccaaggagacaatatatctccgcaatggtcgtgtctcctgaggcaagaagcactgacctattttcctatataagatgtcacccatgatctgggaaaaggatccaaaaaattgagcacttagagagtggaaactctatcatttttattcatt

SEQ ID NO: 30182 - DNA, 2832 bp, Cannabis sativa
tgcctcaaatatgtttgtggtatgtctagttgatgtctcaatgcaagttttgacccttttgcactaagacgatcccagaaactaaaaccctggttgagaatgtcaacttgggcgatgggtgaaaaccctatgtgcctaagttggcttatggatcgcatgtttgtgttattgtagctcttcgggcttagattaggttgatccatgttttcatagtacaaaatactaaaagataatgggttggattcaagttattgaagtcaacaggtgttggtaaaatatattccaacacaatgtacaactatctttctttccaaatatagactggggacatgccaggatacacgttgatccatatctggctattgtgtgttccttggccaagctcttgtctcatgaaaataataaaaaaaaaaagaaacaacaagttgtctcttgatcttcagctgaagctgagtaccgtgccatggctgatgcaacctctgaagtaacctgaatcattgctttactaaaagattttggcatatcactcaacaagcctacgtctctatactttgacaacactaaagccattcacattagtgaaaatcctgtctatcataagcgcacaaagcacgttgaaattgacttccatttcatttgagaaaaaatccagcaagggaccctcaagctacttcacattcaatcacaacagaacttggctgacatcttcaccaaagccttacttctctcatcattcaacaacattgtgtatccaacatatacacgccatcttgagggggactattacgaataggatgttagttataagttgttatagtcttggctttagttatttagatttcttggcttaagcttggttagttgtctttcaactaactcaactaccagatgtatatatatatactgctcgttgtaatgatcgagttagactaataaaaatagagcattttccattctctcttttcttcctgatattgagtactttgtttctctcataccttttataggtggtaccctacgattggttagcgatattccctaaatcttattttttaaagttatatgggacatgctacttaattacactaatagtggtatgataccgatgaggattgccttttaacatttctcataattaaaatatcaccttttttttatatttttttcttgtatttaattaagatatttaaaaaaaataataatcacttttttaaaatatattaattaataataacagaacaaactaatgaattttctccaatattttaatgtttaaaattcgagatgaaatctaagattaagatatagatttgggaaatacaatagtgacaacaacaagtgaactatggtaatgataagggatgagatacagtgataacaacggctgagatacggtgatagaatgagacaacaaatgagatacaataataatagttttgaatgatcgagatatgaaaataatgtattatggggaacaccgtaaatttttttacaccaccctatttatttattgttataaaaataatttttttaacaaacaattaaaaatactacatataataaattttaaactttttaataaataattaataaaattgtgcatttagtttttaataaataaaattaataataataataatatgaaataagataatatatttataattttaccatatattagaattatatttttatataactatttattataatactaaaaaaaaaatttactgtgttgccttagttaatgataaaatagatagaactacttagagtgattttatagtgacatgtcactattttatatctctccattatataatatttatagattataaattatatatttatagatttatagatcatagattcctgtaagctatgtataaaccatcaaatagtcgtatttttgtaaaaataaatagtaaagtaactattttgaatacttaaactttctgcacatccaagtcaaaaaatttaggccaatcctgacaaaaaaaaagtaggaaaatttacaccatatactattttttttcaattttattacaattttactgttacccggtttttactacatttttactgttttaattttatactaatatactgtttttttaataaaaaaaaattgtttcatttttaactcaaattgcatgttttttttttattattatattttaaaatattttaaaagtttgatttgacttagtattgtcacatctgtgatagtatttttgttctttttttttttaatttaattttgatgataagtatatcacttacactacttaatattacttttcattattctctctctttattcatcttcatatttgagttttttttttttgtttcaaaatctatcactttcttcaaaatcgtggctgggttttgaagggtgatccaaaaaatttgatagctggaacatgtggctgtgtagtacgagactgaagcttttggatagaataagagtgattgtgttggcagccacgatttatcatctttggaggaatcgaaacaattgtttattttctctttactctaattctgttaatagtatagtgaacaaaattaaaagtgatgtgaaatataggttatacttgataaaagatagaaaagggacaagagtggaggaaaacttactccaaagattgatatgtaattattagtttgttgttatcaagaattagagctccacttatttccctttctatagttagcctttggttcactgtaacattactaaactgcttctattactgactgttattttcggttatgttggttactttcaattagttctgtcagtaagagtgttcttgctcttgacct

SEQ ID NO: 30183 - DNA, 1767 bp, Cannabis sativa
atagcatgttcgttcataatagatttattttcagttgcggtactatattacttactacatatagctcatttcctggaaagcctttctttccacaatgtttacatcaatgagctcattttcactttttttctacctcaaaagtttggaattggaggtgtcaaaataaacttgtttaatccactgggacaactttccaactatctgtgtaagtgctaaacggtcaaaggagattttacaatcgaattgtactattggtgcaaatacaagtgccaaagatgaacaaatggttttgatagacacctccaactttttacaactgaaataactttgattacgtgaataaaacatgaattatgacataaaaagattatagaaacctatgtaatacagatttataagttttgagatcaaagttgattaaacaaatgcttttcatagcctaattgtagcactagcaagcaagtgatgaaaaattgagccacaataaacagtaaccctttcctacttgttgtgatgaaatgaaaaacaaacatgggcttgagcttgacatggagattagagagaaaacaacattgttcttctgttcaactttgaccaaagcaagtaattaattcaatgttttttgatttggaattggaagaaattggcttattgtattacaaataaatttccaccacctaaaactaataaactccacaatgatatgtaactactagagttatagttggtcttttaactcttttccattcaagtcactctaaaaaatactcagtcttaccataatcactagctgaacttctattagtattagaatagagatcaactacccattattttcaactagtctagccaaaaacattttatgaagaatgaagaattaatcatcacttagctaagaaaaacccaaattaaaataagtcaggaaaatcagatttcagtctctctttgttttttgcttttaaaaaagcactaaaggaagaagtaagtaatagacaaaccttgaggaaccaaaccccattgctgagaatctatggataagcttgatattaatcgtgctgaagccactgcactgtgcaacggcatcattgaactcaattccactggtaatctaaaccaaaccacacaatcaaaatcaccgaaattagaagagtatcatcacagtaaacaaacgaaaaaacacatgtagcaatattacaacagcttaaaatatgaattcattttccaatttcaatacttgaactgttcaggctttgagtctcaaaccttgaaattcgagaagtgcgtgtcaatttgggagaagagagctcggagagtagtgatctcttgttggtgttgatagttagagactgtaatcgagatgagagcctagacaaagctctcgtggacgccattgaggttggttgggtttgagcttttcttcttcttctttaggtctctttgggtttgggagattcagttctgaaagggttttagctgaaaacgacgaccaaattgccgtccaaaacgacaccgtatctagctgattcaatttcgggtaaatgccattttaaaaattttgtgttgcaaaattcaccatttagactatatcttttgataaatgataatttaggcctttatatttttataaaatagtaaaataatatagaataatatctcagttcaatttttgtcaaaataaatataatcagattacaatttttatattccttagtgttagaaactgtctttagcttaatatattaaaaaacaacattattttgaaacaat

SEQ ID NO: 30184 - DNA, 1926 bp, Cannabis sativa
ttcatcctctctcaacacttgggtttggggtatttataggctccaatcacctcacatacaactgtagtcctaacgagacaagtagtacaaagtacgtctactagctgcagttagcagagtattggttgcaggacgctagtggtcgggatgtcaagctatgccatagtggtgcctccactacctgtattggtcatatatacctccttgtactaccactacctcctcccatatcttcttaggtaacatggttgtacccttacacaagtactttgaccgtgtgctttcgttgtccttttgatctcatctcaattggtatcctttgcaatacatagaaataaatatgttctaagtgtcgaatgtaggaagcaatcatgggccaagagtacctaggcgaggaggtctcggctgggaactcttccttcagcgaggagatgcttagaaattgatgcatgggtgagatgctttggaggttgagtcctaggttaggtgctttgaggttaaggcccagacgagatgtatggagacaaaggcgcacccaagaaagtgaacccccaggcgacgttgtttggggactaaggttcgagcgagaaggttgcgtcccgagcaagttgctcagggaccatggtacatgatagaaggttgggagaattgcctagggattatggctcgggcaaaatggtggtatcccgggcaagttgcttggcgaccacgatcagcgcgaaaaggtagaggagacgggtgagttgcttggggaccatggcccgcgggaaaaggttgaggagatgggtgagaagcctgggcgggaaggtggatgagatgggcgagaaacccaaacaaaaagtcaggcaactctagcgagaagtgtttcctcgttcgggtcctgaggtctttgacacctggacacctcgatgtctttttccaatgaaagttttcttcgaagtctaaccttaaaattttactttgctaatttccaaaattaacaggtgatgatttatgggaatgattttattcagtaaaaaattagaacatgaaatacctaaataaaaaaaagcttaacgatctgttgtctacttagattaggtttcttaaaattaatagtgagacacgcactacaaaaaactgctacttttagtgacaactttttagtcataacataatttttttgacgatttttagtcacaacaaaatgtcacttgttactaaaatataatttttaattaaaagttattactaatttagttttagtcacaacaagtatagtgacaaaaaataagtttagtcacgaaaaaattgtaatttttgtgactaatacatttagccacggagtttttagtcacaacataggaatgataattatttataattagtcacaatttttttacttttaaccacaagttttattgtgactaaaagtaagattttttgtagtgacagtgggaataaggaattcgggatagtagatttttttcttctaagtgattagtgattaacaactttattaacaactttatacattacttattaatatatattactccttattaattaaattacactaataattatatactattaattacttgctccgtatttctctataataattaacgctaatcgtaacgcgacatgtcgagaaggtgttggcaccattagtgcgtgtctaatatcaatgctctttgtcatagagaaatgctaaaggacaccagtggtgcctaacaccattctatgtgtaaatatcactattggtccaactaagtatcggatcccaaataatttaatataatagcttttaggaaatattgttagctaatcgcaacgcgacatgtggagaaagtgctaagcaccgctgatgcctaatagcattgctctttgtaataacaatctaaaagcatggatttcagtggaagcaaaagtttgaaaatttta

SEQ ID NO: 30185 - DNA, 1486 bp, Cannabis sativa
  modified_base (1090)..(1092): a, c, t, g, unknown or other
  modified_base (1456)..(1460): a, c, t, g, unknown or other
tattgctgtatatatttaatgatccaatatattcattcatttttgttacaatataataatatgcaatattaaaaaaattatataacttaattttattattaaacagtatattttttttcaaaaaaatatatgtgataaatgtatgtttataattcttattagctaattttttatatttggccattttcttaatttttttaaaaaaatggacatttactaacttagtttctaaatttagggccattttgcatctcagccctcgtaaatatctaattgtaactcgtccaatgaaaaagaaaaaaaaaaagtttaacttgtccaataatttcatcggtttggtcatgttaacacatccaaatcgatctttatttattatttttttattattatggttagttttcggtgttcatgtaatttatttgaaaaaataaatgtataatgtgtgtatttcatggataaaaaggttatagtttaaattaatgttaaaaacttaagagttatttgtagctaaacctcgcaaacttcacgctttataacaactaaccatctaaactttttttttttttttcctaaacctcccaaactacatttctgtttgcaaatttggtctcccatccaattatctccgttatgtgacaagctcgactatacatgtaacgtcctggtacttaggcgctatagtgatttttcaattacagtgtcaactttactattcaaaagatttttcttaaaaatcgtgtctaattaaaactttagatttaattgctaaactttataattttttatacatttatttacaaaagtcaggatctcgtatttaaacttttacaacattatcaaaatatatttaaatctggtcgcacaacgactacaaaataaacccgagaccgaacactccaggtcgcgtcgccatgacatgtacaaacatcatcctagctcggggctcaaacttgtttagcttttgcctttcttttacctatacatggaaatagcaactgtgagtcgacagactcagtaagaaaagcatgtcacaaataatatagtgtcgacttgtatctaggcgcccgtacacctatttacaaggcttaannnatgagtaagaacgttctttactagggtacagccactgtaccacatacactacgtagcaataatgtacgagtattggtaggtttatcttgtaccccgagtaccactaagtgttgtaccacacacaccctgtacctttctgtacttgtgtcggtaacaccgtaacgtactctttagacattatactaccaatgcactctgtaccgctaccgtacaagtattggtagtgtacgaatcacaacaagcatgcatatatatcacacatacatacattcgcatatatacaatatgttctatgctattcttacctcgttcctgaattcaagtgaacgtcatcatgtctgtgaactgtaaagaccgcttagtnnnnnttggaaattagcagttaatcacgttt

SEQ ID NO: 30186 - DNA, 5698 bp, Cannabis sativa
aattggattttatattaaacgtgtcataattatcttaataaaaaatcttgatatatatataaagaatagtatatatatatatcctaataatataaattatataattatagaagagattattttataattttttttataatgtggaaatggtaagatagaattgggagcaggtaagagtccgtatgagtattgatcggttggtcccataatgaaggggacagtcccacgggaacatggtgttcttagcctcgaccccatacctcccactccgacgtacttcttttccaatctatgcacacccttcttctctcttatatgtatatattttttgctatagttatattattccttcctgtttgccagcccattcctcccaatatttgtaaaacatatatttattatttttgtttggctgacaagactccacttgtttcagctgctagccatttcatgacattacatgactacgtacctctccacagcattattatttgattattaattaatgataatggggacaaaaagaaaaaagacatatatattaggaataagaagaagcatgcaaatccagttattagtttatctcccaaagaaaaaaagaacattactttacaggtgcacacacatacacacatattattgatagtgtgtcaagtctctcttttattaaaaggtatattctacagttaaaaagattaagtactacatatacattgacccaataaaggactacaaattgttatcaaatggcatcatcaatcgcgtcagatgacaataaattaaattatatataaatagagagagaatcataatttttaaggttgaggaaattgcatgcatatgaaaactaattatatgcctagaattactaaaggaatgagtactacataactacgtagctacatattaaccacaagtggtctatgaactatatgataattttattaaaaactataaaatcactactggtacgtactataacaataagtcatatcattctatgtagtagtactagtactactaattaaaaaagtgccttaagatctgaatttacatgatctaatggataaaaagagtgacacagaggcttttttttaattaatgtatacatcggtaacgttctagaactgagctccgcataatcagatcacccatgtgttatatatataaatagacctctttaccatgccattcaataaactaattaaacaggtttagttattacttaataaaataagtcttcaagaagaaaaaaaatgagcaaaagagagagagaatgttttcttgctagtggggtatgcttgtgaattattattaattttttttaatataaaagagaataaagtttgaggcacaaggaattataggctagatacaaagaagtaaactaaagtgggaaggagaggagtatttccagagagataaaagccgtttttgggaacttgaaccagttgaaaaaaaaaaagaaaaaaaccactctgatcaaccaactagcttggccaccaaatgaaattcataaaagcttggtacatatatacttttttctacttctaaagctcatttcagcccatttattctctctctttctctttctctcttttagcccatactctactactacacttcctcctttgcatgcctaacgatctttcctctgccttttctcttcccattatcttctagtctttttccacttataaacagtactcctacaaaatgagggtaagcactattttttactctgcaaagtttcatttttattaaacccaattaatagtgtggtggtcttgttttgttttaatgcagctgtttggctggatgcaaaataagcttaatggaaaacaaacaaccaagaatacaaatacagttccagcaactagtaagtactctagtttttcccactttctatcttagctgaacatatatttttcacttgtttatttggatctgaattttatgtttatatgtatataaatcatgtgtaagtgtatgtatagattatatattaattaagttagtcaatatatttgcatatatatactctgtttttgttacgatgcatatatagatgttaaagcatgcatattgaaggtggtggaaatatggtcaaaagtattggccaatcacaataccacctttagaaaagggtctttcagtttctatataaaaaataaaataaaatacataatttatttttatcaaacgtgtctataaaatgttgttttgatttagagcaaaataaataaataaataaataaaaataatacggttttgaccaagtttagatctgataattcataagtcaccaacaacttgattttggatatcaaaagggtcaagtatttggatctgataattagaaaagcctgtaaaattaaattaaaaatagaaaaatgaagataataatattatattataattacatataaacctccattattagcagatccctagggagagggagtactaaatagatttttaacaattaagtactgacatgagaaggtacatatttgaatattaattaatcataacaaagaacttgatgaaataatgcatatatataagaaactagaaactgaccacaatctagcttgattaatctattatatttatttttaataagcactagttgaataactttgtaaataaaatattatataccttgaatgcaatattgtctaatttttcacgagtaacatatatataattaatatttgaaatttttgtctactttattgtgttaatttgtctagattatgcaaagcaagagcctcgagaagagtttagtgattggccacaaggattgctatcaattggaacgtttggtaacgatgatatcaaagaaatttcagctgagagccaacaaaataataacgataatgataatattgttaaggaaaatcaatgttcagctgaggaaatatttgatattactcctgaagaggttggaaaattacaaaaagagttaacaaagttgttatctcggaagccaaacatggaaaaggaaattgctgatcttcctttggatagattcttaaactgcccatcaagcttggaagttgataggagaattagcaatgccctttgtacaagtgttgtgtcatcatcatcagataatgattataataaagatgaagatattgacaaaaccattagtgtcattcttggtaaatgcagagaggcaatttctgctggcaaaaataagaaggataatattggaaagaagtctatttcttttcttctaaagaagatgtttgtttgtgggagtggctttggaccaactcctagtttgagagattcactgcaagagtccaaaatggagaaggtatatacatacatacatcatcaccattttctcactttaattaatcaactcactatttatgcggcccattattatgcattgggtcccaacgagccaggccttttgcattggcccattcatcatgaacaaaaccaatatccacttttagtttttatctcatataatatgataaatatattaattaatggtaaatatttgtatatacagcttttgaggacaatgcttcacaagaagatggcccctcaaaatcctaacagggcatcctcagcaaagaaatacttgggagacaaaccgattactccaaagaagagaactaataatgataatgatcaagatcaagatcaacataatgagaagagacgggagagaactgatgatggaggcaaatgggttaagacagattctgaatgtaagtatatatactagttaattattatttgaattaaatatcagtactcaatactaatggcctcttttgattttcattacagatattgttctagagatttgagtctgctcccctcacttgatcgatagcagctagcattcttatttcaaggtataacaaattacttatttacattttcaataagcctccactatacactatacaatatatatgcatatggaaccatttccaataaaaaaaataatacatatatcaataataataatctaattattcttttcttattttatgcaggttattcttaagtctgtattacatatgccttgtatttagtcagaggacttggaattaattgatctgaaatatcacagccgtacgttttgaaatgattaaatatcacaaaaataaattaatatataaaaaataccatggccaataattaaaatcatcaatgttggtctgttcctattaattgaagaagaagacgatgatgagatcagtacaaaatcggctgaaacagcatataattatatctagctctgtgtttttggtgacagaattgagtcccgttttttcatggtataaatgtaactgtggatttcaatcccagttgcaattaatcatgttatatatattatataaattatgaaaaactaatattgttaaaagggtttctgtacgtatagtataccattctggtcgagctatacgtttttccagctacaattttcgatctctgtttatgtaatttactgtgtatttttttttagctgaaatgcttctatctgtatgatattttgaggttatcaataacagtattagattgacctttttatatattccttttgtcttgatatttcactttcaagaatatgttcatgaatctgatcaatcaatcacaataacaaataaagcactatatatccaatccaactttaattaaatctctctctgtctctatatatattcaaaagttgatattcatgaccgtacatatatgtagttatactaaatgtgtatataaaatctatgataaagcacatataaattaacttatttaagtggaggtatttatattgtaaaatactgatatgatcactttgtccaagttgaattcaccttataccgaccagatttggtacatcgttaaaatcacctactttttattttgaatatatggatcatgatcactttaaatattttgtgagtgaggagacaccttggaaatttaactatgttattgcccctccatttttggttatctttatatattttacgaaagtgaattttatggagatgtgctaaatgtttcctcttctattacttcccacttactatttcacttttgtaacgtgttgtagttaagtttaaattgcttaacttttcttttttattttttggcaggaatgatgaagaaaggagaatgtgaagagtcacaatcactttattacttgcttcatatgataattaataataagggataatttaagattcatttgtatgattatacaaaattatgattttcaatattttaaaattataaaataatacaatgaatatgaggatactgccccaaaaaaaaatacatagggtcaaattttaaaatagagcattgatgtaaggcattgcgtaacatcatttaaacttagtgcattacgattagttaacgatattttatatgagattcgatacttgattgtaccaagaacgatgtagcatgttaaaagatgttaagcaccttttagcaattctccttaaaatacaatgtgtgtttagatgtcaagtattaatgacatatgaattctcatttttatatttggcaaatgagctattaattaaatagtttaataacattaattatctacaaataataatatattataattatacataattttcatagaaggccatgaaaattgaagaatgtaatgaaaactcctacattatcttcaattagatga

SEQ ID NO: 30187 - DNA, 1080 bp, Cannabis sativa
gtctcacatgccacattgaggatgcatgtacttgtgtatcgtgtaaaacgaacaaatggccaggatcaggggtaattcaaatgaggagggccctggagtgacacgcgtccaaagcaccgttagtatagtcagtacaatctgacatcagaaagaacaacatggaaaatgtcacctaccaatccaacggtgggggttgatcctcatgaagatccaccaacgacaatcctggcaagggatcggcctacaaatacccccggagatacacaaggcagtggatcagaccccgacccgaaacctcgacttcttctcctttaatccttttgtctctccatagaagtcgaactctttataaacacattaatgtaattctattattaactccagaatattcctactaagctttctctttctcaagaggaacaaagtggatcggagaaaagtccatcctttctgtatttgcatcaacattcaccggccagcgagcttaataaaatagactcgtggactaaggataattaacgcctgaaccacatagaaatatgttttctatattccttccatttgcatttttattactttcttaagctcgataattattcggtagccaaaaaactcagtaaacacttttgcgattaaactttaccataggaatataaggagttttcacatgaattgggtttataagtcttaaccatattataaactacttaattcaacttattaattgaataagaagatttgggtaattgcattaggaagtacaataaaattggagatcgtaataatccttatctttattattgttattttatattattttcttgctttatttactttctatagaactatagaattaattgattggtaattgataatgaatcctcgtgagaacgatactctatttattattatattacttgatttgattgcgtatacttgtgtattaaatttaccgaacaaataataatatgttcgagatttattagaatttatataataaatatataatcatgaaagtaacatattaactacgcaacataaaataatttttgatcttttattaattagtaaatcttatta

SEQ ID NO: 30188 - DNA, 1603 bp, Cannabis sativa
ctctctgttattcttatcgtaataacacacttattagctaaaagagtagtcatatatattattaattaatttaattaagaaaaaataggtgttctgcttagctttattgacaagctacctagaatgattattattattaatgataacaataatgataattaagtgggtgtgttagagaagagagtcgttggttggttaaacggtgcatgtaacatcctaacatttaggcacgttatgatttttcaataacctaatcccgttaaaccggaattactagaaataagagtagaatttaaactttaaattatttacggaatgaaaatacataacttgtaactatttgaactttacaaaacattccaaaaagatttttcacgtttcaggatcccataaaaattttcacaaaatattacaagtcatttttacataccaatctaagcgacaaaactgagaatataaaatacatcaactggtagacccaaccctcgtggtctagtatggtctgaacatgtacaatccaccgccaagtcctcgaactcatggctgatcacaaactgatttaccctttcctgcatagtagagcacctgtgagccaagcccagcaagacaataataaataacaatatgccatatattcacaattcaaataaatactaataccaccgcatcgactgtctatttagcatagacctacgtgttgctcttacacgtctatttataataaggccttagattggtttatctcggttttgatcaccgagtctaacctaattatgccttacctgcataattctttgtttcaacatatatagcatgacattgcattcaaaataatttaatcactaggatgataactatagaccatataccgctcactttagggtaataaccctaatcccggtttctcacttaatcacaagcataataccaaatatgagcgccactgtgcttaactctacgtgctaactactgtcttacatggtatcccaagtatgtggagattctaaaccttcaggtgttcctgagcaagcgccggtaattctagtcacaattcccgggatttcacaaatagggttaatctcaaaatttaatttcacataatttacatttcaattacagataggcatataaagctcaaaacgagctttccaacgatataaagaacatcccaaatggagtcccgagtaaaaaattatggcaaaaataaaaataaaaaaatttccggggaaaatagggcctcgccgcggtgagcccaaccgtggccgcggcgaggggccttcttccacttcgaattttaagtcaaaaatcattccaaactcattcaaagcatgtacaaactcaatttcaatccaacaacaattcatgtcaactttggaactcaagagagtgcctcaacaaactcaaaataacaactaaactcaaataactaaacataaaatttaatccataccattacccataaatcaagcataaacttcaaggcctcaatctaacaaaagaaccaagaaatttcaagcttcaaaacccgaaatcaaatcccaaatctcagcctaaaaatcacccaacataacctataagcactatatgcattccctatagctca

SEQ ID NO: 30189 - DNA, 2215 bp, Cannabis sativa
ataatataatttttttaaaattctttacaatttttatatagatttatcttttttaatattttgtgtaaaaaaaattacacatgaaaataaattttaaattattcatttttaatatctttactagtataataataataattcaatagtggaagagagatggtcttctattgtctctctagtgtgtgtgtatcctgttcatttcgtgtatccatagtgtgtgtgtatcctgttcacttcgtgtctccttagatccctggttcatctactctcttcctttctctttgtgtcgttctgttatgtcttttatgtgttaactgccttgtgtagtgcctttttctttgggtttgtgttgtttaccctgtatttgagtgtgtttttctctggtttagtgccttgttatcctgctctacctgtttgtattattttatccattctcggtttggtggtttgtgtggttggtaagattcgggttggtgagtttgtcttgagtgtcaaaagctttttgttggtctcctttattagatatttatggcgtcaatcattactccatcctcccctcataaaggcaaatgcttttcttgccttgaaacctctgtcaacctaactccctctgatagttctcttaaggcaatggcctcatgctgtttgtttgggaaagttgttgctcccatggtggtggaggaagtaaatgtaactgattttgtggtcaaaaactggaaaataccagtgtctgttgtggcgattgtggatgaagagaagacatccaatgtctttaagtttggatttgagtcctctgatcataggaattgggccctcgataatggaccatggtgtgtccgtgggtacaccctacttcttcaagcctggactccgtccagtaatggtccgattgacttcaagttcctgcgtgtttggttacaaattcacaatctttcccatgaatatttttccaaggctaatggtagcctgctaggggggttggctggcaaggtggtccaagtcgaattggaggaagacaggccggcgtcttggaacaagtttctcaaggttcaggtcgatgttgaggtcgataaacccctgttttcgggttgtttctttggcgtagcttttggggtgaagaaatgggtgcagatgaaatatgaaaagattggcattttttgttatttctgtggtcgtttggggcaccaacgcagaggctgtactctctcgtcgccggtgacggttgcgaacgttgacgggatcccttttccaatgtttggcccttggctatccattcaatcctcctatctcactgtgttctctggcccttcatctggtatctctcgagactcaatctcctcggctggcagaaacaatggtgggactgtgttattgttgccagcgtcttcaggcgaccttgaatttggagtgcagagatcgcctcctatctcttctcgacgtccgcgcggggttgtgatagggactgctcgaacttcggctaacctcgggaagacccagcacgcggtgtggcatccgaagcaacgtccttttggcgtggagaagaaagcttccatttctggctatggaggtgtgtctgttcaaatgggtaagggaaagaactctgaagctttacccattttatcttcatctattttaaattcaaagaatacggctgttgtgactcccaatgcttctcttgggaatttgttgaccgttaatgctactgggccgtgtgctattgggccgcataaagaagtgggtgagctggatgtgattaatgggtctttgggaaatgggtcgacttttaataatgtgagtaatgggcttcctttaattgagtgtaatggttttttgggtgggccgaaagttgacaatttatcaaagggtggtttggtgggcccgtgtgctgtgggaagttcatcaattccttttgggccgacacctctttctaatgaccaaggaaaacaggtggaaattaattcttatcttcctactattcctcacggggcccaggagcatttaaatgaggatcaagccttaactcaattttttaatgctcaagaaggcctattgcatgaccttaaacattttgggaagcttgacttgtacgagattcggaacataggaggggacattggggtcccggcttcctcggaagtcaatgagcgtacaaccccgttcaagaaacggaaatttgaagcgtccgcctctttatgttctcggccccataaagttc

SEQ ID NO: 30190 - DNA, 1703 bp, Cannabis sativa
attagctgtactgactcgtactacaggatagccgagcagtatgggaccatgctggatagggcaagccacttagacgcgagctgggatttagaaccaattaatccctatgatatattcggaatcacggggtgtagggattttagtggatattatagtccttcctcttcgtcttcttatggtaaattccttagacaggaaattatgccccaatttcctcttttacgtattttttgataaatgcaaacactttatcttgtctcgcagaaatgaatctcatgggtctctttcacaaaaagggaaagaaaaagttgaccatctcggaggctccatcagacgtcgacgtggagcccccaaaaaggcctaagaagactactgctaacaagaagcgagcctcccaaaccgctaatctcaaggtccctgaaattgagacttgggatccaacccctccttcagccccgcacgtaccgataagcctattcccaaaacgactcaagcttctaactcctcgagccaagccctcaaaactctgcctgtcgaggctagaaaaactagcccagagtacactgcagagtttggtgcagcatgctggcgtcatttcaaggctctcctcccccatgaatggtatttaatcaataatggggatcttggggagatgcttacaaaacgtgtatctcatagcctctcggtaaatttccttatccttatctactcacttctttttttttaacatccttcaaaatactcatgcattttcgtttgttgatttccagacatctttcatttcctttgttgcccaacagcgaggcatggaaaaaataaagtatctagagagagagatccagaacctgatgggccagcgcgaggttgtgaccaagcaataaaatgatgccaaattggagaacactcgtctaaccaaagaagccaagaaggtgaagaggaccctcgaggccgagcttgaagctacttagaaggaggcaaaagataaggttgatgcatgccataaactccaaggggaacttgatgcagccaaggtaacactcaatgagaaagaagctgaaaccattgaacgatgcaacgttgttggcctacgttccatctaccaagcttggatggaaaatccgaggatggatacgagtttcttaggaaagtctaaggaggaaatcattgccttctgcgagaaaactaagaaggaagaagaagatgccgaggcatcagaagaagaagaactgtccaagtctcctactatgtaggcttggtttttatttatttttattttatctaggcaaatggccttaaggccgagacaatgatttgccccttttggcacttttgtaaagacaaatttgtaaggttggatggccaactatgcttctattttatctttattgaatgcttcatacttttatatttgaacttaatatatctatttgtttgtgttttcattcacaacttaaacaattatattttgatcaaatttaaaatactttagggatttccattgctcatattttcctttgatattatttaagtagttagtgatttactatgtgcgcgggcagttattatctgctgtgcttttgatttgtgagcagttatcaattttgtttcgcataaacaattataatctgttttaagtaaacatcaatagatttttatgttgggattttatgccctaaataaaacccattacaatctaatctgat

SEQ ID NO: 30191 - DNA, 2864 bp, Cannabis sativa
  modified_base (354)..(356): a, c, t, g, unknown or other
agaatggggtcaatgtctgaatttctggatcgagcagatgggttcattaagctcgaagaagctatttggcatgtggacacggtcggacaaaagaaaagccagcaacatgtcacctcggcatgaacatccaatcagaatccacaataccctagcaactcgaattcaaatgtgaagaggtctaacaatggcaacatgcagggtaatagaagaagggaaaattcattagtattgctgaacaacacctcatggaaaatgcctcaaagtttactgccttctcagtcctagcagacaacctagagacaatctatgcaataacccagcctatggtgccatacaagaaaccatctcccatgnnnaaggatgtaagtaagagagatacatccaagttcttccattttcatgtggactacggccacgacacaaacgaatgtaataatccgaagcgggaaattgagtttttgattagaaagaataacccgcacttacagaagtaattcaaggctgaccataagcaaagggccacccaagtagacaataatcaaaaccagttgatgcctccaccggtggatgggcatttacaggtcattattgggggtccagatcctacttgagactcaggcaaagctcgagaaaattatgcctgaccattacagtacgaacaaaatgaaatagtctcggccatggaagagagaaaaccaaaaataccatgagtaggcgagccagcaataacattcactgaagcagatgcccatttcctgcacaatgatcccctggtcgtggaagtgaaaattgcaaataagacaatggcacgaactatgatagacaatggagcttcctcaaaaatcctatttaaaatgacttatgagaagatgggactccaacttaaaaatttgatcccttgcacccaactcgtatacgatttctctagcaaaagcgtcgcacctctaggataaattttcctacccctcactgttggacaagctccgaggagcataactgtgatggcacaattcttgataattgatgtcctttaaacttttaatgtaatagtaggccgactagccctatatgacttaaaagttgttacatcagttttccacctatgcgtcaagttcccaacaaagactggggtgggatgtcttagaggaactcaaggaattgcatgggaatgctacaacctcgctctaaccaagttcaagaaggaaaatacctctggctagagtttaggaagggaaagagcattgcccaatagaaagtcgcccaaggcgaggacgaagacatgcatccccaacttggggaaacaaacataaatgcaaggccagtggaagaataggaataagtggaaatagaccaagatatcccaaccaggaaactcaaaatcagtaagggcttgttgctcgaaataaaataagctttaataaaaattttgagagaaaaccctgatatttttacctggtcacatgaggatatggtcggcattgatcccactgtgatgtctcatagcctaaacattgacccaaactttcatctcgttggataaaagagaagactactagacaaagaacgagcgcaagcactgaaagaagaggttgagagactgggcaagatcaagttcaacattgaagctttctacccgacttgggtggctaaccccgtactagtacctaagccgaacaaaaaattgcaagtatgaaccgattttaccgacctcaactaggcgtgtatcaaggattattttccgtttctaagaattgattagctagtggatgcaacagccagacttgaaatcctgagcttcatggaagcctatttggggtataatcaaatctaaatgcatccaccagacaaagaacatacaagtttccaaatagatatgggtctgtactgttacaaggtaatgtcgtttagtcttaaaaatgctagagcttcctactagagacttgtaaacaaaatgtttaaagaccagaccggatgaaatatggaggtatatgttgatgatatgctcgtcaaatccaggaaggttgaatgcttcaaaatcctcagaaaatacatcatgaaactcaatcccttaaagtgttcctctgtggtcaggtcgggtaagtttcttgattttattgtcattgctcggggaatagaggctaatccaaagaaaatacaagccctcctggatattaaatcgccaacaaagacaaaggaactccaaaggttgactggtcgaatagccccactcagcagattcgttttaaaatcaacaaacaagtgtgttcctttcttcaacatcctttggggtaataaaaagtttgaatggacagaggaatgtgagaaggccttccaagaattaaaaaagaaaacttgcgaaggctcccgtacactcaaaacctctgaaaggagaagaattaggaatatatttggctatcaccaaatatgctgtaagcaccaagctgataagggaagaaaacaacgtccaacatccactctactatatcaacgaaagactcgttgaagctgaaggtcgatatcctatgaaagaaaagctcacttactgcctaatcttacaaacaaaagagttaaggccctatttccaagctcaccctattcgggtgtacacccaccaaccattgcacccaagtattgtaaaagctagatgcctttgggcgattacttaaatgtgcaatagagttgggttagtacgaaataatctttaaacataatttgtagttgagatcacaagcaaagaagaaagtaacataggggacaactcggagccagtacaagagttcccactagaaaaaaatgaagaccgacctacttggaaatttcacgtggacggattggctacaaaccggcaatctggtgtaggaatt

SEQ ID NO: 30192 - DNA, 2306 bp, Cannabis sativa
  modified_base (75)..(79): a, c, t, g, unknown or other
  modified_base (1713)..(1720): a, c, t, g, unknown or other
  modified_base (2011)..(2013): a, c, t, g, unknown or other
ttgggagtggattgatcggctgctgaactagtgttcccaatctcttgcacgcctggtgtgatcccagccagaggnnnnntcactccatggcccacagtaggtgattatgtattgacctgctcggggtctatccctggtggtcctctcatgtttccaggggtctgcacgttgggatctgtcaccatcgagtcaccctgatcatgaaggcctctacgagtttgtacaacctcatgtatgcctgtcaaaacttaagacaaaaaacttgggtttttgctctcaatgaaagtaccaaaatattgacctcgcttttagccaacgacagtgggtcaattaataagcgattaataatatacttaaaagagaacaaaaacaataaagtaaaaagaacaccagattttaaagaggttcgaccccgtgagtgtagtaatagcctactccccttgtattgtattaacttaagagaaagaacaaagtgtttttcctctttgaaagctctcacaatcaatctttcagtaattctcttagatcgttattttctttctagaatctctctctgaagcaattctttcaatccccttcatagtgaggctaggccactatttataggggcttaatgcatgagggatgatttccttttttcttacaatgcataaaataggaaattacaatgattacataattatgatacacgaaataggaaactagaataggttgccatatttctctgattcaatcacatgattgtagggattgtcttcatgtttgggcatcacaagatcattctgaagtaactaacccttgtaagtagctcagcataataaacttctatctggttggatgttctatcttccaccctgctcgatgcacatgctgctagggacgtttacctccgcccaggtattagaaatgtgagaaacgtgtcgcttggtcctcttgccacgttaatgtgcaaaaaactagataacaatatgtatatttgtaattctataatttaatatcctaaacatgaatttcctaaaagaatgaaataaacacatatgaagttgtagaaaatcttaaattgatagcagcaagatataatggctcattctgttcagatctctacccattgttcctttctgtcgtagagtattaacaaggtctgaacctgaatcttcttaggtgatggaattcttcacaatcttccacactatgattgagtattgacttgaattatgtgggaaagtactcttcactttagggttcaaaaattttgaagaagaaagagagaggaattcaaaatccaagagaggctctttatttttctcagttgtctgacaaagtagtctgatgaaggttatgttgtcaggttacaaaattaagagcctatcttatctatttataggattccttctaggattagtatttaaattatatggaattaaaaaaataataaaaaatgacttaataatccatttaaggggtcggccatataagtggggcctacaggtttcaattttgtcatttatttaagaacttatcttttctttcacaaatgccatattttaattttaatcctataaatgtcaaatctatttatttaataattataattaattatcaaacaaaattgtcatttaacttttttattaattaaaccttacaaggtttcctaataaacaaataaactctaaaaccttctttttttctcaattaagctcttgcttagtgaannnnnnnnaataagacatagtctaatttaaaattctaattgattaattaaaataaattaaccgagtctacaagtcaatattatcttaactagtacggggaccatggacctatataatcaagcttacaataagtagatctaaaatttaccaagtaaatttcttaacttattaattcctcctaactccactatagattcaaaattatgttgttgattgcatagaacgctctatatgttccaaatatagatacactattaattatccattgttataattcaaataatcaaagatcctctatnnntgatttacatcgagtagggataaagttattgttttacccctcaatgtattttatccttaaaacttttagcttctgataaatgatattttagtaaactaatattattactgaaattagagctgtaccttttatttttgttaaatcaagctcaaaggaaatcatcatgtcacttctatgtcattacaaaagttatacattccgtatctatgattagcattcccactcaattgtactatcatgttcccaagatgtaagtattgggtcgatccatgtaatgaccgctttagcaattt

SEQ ID NO: 30193 - DNA, 1337 bp, Cannabis sativa
atgatttataattagtcacaattttttaacttttagtcacaagttttgttgtgactaaaagtaaaattttttgttgtgacttaagcagggctgaattggaaagtatgtaatagaaaaaggaaaaattacggcataagttccttaacagatcaatttgatgcagataagtttctaacttcaaaaattgacggtaatagtccataaggtcaccatatttataagtctgttttcttttttctaacggatctactatctcacaatgtcacgtgttgacaaataattggttacaatcttaaattttaaatttaaaataatttaaaatttttaaaaaataactaaattatttattttcttttctttttcttcttcttcctctctgcgctgcccaatactttagcatgaaattgatggtcaaagttaaaatcttgaaactgggtgatgctatgaaaaaaaaaaagaaaaaaatttcacctcttttagagccattaatatatgaagaaaaaaaaactccaatagtaaaatccagaaaagcattttagtttgtgttttatattcaaaaatgcagttaaaaaaagaaagaaacttccttttttttttttttttttgccttcattagtctcaggtttaagggaaacaaatctctttcaaaaatattcttcttattcgtccactatttttttttttttttttgatgaaccaacagtatttttattactccacaaacaattgatacatcctaatagcaccttcaatgggaaggcctattataatctatacagcttagttgacaaatttacaaaactataaagtattaaatcattctatatcttcatcctttacatgatttggcatcaccatagattttctatttttgatgagccatttcactcgctgtactaagtcaattggagttacaatattcgaattccattacttgggcaagttagattacttcaaaattgagtaggtctcaagagatcggaattcaaatattgatgctttagcaaaattagccatgtaacttaaaaatgatagatccaatatagtgccaatcgagatattgcaacacctaagcattttttagaaaaatgataaggaggtcaaaataatagatacgcaaccaatttggatgactctgatagtggaatatttcacaactggcaacttccttctgacaagaatgaggcttaaaaattaatacacaagatcacaagatacacactcgtagagggaaggctttaccgaagaggttattcaatgccactattacaatgtgtaacaccaacagaatctaaaaatataatcaagaaaatacatgaaggattttgtaaagacca

SEQ ID NO: 30194 - DNA, 1976 bp, Cannabis sativa
attacaaaattgattctatggactccggtacgcttccgctattccttaattttattgtttgattctcttgaattaattagggctaaattaaattttacagtattcctaacaaaaataaccacatttttctacatgttttaaaaatactgaattaaaatattctaaaactctaaactattatttttttcataattcaaacatcacaatgctatattttatattatgctcctcaatcaataaactaaaaaaatatataaaaaaaattacaaataaatattgagcaacaccgcgcaaagcgcggcttagttctctagtttatgtataaccttaaacttaaggtgactttcctgaaagaaattaaatgagaagaaaagttctataagagtatatttaataaagagttataaatatagtgtattgttatttttttttttttaatattttgttaaataatataaaatgtgtaaattttgaaaaaaaaaaaaaatagtaatagctaaattttagccttaatagatatggttttatggtatatttttagtcaaatttaattcaaaataatatatttttggcaaaaatccaaaaatgatctttttaaaatattaacacttgatttgaaataacattaaaacaaacaataatttagtcataaattatgggagtaacatatgacttgatactgatcgtacaagtaacaacagatcacaatggaatcattttcttaagttgacttgagttcagtcattcatatgtttattcaactaaaacttgtaaagactatttctttaattagtttaataatatttaaactcttttttcgcgccataattttccagatctgatctagaaagaagaaaggtttaatttttaattatgaataaatcaatataagcttctgggcatttcagtttccattttatcttcaatccaaactaaccttttttcctttttaaaaggttttgaattttgatggaagtaagggaaaaaagcttaaaaccagacaacaatggagaatcaattgtagttgatattccaagtgtagaacctaaaggggcaaaagggtcttcttcaaaagtctcagaattaccaaagaaagcatcttttatgaattcaccggagattccagggttccggccacctccggcgactcctgcttcgccgaagataaaaccagaatcaattctagaagctgaaggggcaaaagggtctttttcaaaagtctcagaattaccaaagaaagcatcttttatggattggccggagatttcagggttccggccaagccccaataaatctccaacgaccccttcttcgccggagataaaaccagataacaatggagaatcatttgtaatcaatgtagaacaagctccacaagagactcttactcgcaggaaaacccttaaagtggttgaagaagagcacgcttcaccaagccttgatgactttgaggagatttataaaaaagttgagttgaagaaagtgaagagcaagaaattgaagactaaagttttggttgagtgggttttgtttgtgatcttagttagttgtttggtttgtagtttgactattaagaaattagagaaaacaatcgtttggggtttggagttatggagatggtttgttctaattatggtcattttttgtggtttgttagtgactaattggtttatgcatgtaatagttttcttcattgaggcaaattttttgcttagaaagaaagttctttactttgtttatgggctaaagaagagtgttcgagtctttatttggttgtgttttgttcttctaacttggctatttgtctttaaccatagtggtgtttcaaggtctaaaacagctaccaaaattctagagtacataactttgactctcgcaacttttctcattggggcatttttgtggttgttaaagactttagggttaaaaatcttggcttcaagttttcatgtcaacacattctttgataggattca

SEQ ID NO: 30195 - DNA, 2026 bp, Cannabis sativa
aattaacatatattaattattagactgttagttttgtattttgtttttgtttgtatacttcaactaattatctccaaattagtgttacatcaataaattgtgaagagatattaacaacaatttttatagttcaataaaaaattttgcagcaaaaaaaatcataaagtaaaataatacaaaaaaaaataactatttttatatgcatattgagaaaaagaaaagatagatgatattatataattaaataaatgatattattttatatgagagtgagagaataaaaataataataaaataagaacataattagattggattggatttttagatggagaatgattgagtgtggtattcaatttcatcaacctttagtcggagtccagtcactaatattggtaaaatttctatttctatttctactttattatttttttaagtacaaatacatataaattggaaagtttgggtaaaagtttattttgatatagataaatttcaatttttaaaaatagcgataataatggttaaatttgaaattgtaaatatgtttagttgtcattttaacagatccgttagttgttcaaaaaatattatatattggtattaaattgtaacataagtttctaaaaaatttattttgatacaaataagttcttaatctcgaaaaattataataatagcttcgaactcaaaattctcgttcctctataaatacccaattaattgttctatttgttactttaaaaaacagaactcattaggtgtctatagactaacgagaattttgacctttaaaacttttactataattttttaaaattaggaccttttctgcatcaaagtaaattttttgaagacttatgacacaatttaatattatcaacacctgacatttttagagccgttaacgaatttgttaaaataaagagaatttcgaacttgtagactgttactgttatttttcgaagttagcgacttatttatataagttaagtttttgagaacttttgccgtaatttttaatttttttattattttatttgaaaaaaaaattattttattatatatttatttttcaaaaatttcaattttattaacaaaaaaacacaagaaaaaacacacacacacactctctctatctctcacttctttctctctcttccgtttccgatccaagaaagaaatctcaaacactcacaacaacagctgtagacacctaaatcaggcgccgacaaattgtttcagttttcagtttttttgtttttgttttctcaatctaaatctgtgtttgtctctgttttttgtgatcccgagtttgttgtgactcggccgagttcgaactcagttcagcattgattctatatcttatcattgaagtttcagtcccaaacaataatggttgttgtggcggatgtgattttatgataagactgtactactgactcgttcggttggtgggtggtgtggtggaggaagaggagaaaaggtgtggtgtgggtttagggtttgttcgattctcttcttcttcttcggttttgtttgggaatggagactactcagagttcgagcagttggagagatgcatacaagggtatgtcttctgataatatcaagggtttggttcttgctctttcttcaagtttcttcattggtgctagcttcattgttaagaaaaagggtttgaagaaagctggggcttccggtgtcagagcgggtaatgctatgatttttgttctataaatttgttcatatcctgatttgcaatgtttgagatttagatgaacccaagttaattggggttttgattttatatttaattttaagtatgatttgggaaatgagttgaactgtcaaatgtgctgtaagtagtggatttgtgaagtgaggaattgggttattttagtatcagttgaattttactataattttgtagtttttgtatagatggtgatagtgagaaatgagatttgggaattttgtgatagtgaagaaggggatagttgaaaatgggatttgggaatttgtg

SEQ ID NO: 30196 - DNA, 1446 bp, Cannabis sativa
tctctctctctctctctttttcgtcgaataaccacagcaaggcctgacgctgaccgttgacagtcttccaagatcgaaccgaaccccaaaaaaacaaaaaacctaaacctctcttctctccccgatctctctttctccatatcgtctctctctccctctctctctctcgtgacctagaccaaacgatcgtaggtccgttgggttgtggtggatgtatcttgtgacgatgagtggacagtgctcggggtagtgcagcccagtggtggtgtacggttgaatgtggtttgggtcatcatccatggcagatctgtttagtggttgatgagggtggatgtggtgttgggtattcgagattggaagaaaggagatggaattagggttagtgttaaaaaaaagaaaaataaaataaatatattttttataatttttaaattattttttataatattttaataattaaaattacgtggactactaaaaatttgtcacgtgtacaagtgtgtacacgttacaagtgtgtacacgtgggcagtccacagtggcacttaactgtgatttttagacggtgggatacatagcaaaacggaatgggagctcagtaggttttgtcctaaaaaattgaatttagtgttacaaaacgtaaaattcaggtggtttagctgctaatatccctctatttattaaagtaaaaactattaacgctctctttgtgtatttataattttacaaaattcttccgtatcaaaaattattcatgtattcacttatgtttttggcactttgacaagttattatctcaatttttttataatgttttaaacaaatgaataatttagaaattgtttgacttcataatttaacaattatttttcagtcttaacagcttttaaaatctaataggcgtttggccaaattttttaaaaacaattttttgaaaactaagttttaaaaaactagaaaacaaaaaacattaaaatgttattttttatttttgcaaatattttttgtctaacatattatattttacattttttctcacatagtcagacctaaactcagactcggactccgaaactggacttcaaaactggaccccgacccatatccaatctcgaacctggacccaaacctaaactctgacctggacccagactccaaactcagacctcaaccacgaccccgaccccgacccgtacctagacacggaacttggccctaaccctaaccctagcccaaacccgaacacggacccccagacctgaacccaaaccctaaactcaaacctagccctgggtttgggttcgaggtccgaggttcgaggttagggttagggttcgggttcgggctggggtccaagattcaggtccaagtctgtgtcattcagtttgagataggatgggatcatgtcatggtatagtataggatattaaatttttttaataaaaa

SEQ ID NO: 30197 - DNA, 1775 bp, Cannabis sativa
cattgatcgctctctgtccgatacagacaggtctcttttggacgaaccattctctcctgaggaaactgagagagcatttttacaactccccttggacaaagcccctggactcgatggtttcaattgtcatttctataaagcaaactggcctcttccaaagaatgatgtaatcaacgctgctcttagctttcttaatgggaatggcgatattaaacctcttaacaccactctcattactcttattcccaaaattaaaaaccccaccgtaatctccgaatacagacctatttgcctttgcaacattgtctataaaatcatctccaaaaccattgctaataggctcaagctggttcttaacagcttgatatctcctactcaaagcgcttttcttctgggccggcttatatcggataatattattatagctcaggaagttgcgcattctataaagctcaagactcgggggaaaaccggttggatggcggttaagcttgatatggccaaagcttttgatagagtagaatgggccttcattattgccatgcttcgtaagttcaacttcccatctaggtttacccagctggtctttgcatgtatttccactgccacctttcaattcaatataaatggcaaagtggctggaaatgtcattcctaccagggggattcggcaaggagaccctctttctccctatctttttctgctttgcgccgaggggttttcctctcttcttcagcagcaggagaactgtcgttcccttattggctacaaagtagccagacgtgctcccgcaatttcccatcttttgtttgcgggtgatagcttccttttctgtaaggcctctattcattccttcaatatcatcaaagaggtccttgcagtgtatgagagggcttcggggcaaaaagttaatttccaaaaatcctctctttacttctctcccaatgttggtcttagggatcaaaccttaatttctgattttttgcaaatccatgttagatcatcttttgagaagtatttgggcctccctcaatatattggccgaacgaaaaaaataatttttttcactatcttcatgacaaagtttgggcccaccttcataattggaaaaataaagtcttctctaagggaggtaaggaaatccttctcaagtctgtcattcaggcaattcccacctatactatggcctgctttcgtctccctgtggccacttgccactctctggtgtccattatggctaatttctggtggggattcaaggacaacaattgccccaagattcattggcaaagttggaaaaaactttgtaggtctaaaagagaaggcgggcttgggttccgatctcttgttcacttcaaccaggcgttgcttgctaagcaagcctggcgcattttcacacaaccaaactccaccgtctctaaaattctggctgccaggtactacccatattcatccttccttaacaacaccctaggtcactctccctctttcgtctggcgtagcatttgctggggaaaagagttgctgcagaaagggcttatttccaaaattggtaacgggcagagcacttctactacctttgattactggataccaggcttccgtcagattacccctctttcttctctccctgaaaatgttgcatcttttatcactcctcacatgacttgggacgtaccttcgcttagtgattgttatcctccccatattgtggatgtcattctctctattcctctccccctcaggcctaccagggatgaattgatttgggaaca

SEQ ID NO: 30198 - DNA, 3644 bp, Cannabis sativa
tgttttgggttttcccgggctctattaaacaaatgatagtgagtaaggtggttgggtgcagagcaaaacacattgtatttatcaataaggattcaacaacgttgacacagtaattttagtacataaaattatcagtgcattacttttaatcaaataaaagggaaggaaacagattcatgaccaggttaaagagcgtggtgggtcggtcagtcctttaataatttggaacaaaagctactaggaagaattcagtctattgataacttgggatataccgaaaaatggtctttgagcttaaaagaagaaagagaaactaaaaagatggagttacaagagatattccttttaaaggaagggtacagaagtccaaatttctgttggctaaggaaggggaggagtctatcattccataaattatatctttactaagcgatatgcataaaaaaaaggtggttttgaaggtttcgacagggtaaattgggctcctttttcagatactttgcaagaatgattctcctgaggaagatgttggactgtgatgggattttcacatgagttgttcaaacataattagaaagaaggagcttgaaaaggatactgtgaacgctattgtggaattctatagcaatgacatgatcataaaattttctatcaataaaaccaatgcatgtctatttcacttagcaaagttagcaatgtttgtcctcataagcttgattaagagcatttacaaaattatttctaaagtcctttcggaaagattgaagttagtgtttgtagaaacaatcttaaagccccaaggagttttagagctatgtgtcagattatgggtgccactttactttagcatatgaaattgtagaagaatacaggatgcttggaaaaaaggggcagtgctgaaaataaacttttaaaaggtttatgataaggtagagtggtctgtgctagagaagaaagggcttagaatgaaaggggaacgggtttcttaatctcagttacatattcttatgattaatggaaaacccggaaagaggttcaaagggtttagaggattgagacaatatgatcccttaggaaaaccaggaaagaagttcacggggttcagtctggtgaccaatcatttaggaaggttagtggaagcaaaggatagaggtgtcttttgcactttggttattcggaaagaagagaaggttgcatcacatttgcaatttgcagatgacactttattttgtaggaaacatgacgttacaaacctatccaatctagccaagctacatgatattttttgcttggtgttaggagtgttgatcaatttgagaaaaagtgttttgttagggattaacttaaagggagtaattagacttgtatcacacagattaggaaatgaggacattatgttctaggtagttactacataacttcttggggctgatgtaggaggacgtagagaatcagtgagttatctagagatttggttatctacatcaatcttagagagattcaacctctcagatgcttggggattttctgatctttcagcaagatagataaaagtttagcaggttcattcattatattctacttactggttttataatgttgtgacatgacttttggaaaggctagagggatggaatggaagaaaggctttttgtcttaaggagggagctttactttgattcaattactttgatcagctttactaacatattcgtttctatttccaagtaccaaagcaagttgcaaaggagacggagacgagaatattcttatggaagggttgtgattgagaagaaggtgatcgtttggtaggttagaagaaagtagtccaactgagtttcaaggactgggaataggcaatattgtaaagcgtaacaaagctttaatcatttattggttatggaaattgtctgtggaaagggatacaccgtaaaacaaggttaatcaagaattatggcatactggaattacttaatcgagcgaatgtcttaaacttgactaaatcattatgaacaaattatgttcataccaacttccaatccaagaaaataacatgactaaccattgaggaatgaattcaagtatgcaccaaggtaaggatattccgaaaggctctcctacatgactattttacacatcagtgagacttgaaggatcttcttagcattttcaaagttttgacgtagccacaatggtagtgtatatacaagttatgagagcactaataagtttttatttctatagtctataccacttcgtttctatgcctttgaatgctatgatttcaaactatgatcctctgcacacgtctaagagaaaagtagtgactgaatagaaagcttactttagagactggactcctctctgaccgcacaacattttccacatgtccaatgccttaaattcaaaacaaatcagagttatatataaatatcaaatccgactcaaaaaggaaaataattcaccaaaacccagatgaaaaatctatcaagaactaaatttgaaaataattacaaattcccgatgatgaaaagaaaacaaagatccaaaagtggtaatgaattaccagaagaatcaagatcagtaacggtgtgtaagatccaggagtcaccaaagttgactagagtggaattgggtccaaaagtaatgggttcatgaccttctcttgtggcttcaatgtataaagcaagagggagtccaacttccattcccatgcccagcttcctattaatgactgaaactgcgaaacctgcctccgtccctagtgcaaaccgcctcgtcttgcccgagctattgcatttcacctccaaaaactatttcattgacttcagaattatactccgattcttattaattcaatcaattcgtaagagagatagatagtgaaagggaaagagatattacagaaggagaaggactgggagcttcatcttccgccatggcaaacagacacaagttctgttggttctaaggtcaaattctgaccatgactcggtacttctaccttcttacttgacgattgtgaaatattaagggtgtgtttgtgcaattacaggttaattaatatgcttggaattttaaaatgtaaggtgtatttggatatgaggtggtaattacatatgaatttttattatcttgttaggtaaaatagtaagtattttatgaaaaataatactttttagtgactaatgtttaatatagaaagtttttagtaattacacagtgtaattacatttaattcttatgagggccaggagaattagagtgtaattggaactcttcaattacttctaattatacagttacagtgtaattacatggtcagacaaacataccaaattgtgtaattatctccaattacacacaaatccaattacattgtgactttccaaacgtaaaagttttttttaattaaaaaaattacaactgttacaaaaaaaaaaaaaaatacaataaaatataagagaatttaaatttttaaaaaattgtagagtttgtttggtaatattttttaaattagttgtttattttttttaaaatgaagaattatttatttaaatgaaataattctattaagaaatactaaagtaaaaaagagtaagtacaaaagaatctcaaaaattaaataacggactagtttgaca

SEQ ID NO: 30199 - DNA, 1601 bp, Cannabis sativa
ttgtgagaagaatggagagtctttaaatgacaaggtgtgttttagtatactacttatagtagaaactatgccaggataacagtaatacaataatatttaaacttccttcttttttttcttcaactaattatttgcagatggatgagttagcatgctttgcgccaggaatgctggctttgggatcaaccggctatggtcctgaagaatctcaaaagatgctatcacttgctgaagaggtgcttaatcatactatgaatgagttgatttatttattttttacttgcatatttatgtctctgattccttgacatttgtattaaaatgttcatcaacttaggagagttaatgaaaatctaagttaaggttcgtaaaattgatcttgagaaagcatttgatcatgagtgttgagaattccttggttttcttatacaaaagatagattttgccaagaagtggatcaaagccttgagagatcattggttcattgaggcgtttgaagcgagtggttcctgtttatgtttctcttttcctttttaacttctgttgttaatcttttttggggggatggtttagtaatctgtaacggtcggttttagatcactcatttgcagtttttaatgatacttctatttcaaaagaaaattacataaattcttttgttctaaagatcatctgtgatgttggattaagtacaaaagaggctgttttactaagttttgtcaccaattcgggattttgtattcactcttgctctttgaattgtttaagcatattctattgaaagagaagcatttagatttttaggaaccggttgaactaactatatggcttagtcacttagaaaggacttgatctaaattctctaagctcagacttagaaaacgataagaaatcttgtgaagtggtcaggaggggtgctggtgatcatgtggcagctcaggatttggtttgaatgttgtaaaaaatccagcaaggacacttgactttttatatcgaaatggttgtggtcctttagtcgaacccaaccacttgagctagccttaagtagctagagtgaggcaagtccaggggggttttatcgtcaattttctaggatgttgggtggttgattctgttgtattagttaattataaagcttgtacttttctagcagttcctcttatggcagttttgaattactgtttttctttctttcttttttttggtcattcaacagcttgcttggacatgctataatttctaccagtcaacaccaacaaagttagccggtgaaaattatttctttcatgctgggcaggttagttatcccgtctatttatgtgttttatttctttctttctcttccattgttcgatttttatgtttggttataaaataaaattcaggacatgagcgtgggtacatcgtggaacatattgagaccggagactgttgaatcactcttttacttatggcgtataactggtaacaagacataccaggaatggggttggaacatattccaagcatttgaaaagaactcccgcgtagaatcaggatacgtcggactgaaagatgtatgtacctcttcactcccatcgctaatcgctcaaaatccttat

SEQ ID NO: 30200 - DNA, 1334 bp, Cannabis sativa
  modified_base (1305)..(1309): a, c, t, g, unknown or other
gagtctttaacatcgaagatcgatcttagagaaaagggtctttccccttaattgatctacatatcatctatccttggcaaagaatacttattctttaccgttaatttatttaacttccagtggtcagtacacactcataaagtttcatccttcttctttacgaaattggcgtccacccaagatgaagtacttggtctagcaatttcaagccaagatcctctgtaactaaaccttcaaccctttcaactctacagttagaatccaatatgaaactttagatacaagttttgctcccagtatcaattcaattaaaaatcaatttcccgcttcggcggtaaccctagtagctttctcaaaaggcatctaaaaactcttgaaccatcaggatatgttttggtccaactttcttgtgtaacatataccatattaggtaacaaactgacacatcctccccccacaacaaatctctttccttgagcgccgagattaatggagttcaggatccttgaaccttgcccacaaacttgaatgggtcttcacccttttgtttaggagtaaccatctttctttcacaatcggtggttgtattataccttgcaaaccagttcaaccctagtataacatcagaatcttctaactttagctcaactgaaaggtaccaaaactactcagtaacacatcactaaatttatacaaatttctaatcacccttttgaaaatataggaatacgttgtaccagaatcaattaataatatcaacaaaataccatcaatagaagtttgacttatcacggtaaaaagactagcattagcctctgcctaggtcaaagaaaacatttggacaaaaactaaagtgccatcatccttctattccggtcactatatatgtggataatttcttttcggatgacttaccaccccacactagaagtaggctttagcttgtcattggccctgatggcgtcttttgcacctcgacattctagataagtccaccaatttttgtttcctccacgtcaaaatccttaattactttgaaatctcttgtttactccagtagctgatggatccctagaccttttcttacagtcactatggtcaacacccttactgggaccaacaccagacgtttgcttcaatgcatatctcctcataatatttcttatgtaacctagtccttgcaccctcagcagtaaggattagctcaacaacctgagcataaaactgaacaactcaaagttgttcaaccactatatccacgttctgagtgatatatgtttgaaatattttacaaggatctagatnnnnnaccaagtatgttttattaacatcct

SEQ ID NO: 30201 - DNA, 2821 bp, Cannabis sativa
aaaaaaaaaaaaaaagaatgagtgagaaaataaagcttcatagtttgggtctactgatgcgaaattttatcaacttctggtgttacactgatgttgtatattgataatgaaatgattgctgcaactgattctgaattatctttcctcatttgtagattccaaacggttgcataccttcaacaaatttggtggtttgaagttgatggtgaagttgagttcccattcccaccggggacttacagcctatacttcaggctgcaattgggaagagcgagcaaaaggtttggccgccgagtctgcaatactgagcgcgttcatggttgggacctaaaaccagtacggtttcagctatggacttcagacggtcagagcgctacatctcagttcttcttaactgaacctgggagatggaatctatacagagctggggagtttgtagtagacaatgcccatgtttccacaaagattaaattctccatgacccagattgattgcactcacacaaaaggtgggctttgtttagactctgtaatgatacttccaagccagtttagagaaaggttaaagcacttttagattgccctttaacctatactactaggaaggttgtgttatatatagagatagtcaatatcaagaagagccatattacagtagctctttgtagtctaagtgtgcatgtaaatttgtaagtgtatattgtttattcattttattttatagtgctctacattttcaaggttgtttgcctccttgtacggatttttttttttggaaataaaatgagttgatgtttgcgttgaatggtatattgttttaatgggaaccgtaaaattattacatgggcaaacttaaaattaatgttccaattatcgaatatttagaattatatatacaaaatgctcactatttgatagcatgtaaatggtttagttttttcaaaaaaataagtcaaaacacaccctgaggggtctgagaacatgcatttttgacctttgccatttggtagtagcagtgctcgcaactggtacaagacagcataaattgacttcagtaaaataagtataactctcttaatttttattcaaatgacctggttcaacttgctttggaaagataatttcgagacggatgaaagtgtgtctcagccatgactcaattctggagttatccggtccaaaattagcttacaaggaaatctggtgcattttactcgaaaattggaaaatgccgctaagcgaggtttggtggagcacacagccacgccctatgtgacgttgtgcgcgagcattggcaatctaaaacgcatgtgttcaacactccatttcaaattggtgcatcctcaactaaaaataaccaattgtctaatatttgtggaatatttgcctagatacaaggaggttgttattgatatttatttaattgtaatattttatttataaaaaagagtggtatgcgggattcattagtgaaatatcccgatgtgtgagggatcactaacaaaccctctagcctatatatacatcaagtacgatgttgaggaaatgattttttttttttttcttcttcttttcgagaccttttcctctcttttggatcttccactctcaaaccttctccttgaagttcacttgaagtcaaccaagaacactacattgattccttgatcttctccattaactccaccatactcaggcgacgccagacctcaaaataccatttaatacacactttttcccacaaattattggtttcttgttcccaagaaatcatttgctatacttttatccacacactcttgagaacataactttggcgtgtcggatccaatcaataaaactacaagtagacgcaatcctattaccatcgcgatatgggtgagctactataaatccctggtgtccatttaatttattgtggttttattagtcaaattaattcaccatggtcctcttttattttacgattttcttagatcagttaacgaaaagtcgcgtcaacattttatttttttctcatatattgtgtaatctctattactgtttagtataaattatttaatattaattaaaatatttttttcacatcactaaaattacttaaatataaatataaatgattcgttttaaattcttcaacaacaaaataaaataaattattattttatatattgatctacaaattaaaatagaaaaacaaaaattaaaaaaaaaacgagaaaaaaataattatatgtaaaaattaaataaacaaaaataaaagaaaaaaaaaaaaaaagagagaaaaacatagttatatgtaaaataacttattttacatataacttagattatattttcttttgcatataaataattacatttgataaagttgaaaaatatatgcactacgtattataaatatgaagaaattacattttatacctatttttttattttttattttaatttttttacctttcttttattactctttagtttatacctaattttataagttatattctcattgtgtgtattagggactcaaattttgataagctatgtgaggttatatttggtactttaattataaaaaagagtatttattaattaaaattattttacaattatatttgattaatatgtaataaaaataaatagttctcaacttattcctaaaagaattgttagtttttatattttatttaaaaataaaataaaaagaaaaaagctaaaccaaacattatagttctaatttaatttcattattttttttattgggataattatataaaataccatttttttttaataaaatagttacaatttttttttttttt

SEQ ID NO: 30202 - DNA, 5190 bp, Cannabis sativa
atcatttcgtagaatacaaaaaaaagtgtgcgtattagtcatataaatctctcagaatatacataatcctcttttgattcaatacgaagtgtcagttaataaagaataaataagtattttttcttctaaattttgtcactaataagatctgttctaaaaacatgacaatatcagtaatagattaggggacataatttttttaacagccaatattaaagaaaaaaatacttattttttcagtttcactatgttagaatttgaaagtgtgtggttaaagtgtatggggttccatctcaaaacgaattgacaatgagaagagtagctcatgcatcttatgtatgctatttagtgtccacacattatcaatgtgagactctctaacatactaagaaattagtacacaatatttaccaactctatcgtcaacaagcaaagaggattggttctaagatggaagtgaaatggtaacaaagctgcaactacctagaggagtttgggttagggtcaagtttgttctaaaaattttaagtaggggttagaagcctttaagccttaggaggcattgagcaagaggttttttgaacttttataatttcttaagcaagttgggcaagaccaaccactaccaagctcaattttcaagcaagtcatttttgccccgttcaaattgagtaaaccaaaccaaatagataatggtactttgtcttgcaaggtggtgtttttgacattcttataaaatttatgtttttcaaatttctaatatggtatcagagcttaagttaagctttgacatattctcattattgatttttatttaagagttttcagttgatgaatatcgatttgttgtattattttcttaggcatatttcaaatcaattagggcaatgtgtatactcgtaattttctgatcctgaatcgtatttcaatagtttacctaccattttaggattctttcaaataccatattagattttattgtgtctaaggttgtttattattgccacagttttaagcccaaactcaaacatagtaatatgggaaacataattagcttatacatatatgtatataatcacccctcactaatttgttaacttagaactccaatcctacatcataaaaaaaaataaaaataatagagtttgaggaattctccaagacaagtgacctctgtctttttgtaaaaaaaaaaatataaataaaaataaaaataaaataagttatgtagtagtcaagacacttggtttctctacattatttaatacatcaccagaacctacttttttttaatcattattattttgcatctaattgttagattacatcatatttctctattttttaatatttgtaaagtcctatactttttaatttttttgtacttatacaaaatctatcttactatttgttaaagaaaagtaaaaaaaattctatcttactacattttcttcatacatgtctacatcttttctcttgcagttctttgttcttggaatctatgggacttcatcttggttcagttgggatattttgcttggcatttctgttcctgccagtttctaggggatcagttcttcttcgccttatcgatatcccatttgaacatgctacaagataccatgtatggttgggacatctcacaatggtgttgtttactatccatggcctactttacgtaattgcatggacaattgagggtcgtctcatagatcaggtgccttaacacttccatagacaaaaaagaataatactaactcttttttctacatttcttgggatttacagtgcctaattgtttgtatagcattagcagggtgacacttcttcatcattttctagatgttatagaacagccctttatgatcagtatctctgtcttaatttctttttaaaatggctttccttggttgatcaattagtttaagtacatttgtacttttatgtttagtcatctctcatggcatatttttgtgcccattcttttcataaccccatcatcatactgactctatgttcaagtcttggtttttaaggcttatgttgatttacttactcccattggtgattaatctatgtgtactctaacaataccactattcattttcctattattttctttaatatctgtgtcaaattgtttagatagagaaccgagagctatttgaggctagctaaagtagttgggtgtgtgagtatgattcaagttcaaatcttcttttcttgtcttgtgttcacctacaaatgatggttaaaagctaagccaatagatatgggaatagttttattctttttgatgctaataattgaggagttacttatagtttcaattgtttcattcagctgttggagtggaaaagtattggtatagccaatcttccaggagttataagtcttgtagctggtctgctgatgtgggttacctcacttcctccagtgagaaagttgaatttcgaactgttcttctacactcatcaactatatgttgtctttgtcatcttcttagctttacatgttggagattttgttttctttatctctgctggagggatataccttttcatgcttgatcggtttttgaggttctgccaatcacgaaaaatcgtggaaataatttctgccaagtgtcttccctgtgggactgttgaattggtcatttcaaaaccagcaagtaaataccctttaacatgaacctagtgttttgttctcacattatgttagcatttacaaattcttacgggtttatttatttgatgttagatttgcgctacaatgccctcagttttgtatttcttcaactacgggagttatcatggctgcagtggcatccttttagtgtttcatctagtcctatggatggaaaatatcatatggctgttctgataaaggttcttggtgagtggacagcaaagcttagaggaaatatattgaatgactctgcttctgatgctgtgccagaagaagagctacctttaaagcctaacaccaagctcacagcatctgttgaggggccatatgggcatgagtgtccataccacttgatgtaagtatatactttttggatcatatttatgtatttattattttcataagtcatagtggtctataatctctgtactggtttgtctgcatcttcagtgttcaacataattttgagaagaatgtttgcatctataacagaattgcacaagggagcttgtctaatctttctcttttgaaattaaagcgaacggaattatacagacgaatttcttagataccagcataaaactaaatgttgatatatctatctcttgtccaattataggtatgaaaacctagttttagtagctggtggcattgggatttccccattccttgccatcttgaccgacatcctccaccgcattagagaagggaaaccttgtcttccacgaaatgtcatgataatttgggctgtgaaaaactcaactgagattcctctgctttctactgttgatatggagtcaatatgcccatctttctctgataaagtcaaggttgagactcatatttatgtgactcgagaatcagaacctccattggtacgtttacacttgtacttccacacatttctcaatgttcctttatctttattttttctttccttgaaatctctcatccaaatgtttcttctgattttttatctttgtattataggaagagggcaatgttcaaagcagtgtgaccacttctgcttttccagtgtctaaaggtcatgccatgtctggtttggtaggtacaggacacaaggtgtggtctggactataccttgtttcatcaacaatagggcttataatcttgatgtatttgttgcaagtcttttacataagtccttatggaatatctacatggtggtacaaaggacttcttatcatggcttgcatggctctcagtgtcctaatctttggcggttctgtaattggtttatggcatttgtgggaaacaagaattttggagaaggagggataccatgacggtgttattaagtttgatgaagagcaacataatggaaatacaattctgaaagaatcatctattgaaagccctaggaaatcaactcttctcaagtatggcaccagacccgactttgaaggtatgtttttttttaagtacatattttatagttaaatgtagttcatgtggatagcaactttctaagtttttcttattaaacaacgtgatttctgtcttcttgtgcagaaatttttgcgtacatttccaagtgctggggccatgttgatgctggtgttattgtatgtggtcctccaacacttcaggcaagtgttgctaaagaaatcagatcacacaacatatttaagagagaaaaagatcatccaatcttccacttcaatagtcatagttttgatctctagtcttccacttcaaagtgtctctttacatattattctataggtaacccaaagtccaactggggacatatccatgtacaaggtatagatttgtgaatatcaaagtgtaattatatatgtatctaactatctatctgtatagttatgaaattatcatataagttgtattataaacgttgcatttccatatctaaaaaagagtgtgaatatgaatatggtactcctttttttgttaatgggacatgttgattatattactcatcacttaagaactatgtcactcgttgaaaattattagtatgtaaacattttttatatgcatataactcattagttggtcatgttgtttttttatatgcacataactcattaacagggctacctttctcaccacaatctaagaacatggcttttctggaggggctttttggcatgagtttccatactctataatacgtcacaagagttaaaatctatctaaagatgagtaattggtgaaatgaatcttgactctttgtcacttacctcataactttggcattgggtaaggactcttccttgatacattaaataacaggtcatactatgctcttatcatttactctttggaccaccatgagaccagctgcaatacactcaccatgatagggttcagcacatttaatgtggatgaattataaaatctttgtcttacatattttatggactgattgaccctacactagtgtacttttcaggtgtgtgagaaaactagtactagtcgcaagagacagtgggatctcatcaatgttcttagcta

SEQ ID NO: 30203 - DNA, 1426 bp, Cannabis sativa
cttacactacacttaaatccatgtttatcttctcaaagttaactatttaaaattctttagtaaagcttcaagtttcaacattttaaattagagcattgttattgggtattagtggtgcttagcacctttaagatgtgtcgtcttacgattggctaacgatactccctaaaagttaatatattaaactacatgggacccgatactaaattagaacaataacactgtttgactctgtattttagcatttctctttttaaattattacttaccttttttcttaaaaaatattggagaaaatataagaaaaataaaatatttcaccaatcatttttattaaatattagatcaaaataacaattttatttatcgaacgaatacaagtgagctattcaaaataacaactaatcatatgaataaataaaatataatgctatatagggcaggctatattattaatagacattccttactttataaataattgatacctatgctttatttatttatttatttttctttcataagtatatcatttttttttctctctaataaataacttcatttgtattttgtgcgtgttaggctaaacaaaaatctcaaattttgaacgtttgaccagtcattgtaatactattgtccccctgtgaacaaattaaaattgcaagcaaccgaattaccgaagagcatgtcagtccaaatcaataaatcattatcctataataatttaataaatatagaaatatatacattttaaaattaaataaaaaaaaaatcatcaatacccttatcccatgaattaataaaattgtttatttaaaaaatgattgtaatatattcatcattgtcgagtcttttaacattacatgataattaatttacaaaccttataattaatgcatgtcatgtgcaaatatgtttctttcagttaagaaacaataagaaaaatccatatcattgtgtctaccattgttcattttggtttaaaataaagagtgtaaattaataaagtaaactttgaacatgttatattgacacctttttaataaaaggtttgtgtctctgattttagtatttatatattttgatcaacacaaatctttaacataaatacaaaaatatgtatatatatctaataacaaaaatatgtatatatatctaataacaacttataaataataatgacacacgattttgttccgtgatacttttacggaatgtatttcagattacattatatgagtctcaaagtacattaaatgagtgtcagtgtacgttattattttttaactctaattgcacttagattaatctcagcctcagatcaaataacttcctcattaacgattatcgtacatcacaaaatatatttcataaaagtacaattacgaaacaaaatcatttccttataaaaatattactaatcaaa

SEQ ID NO: 30204 - DNA, 1337 bp, Cannabis sativa
ttttacaatcagttaataacttaatagctttaaggtcctaggttcgaacccatgatctctcccttttttccacccctccctcaccactaagctagccttagtggcttataataaggttttcgatagacataatttagctctacgctgctcttgtatcgtccacaggcgtgaatttgtactgcttacccgtttgaaaaaggttaacttaactataacctaaggtcatttaggattccatttattttaaattttaggtttttttaataaattttataaattatatttataaaaaaaatacatatgttagtgcagtttaatttgattttgtactttttacttggcctttttggaatcttagggataaacttgttaatagacttagaaattggaagtggtaattcttttttgtattttagttatcaaatattgggtgctaactattctaaaaatgaggggaaggggagtttagagatgaagtagaagaagaggttgatcttcttaatcccttcttgagatggaatcagaaaaagaaaaaagagagatttacttaaaattttgcccggccgttggaggaagattgtatttacatgtcacgctcaggcatgaacattcttcctatattcatcatttgtttgttaatattaataactatgtgatgcatttccttattcaccaagaagttcacacctcctactttaatgtatttgtttgagcacatgtccttgtaaaattttgaagaattcaaaataatttataatgttaaaatatcttaaataactacaatatacaatgtcaattgctaaaataaaacaattaagatttaaaaattatttagatagtgaaaatatgaaaaggatgtattggtacactttactttaatttttgggtgcaccatatagttttcccaaaattttatatttatattttcaaattttgtttttttaaagagaaagtaatttttgtaaataaaatttgatttagttattctaatgagatgccttaaaatttaactcgtattgttgtgtatagttcccatatactagagcagcttgtggctataacaagaacaagaccaattgggtgctacttttcacattttgaatatagacaaataccacaatttattgaaatatctatttttttgaagacgaattgagatacttgaaactcaaatctataaaaacagcgtttgaagaaaagtactaaatatgactattcaaagactttaaaattgtcataaagcttcaactttttaatgacaagtctatgttcacgattcatgattcacatggtgaaataaacactatatattactttgctctttttttttttttttt

SEQ ID NO: 30205 - DNA, 5466 bp, Cannabis sativa
actgcattttaaagctttctttgggaaagataataaataataagaagaagaataaaatgatatttcattggatttaatcgttctttttaggggtacactttatcttactgagttctgcgatctcaactaccaactgaggaatgcctacaactttagtcgcatccactgtcttcatctttacggccacatgacagacctataattaaacattttttggtatcttataaactacaaaaacctcaaccacttctggccttaagtcatgtataaataaatgtccatgtttttattgttttcccttcacaactctatgatgagacaaaatgaatccgacactcatgttctaagtcaaagacaagagagcaaagaagccgtcctaggctcttcaaaccccaaaatgggaaagtttgtttagtttcagtatttccaagtacattggtaaacagcctcatccattagtactcagattttgataggaatcatctactcaccccccaagaaaaagatattaactattcaatggctaaagataaagtcataaaagtctgccagaaaaaaattcatttatatcttatgatccatttcatcagttgctcttttcttaacaaggaaaaaacaaaaacccaatcaagactagttgttaagacatttttgttaaaagcttttcctgtgtgtgaccaacattgaagtgtaaatattctttaaaacaaagagacaaaaacaattttccaacctccatataatcttccacattacggattggtcatgttgtcaccgcagtgcctaacgcggcgccatgcttctttataatttgcactgactgaagaagaatgtcttgttgtgtagcgtaaaactcatcctttttctgagtcaataaacgaaaattagcagaaaaatagagataatttgagagggtaggtgcaataatggggtaggatatgagaatatatctcacaaatgaacagtatttaaacaatgcatttttattaatacattatatagacttgaatacagaacaaaacattgcaaacctgagagcataattatgattctgcttatataaaagaatcagtctccagaagcaatcaaccaattatttaaaaattaattttttaaggggagacgactacaggttcttcactctacccttccatccctacaaaataataatatgatagaactctaaagacttacgttcaaactggatctatcaattagaaatgactgacatcaaacatttcttatcgtcagctctattgttaattttcctaaaatgaatctaattagccatttcaaggtcttcaaccttcattcaatcattatgtataaaagaacatattgctgatatataagctataaacaaacgatgtagcatcgcaggtgtaggtttgcaaatattaaaaggccaggagcttaccatctgtttgaggttgcatccaacagtcaattctgcaaatgaactctctactcgagacaagaaacagtaaggagcttcctttcccaagaatacctgagagtgcaatcttagcatactgtttatatcattagcaatctgaggaatcttatccaaatcatttatctgcaggggaattttagagacaatggcacgccatccagcacgtgacttgttcacaattacctaaaaatcagatgaaagatgtttggattatactgtcataaatacttatttaacttgctacagaaaattatccacacaaccatacgcaggtgaacagcactacttaattatctgacatcaaaactatacagaaaacataaatccgtctggcacttaaccaagacatcaaattaatgatcatttagtcaaaaaaaaaatgatgtgagatattttagcctcagtttgattcttcaatacgctttacgtatgccacgcagtgtaacattttgtagtatttcaaaatctcagagatctgatcccattaaaattgcttacatcaacaagcttggacttgaggcacattattttaacttgcgcatgaataagacaagatgactctaagcaacatgaccaaatagattgcaatttacaataaataaattagggctgcaaccttttttgagcacacaaatcaagggacccaactactagatttggaatttcatacttgaaattgacatcactaactgttaaatgtcaattacattagctcggtaaagccatcctatttgtatgattcacaaaaatgtaatttcaacagaaattcaatatataaaactttttttctttttgaaaaagacccaaaatatgacttgacttgagtcacagatatcactggatgatacgaattctactacaaatccttttgattattatatacctgcagctactattaacttcagaaaggaagtagctaacagaggacaaaaaattccaaattttggttcatcctactgataaaataacaagttgcagaagccatgaaatgatttaagagccaattactcacttgactagaaaacagagaatttggaactatgacaggaaacttctcagcattcagtaatgaggtggtagtaagccccatttccactacctgaccttctattgatccggcctgtaataagtaaaaaacacgcggaaaataagtattgaaggagcaattatagtattagagagtaggatagttatagatttccggtaacattgagcctgcaaaatgactaatgtatgattgccattttatgataaatccggatagttatataaattttttagttattaaaattcagatgttgttgtgaatatatataaagtgcaattcacaggtgacttaaagtatttccttgtgccatttgtggtccaaaggaggaactctaaatttatggcctttacactaacaagaatccaagtaaagtttgttcacaatttccttttcttaagggtgagcttgacatacttttattgtatctccgagtgaaaagggccttgagaattgcatagacaaaccactaagcacatttccaaggacgtctcgagcagcaaaagcagtagcaactcctgagtttcagagataaaaggtcagtttttgaacaatttgggcttagttattagttaaaagaactaatcaagaaaaaaatcatgcctcgcttctagattaatttaacaaagaatttcaatgtatgtggcagctgaatccataaatatattaaatatatatatatattagatatcaagaacattttttcttaaagctataaaaaaatggcaaataatatgctaatgactaggaactgtaagcctataacttaggtagtcagtaaaccagaaatatatatgcaaagggagaaatggagaacccaaaaaatttatacttaacaaaagagatgtaaacatatagataactagaagcagatactgacctcctatgccaccaactgtgagaatagattgaacagccaccccacatgcttctgctaaagccattacagcaattacaaaaagaccaacagatgaaactttgtcaagagctagcaatttctcgcgatcaagacccgctacaacaggaccggccaatgcacgagtaaaaacatttgttttccaccgattcaggaaccacacaagtgacacgataacagcacccctccatgctggtaaaaggtactgtgatgcaatagtagatggtgctaccatcatgccactgcagaacaaatttatccagactattatgcaattaaaagaagatcatatgtacactaatcaaataaatgattataaagaggcatttgcaaaacatagaacaactaacatttgtgtaaatgctatgaaggtaactaaatatcgtactgggtcctccaaagcacccaaaaaacttttctcataaggaatttcttccccagacatacttctagacaatataccaacaggaccttgtgaagagtacttgtgaaatcttctcaagaccctaggcatcacaaaccaagccagtagagtaccagtgagcataaaactagctggaacaactacatttttgagatacggctgtgaatccaacaatcgttcaacatgaggagaaagctcatcagaaacttccttagctttctggccggtataagttgctccctcaactacactttgccaaagatctttaaccttatcaagccattcatttccaacaccactgtcagaaacattaactccactggcaccagatgaggctgacactatttggtctacacctttaccagcattgctactaccagaggaggaggaatacgaacagtacttcaaaagagggcttgcagaaaaaagaggaacagccttcctaaagtgggagtttgagaatgtggatgaagatgtacaattgggtaggattgtataacatctgacaccaataggagacttcaaacccaatacattttcacgactacttccagtgttttcaaagctttgttttcctttcacttggtaatggagatttacagaggcatatgatgttcttgtaatgttacatgagcaaagcgattgaggtatcggatagaaattggtacaattacgaattgacttcattgtggaaaaccttgaaccagcagccattaaagcagcatagcatatggaaggaaggaatctacagcaggcttagttcaatcaaatctcaatctgcaactctgcaatgattaaatcacagattacaagcaattattaataaacaatcaccagaacccaaattacgcaaacaaaagtatatgtgaaaattatccataaaggaacaatacctgttacttttctagttacttttctcggcaaccaaacgcaaaatcaatttgagcgttatttttataatacctgttactgtcgactttggaggtttacatgagcttcgttttgggcaaatatggcgaaagagtaacaaaaatatgatcagcaatttttaacaatgagtaaggttaatttccctaatacccttcaagtttgggatctctaacatcttggtccttttaactttttcccattttcaatttaacccctgtatcatgaaatgctttttttttcttctttttctttttcttttgatgaacaatgaaaatgctcttttcttgtgatctacccaatcctaaatatttagtcttatgtaagtaaatttctttaattattttctatatgttttattggtggaacataaaaacaacaattttctttaatattaaaattttgttctctaatttacttagagaatctcttttttatgttagttttaatttaatattgaagtttatgaattgactaaataaatctactattggttagaagaaattcctccaccttcatgtataatgtagttacttgtgttattttaatcttttcaaattactcccaaaaaataatatattttgcaccacacaacattattggtgtggttaaacataataacttgtagtgaatttcgtaatgtacacttaaaaatatgtataccttactccttttgctttctctttatgatatatata

SEQ ID NO: 30206 - DNA, 2627 bp, Cannabis sativa
  modified_base (47)..(60): a, c, t, g, unknown or other
  modified_base (1896)..(1897): a, c, t, g, unknown or other
  modified_base (1949)..(1960): a, c, t, g, unknown or other
  modified_base (2045)..(2048): a, c, t, g, unknown or other
  modified_base (2383)..(2384): a, c, t, g, unknown or other
tttagaaagttcatatttaggattttaataaacatacttgtgagtannnnnnnnnnnnnngtaaaataatttccaacaatctcttcctacgtagcgaggttggtgcctcgctttgtattactgatgtcgtccttatgattgtgtcttcatatacgaaatagtttctcatcaatatgtgaattaatagtttgtacattcgtgtctcgcttaagactttacagtcaacgagttatatatatactctatcagccccgcatttaatgagttattccattttaatatcttctaatataatttatatttgttgattcgtattcttcgaggttgacaagtgtcctcctctgaagtaccagccgaattttaggtataccacatagcaatttagatcaaataaataataggtttgtagaaaaattgaataaacaatttaaataaaacaaacaataccatgtaacaaatgtgaaataagatatttattacatatataattaaattatcatttaactaaccaactacattttaaaaatttagggttgttcaaacaaccttaaatatcttttcaaaattttaagtttaaactaattttaaaatatgtaggttcatttgaattatttttatcaaattaaattaaatatctaataagataaattatttgacaataaccaaatatatatttttaatattattttctaattttataatttaataaaattaaaatagtaaaataagccaattttaaaatacatacggttagtcaattattattttattttaaatgacaattttctaaattatatgttaaaatatcttaaattgagcattttttaaagttctacaaaatatctaggttatttaaatattttaaatattatttataaatgtctgataagtaaaatgatataaaattttatttttctaacatataatttataaaaaataaaatattccacaaaataatctatttttgaatttgaaaatattatggttagaatgtctacaaaaatacgttgcttaattttaaatttacaattatttaatttatcctataagattattttaatataatatttcaaattaaaagaataatactatcttttaatttaaaatatacccacgattaaaatatctaaccttataattaaataatataaaaaaaattaaaaaattatcaaatttttaaaatctgaccataattttaaaaaaaaaataatcaaatttttaaatttaaacctcaaaatattaaaattaataattatctatttaaaattaaattattaatttataaattttgatattaaagtttaaatattaaaattaatattttattttaatttttagggtttgaaattggaaaaattcaaaatttgtagaaaaaatccacaaaaattgcattttggattcaaccatgcaagctacccacgagataggctacacacagccttgggtgcgcgcaaactaggagtattgtagcctccttaaccgaggtttctcagtcagctgcaaggtcctccttggcgtgcatgcagcatcacgcgtgtctgaatggggtgataccatgtcttcagacacaatttatcccagcatttgcgcgcgtatgggcttcttgtccaaagcttctggtccatgcgggcaccaagcttcgacaccatgtgcacccacttttcaaaccttcataaatttctcgttttttattggagttaagtttcgttaaaacaaaaatttcttaatttttcacaaggaatccaaataaattattttcaaaacgaaaataaaattattttcatggaaaaatttcatgatacacattcaatcatcaaacaacacataaaccaacatgaatacatccaaattaacacaattagtgtattcatcgttttaaattcatatttcatgaanntaaatcattaccatggctctaataccagttgttaggaatattttaccaggannnnnnnnnnnnaacaagtatgttgaattaacatccgaaatataaatatctctaaaataatgaaattaaacacaaagagtttagaaaaccttacatnnnntgcagcagaataatatgattccttccgctcagatttctaacccttgttcctttctgtcgctgagtattatcatgatctgagcctagatctctttctctccttcgggttggttaccaccgtcttcctcactataattgagtacttgacttgctatgtgtgggcatggaactctatcactatgggcgagttggttgaagaacaatgaaggagggtttgaatcacttcataaggtgtctctcatcttctagttgcaagagaatgaaagctagatttgatttggttgaagtgaatagttggatgagatgagagcattatgttccttttatagtgtttcnnctagggcttaggtttgagttatatggattaaaaaagaacaaaatattgggcaaaaataactagagtggtcggccacataaggaccaatctctagttacaattttgccaccttatttcaactggctattctactttcaataatatcatattttccaattcaatcctataaatgtcaaaactatttatttcataattataattaattatcaaataaaattgacatttatattatttattaattag

SEQ ID NO: 30207 - DNA, 2540 bp, Cannabis sativa
tccaacccatgagcaactgatcacttacgatccagtgctcataatcggggtttagctgaactccagtagctgtttgaccttctggtgtggtttctgcaggtagaaattctgggggacatggtcggtttccattgatgaaaccatcgagtctgtgccctcgaataatggttgaaaccattgtcttccatagggtgaaattatttctgtctagcttaagggagaaaggctggttcagtgtattaaacggctgagtaaaatttgtgctatagctagatgagccattgttgttggaggtagctcctgcgttactcgaagctgggacgatggtgggatttggtgggtttgcaggaggtggagtctgagagttcccagtcgacattggcgtaggcctttggctctgataccaagaaagtttttagggaaaatagaaaattgcaaaaactcagctcaatcgattctgagccagaggaattcatttatagagggattgatacaattggaaccaattacagagtgccaagtggcataacagaaagcaaaaagaatatcgtagaataacagaattcgtacacacaatcattaagcaatcattgacagctgctgaggagaatatctcccaagagagaggaataaagtgtgcagcagtacaccatacagagatgcaccctagggactgcaattggtaattgtcttaacacctcccctcaaacgtggggtgagggtctcactccgagtttgtcgacaagaaactgaaatcgactgtgtgacagtcccttggttaggcagtctgcgatctggtcagaggatggtacatatctgatctctaattcttgcttcaacactttctctcggacaaaatgggcatcaatttcgatgtgtttagtacgggcatggtagacaggatttgttgctaaggagctggcactcaagttgtcacaccatgtgattggtttatgaggagaggtaaattgtaattccttgagaagtgtttcaatccaggttatctcagaggcaacatgggccagagctctgtattcagactctgtgctagaacgagacacaacagcctgttttttcgacgaccatgacacaagtgtatctccaaaatagacacaatagccagcaatggatcgtctatcatcgggacaacacgcccaatctgcatcagagtatcccaccaaggccagcctttcactgtagctgatgtgtaaaccatggtacatggtccctttcaagtatcgcaagacccgcttaacactactccaatggctggttgtaggagattgcaaaaactggctgagtttgttaactgcaaaggtaatgtctggtcgtgtgtgacaaagatattgcaaggctcctatcaagcttctatagattgttgcgttagtcagaggctcaccatcggacttagacagtggttttcccgagaccattggagtaggacaagttttcacattctgcatctcatacttttccagcagttctgagatgtattttgtctgagttagatataggcccgtgttgtctctgtgtgcttctatgccgagaaagtagtgcagggatccgagatccttgagagcaaagttcttattcagttcagtgatgaagtgatcaagtttttctgcattatttcccgtgagaataatgtcgtctacataaattagcaccatgattattgtctgccctttcctgtagaagaacaaggaagtgtcagccttcgagtttggaaagctccagctgatcaaagttccttttagtttgtcaaaccaagcacggggtgcttgctttaggccgtacaacgacttgtttagcttgcaaacatgtgttggtttagtagggtcttcaaaccctggtggctgtaccatataaacatcttcttgcaacacaccatttaaaaaggcattgttgatgtcgagttgtctaatctcccaattctttgacacggctatggtgagaataactcgaactgttgaagccttaattacggggctgaaggtttcactatagtctattccgggtctttggtgaaaacctttggccacaaggcgagatttaagcctctgaacagatccgtcagcattgtactttattttatgaacccatttgttcccaaccaggttgtactttggagaatagggaacaagggtccatgttttgttcttttttagagcatagatttctgtccccattgcttcacaccattcttttgagcttagagcttcttggagatttcttggttctcctttttgtggatcccactgcgatgttccaaggtaaaccttaggcttgaagattccggcctttgaccttgtaatcataggatgagttggtcttgggggttgctgaaaatcttgctcacagtttggttcatttgtcacctcctgttcacttgaacttgtctcaacattactgaagttaacaatatcagtttcattggcagcagaaggatcagaactagttacctctagattgtcctgatcaggactcaaattagccgtggctggtgatgcttcaagggaaggtagagatgctgcttctga

SEQ ID NO: 30208 - DNA, 1717 bp, Cannabis sativa
  modified_base (752)..(764): a, c, t, g, unknown or other
aaaaaaaaaagttaataaattatgcttcacgttttaatttaactaaaatgtatcttttaaaacataaacatcataagattgtatttattttttggacaataaaaatataaacctattattttataaataggatcaattttagggtagggcagctgaagctgttgcccaaggcccttcgaagaggcttccaattttttttttttttgaaatttttttttagagtaatttgtaacgaaaacattgaagtctaactttaaattttacttaaatagctaagtaaattttttgacagttaaaataccttttgttaagattttgaaactttcataagaatttatttaattttatatattagatgttaagagtttagatttattaaaatagtaagaacaaatgacattgcgtgttaaactttgttagtaagctatttcaatttcaaacatgaaaagtacgtacccacaattatatatatatatatatttatatagcttttgataatatatttaataattaattaattaaattaattatatacatattaattttagccgaaagtgtcaccaaaatccactaattatctaattaggttctttggattggaccctattcaattgcttatctctttaattaattatcttttttttttcttcttttgtctttgtcgtgtccactcctttttttctttgtttatgtttttttattattttttttttttttgttaaattcgacgtgttaataataataataataannnnnnnnnnnnnaataataataataataatttattgtatagaaacccattagacacgtataaaacgtttttaggtcattactaagaaaaacatctaattattactttgttacggcttgacttgttatatcttatctataaggaaaaattgggatctatatattaattaattaattaattaattattaatggggctaagttacctatttatttattatatgatatattaatattaagtttatgagaatgttaaatacatatggtgtttaattgtgtataattaaatattaaatcttatatattttgatttaataatgaataaatattattttagactctatgttttatataaatttataattaaactctaaattttattaagtgacaaaataaactccatatttcacaaaatagtacaaaatactatcctataaattatttttttatcgaaataaaactcaataatcacctaatcttgatgtcttatgttacattttttttatatctgttcgtatctaaattatcttcaaattagttacattaaaaaaatatcgaaaatagctcaagacatattttgtaccatttcaaaagtatagggtccaatttattatttaacaaataaaaaatctgattagtaacttttttacaaaactcaagttccaaaatagtactaaatcataaaataatgggatttttttatttttacgtttcaaatcatttttttatttttgcatatttacagaaatcaacatagcaaccaacacatacaacaacctaaattgcaattaaaatccacatagcaagctacatagaaactaccagagcaaccaccagatcaatcgaaaccgtaaatgttttaaaaaaattaaaaaattgtatatggggtaattcccataaaataatttttgtttattaatttagtaaacataataaaataccaactattttagggtaaatatcatttta

SEQ ID NO: 30209 - DNA, 1273 bp, Cannabis sativa
aaagcacattgttagaaaactctaaggcttgataattcctaaagttatttctatgttagtgcatataaatagggaaaaataagcttttgacaaaagtgtgttcaagccatggcgattccactattctacactcaagattgtgagtgagtggtcttgttttttttcttcatgttatataacatcgtgtaatttatctatctcttctactattcatatatatagtgtacgcgttgtaacatttatgtaattaatattttaatttttatagtatgttataattgaattataatatatcttaaatatcttatattcatatataaaatatatgacacaaattacacatacttcatatatatataatgaaagtataagtttcacttaaaaacataaattaattaatatttatatttgagtgcatatcaagagacccgttggtaagaacacgtcaattttatcattggtacggcgatgtaaagaccagtttcaccactaggttctccttttctatcgagtagtaatagtatgaagtgttataatatgggtcgagcttcttaatacggtacgaaatcggcaattagctaaaaaggcacgacgagcatgattcgataggaaaaaatatatgattaggcatgacacaaaaaatatgagcttaggcatgacacgacatgaaaaatatgagcttagacacgacacgacccgaaaaaataaaaatttaggcacgacatggcacaacaaacccgaaaagtatgacacataagcacgaatatattagcttgaaaatataacacatcaaaatattaaataatctaataataattacttatttaataattaaaataataataatattaaaattataataattacgattattttttatatgattatctataattattattggaaaaaaatatgaatataaaaataattaaaattgtaaaatacacatattttagtatttagttcattaattgtaatgaaaaaataaaaatataaagtattcataaaaaagtaaatgaatctattttagaaacggattggccactatacgaatattcgagcatggtacgaaattatcaaatttacaaactgtattgaatttatcttataaaattattatacgacaagacagaacccgtattttaaaaatacgacaagacacgatttatatttttttatggcactacacgacttatattttttataatctagcagaacccgtattttaaaagtacaaaaaaaaatatggaccaaattaacacaacgcgcacag

SEQ ID NO: 30210 - DNA, 1531 bp, Cannabis sativa
gatggaaaaatccaatatccaataaataattggattggattggatgggtccaaatccattggatgtgatccaatgaacaaccctaatgggaaggacagagtttattcgaagattgatcatactttcattaatgaggattggatagattttatgcccagctctttggctgtttttcaatgggaaacgtactctgatcagtgttattgtgtggttaaaacccagcaacaagggattttagggatcaagctattccggttccttaatctctagacttctcatagtaagtttcatgaggtggtgacttccaattggaataagcctatggctggttctgggcttcatcgtgtgcttaggaagcttttgaggcttaaacatgtcctcaaaagttttaacaaggaggaaattggagatgtggaacagagttatcaccaagctaaagctgattactagtgtgccttaaccaatgcacaagttgctccaacagatgattttgcgcagttacaggagagaaatgctggtgctatgtttcaacaacaggctgccatgtatcagagttttctggttcagagaagtaagataacttggctgtccaaaggtgatgataataaggcttattttcatgcttggatctagaaaaggagacatgagaacatgattgtctcgttcattaatgaagatggggaaactgtggaagactacaataaggtaattcaccattttatttctcattttaaacattagtgagtttttatttaccaaaatgccacttacacatatccattcatgtcagcccaaatcaacttccagccattacccttttgaaacccacattcaaaaccaacgaaaatcaccttccagccataaccttcaccattcttcttccaactgcctcctttatctatttttttttatatatatatatcatcttctgctttctccatctccattgtcaaaaaaagcttcaaaaaagggtcataaatcagttgttaacaaggctaaagaaaaatgcgcagtcattaacgatgatgactccaattttgctctcctgtggctaaaggtggttgtcgtctagtgaagaagaagtcgaaggtgtcttcgcctgaaaaaaatttcaactttgaggaccataatagaaagaagaagtcaacttcaaggcaactatgatggagctgtaatgcaacaattatatttgttgcgagccaactaacataaaaccacaaaataactaataattctacatatttaatacaaacaaatattacaacaatcgtattttatatgttcatgttgcgtattgacaattttgagccctgtttttataatactatgatattgtagtagcaaaactattattcaactaacgtgcaacttaattacaactaaaaatattgttgatctcgcttttagctaacgacagtgagtcaattaataagcgattataaatgtaattaagacagagcaaaaatcagtaaacaataaagaacacaagattttaaagaaattcgacccctttatgtaacaccctaactaa

SEQ ID NO: 30211 - DNA, 2440 bp, Cannabis sativa
tttttttttttttttgaaggaatctttggagtttttagttcttgaaattttttggcattagattattaattcaataacatattcattgcttaaaaaaactcttatgtagtgaaatctacattataaattcaattatttggtatttagttgcagttttcgtaggaacgatctcactcacatgagttattacttgtaaaaaataatatgtatgtgtgtttaaaaatttgcaacaattttttcccttgaatatttttaatttgttgcaaaaattttcttgaccaatacaaatcattgcaaatatcttaaattatatattgttttttttaaaaaaaaaaataataaattacttatgtggccataagttacagatttaatataattagtgtaaggatttatttaacaattttatattagtattttcacattaggcataaatattatttctaaatatacatattctcataatttatcatttaattattatttatatatttattttttatttggactcctgaattggatcagattaacatcatgtaagtgatatttcaataaattattttaaaaaataattataatgtaattggaggaaatatttgtaacaatttctatattttatgaggaattttttgtaacaagaagcaatactttacaaggaacataatttggagaaaatcctattcattcaaccattatttttaagaaaaaaaaaaacaatttctttttattgatttttttaatatgataaaattccttttattgttatgtcatagaagaacttctaattttttgtcaatcataaaacatattttattttccttgttattaattaaaggaattatatctgattttattatgtacccaattacttcttccaactactccacaacagctagtcaattaaagtcgatatattaaagatgatttctctcaaaattataaatttggactctcttaaaaattctcaaaaattttatatagagaacattttgtatcattgcttaaaacataaagtaccattcattttgtttaaaagaaatcaagtggtgtttattatctcccaccgattccaccaactatttataggtggtgtttggttacaaaataaaaatagaataagactcagaatagaaatggtaataagaataagaatagaatggaattgaatttcttttcttttgtttggtaaaactatgaaatcaataactgaataaaaattatgatgtttggtataatatggaatgaaataaaaattttattattttgaccaaaatattctttaccgttttaaaataatttttgttttataaaaataccatcaaagtacaaataaaaaaaacgatatatatatatatatatttatgtatcactctcaaattgtattttttttagatttaattatcaaacaataaaatataaataaatatttaatttaatagtctagtttacattaaatatttaagtatgttattcatataatttaatcatcacacatcgtctatctatataattttaataataatattgctttcttataattttatacaaaaaaataatagacatattattgtaatattaaatgttgtagatatatgttttaaaaaaaatatatatatatatatattgtccatataattataactttaatcttttatttatgagaagggtatataaggaaaaataatttttggttggtatggaatgacttttcaagtcattttatttagaaaaagctattccttagtttacatgaattacaattcctattggaatggattttttaatggcaataaacaaaccaaacacttgaatgatctttctttaggaataatactttcattcctatactcattcatgtaaaccaatcactactttatataggctcatatctcattatcttttaattttaattttttaaaatagaccgtcacaataagttaatctcctaaagagcaaataaaactccacctaaaaaaattgtgataggattcgaacctgtaaccaaacaaagaaagatgctaacaaaaacattcttattactacactacacatggtgggaatatactcatttgatacttgataatttgtaattaaatttgagttcaaaatcctattttataccgacttagtataggtgcataattaaaacaaaatgctagtaagcatcatatcactattgacataattaaatatcgaaattcacatactttgagtaccaccttagtgtaatacctagcagactaatgtctaatagcaacactctaattaaaacataaaaaagaaaattattttttatatatatatatatatttttaataaatattatatgtaaaatacataaaattatattttttttcttttaattttcgaaagactaatatatatttttatataatgttcaaaaaaacactataaaaaatttgtaaaaaaaaataaaata

SEQ ID NO: 30212 - DNA, 1698 bp, Cannabis sativa
  modified_base (40)..(46): a, c, t, g, unknown or other
agagaaagaaagaaagaaaaacgagagagagagagagagnnnnnnngagagagagagagagaaaggaatcaggttggggttttaggtcatgtgaattattcagatggcaatttgacttagcggtggttggaggatggatgggatgtggctgtgcgataatgaacagagggatagagtgggagatgcggctgagagggaatggctgagaaagaatttgggtttctagtttttaggtttcaaaattacggtttttcttttttaatttttaatataattatgttttatattttatttattttaaaatttattttttcctaatttcaaattatttttgaattttttaatttttgaataattatttatgtggaccaattaaattataccatgtgtacactgtgtagtgaaagttccaacatggcacttaacacccaaaaatagatgaaaatgttaaactactaacagaacacgggtttcaggggttttactaccaaaattttggaattgagggttagttacaataggcacttttggagattatgccgcaaattactcataatttattttaaggataaaccaataaactctcttaaagggcgaatggctccacacatatgttatttagtaattgtatgcagctactaaataacattaattgttagaattttatcaatgtcttgtggattattaatgattagttatggattctcaataaccattaaacttaaggattgttgtgaatcgcaattaatctaatacttgtagtagaattttgagaaaatattaatgatatttctcaaaaattatgttcttggattgattactcccactgatcatgttaattcttaattccacaattctagtgttgtgagatggatagtaaaaatatgtaacccatagaccttatatcatttttgatgaaatgctcatttaaggtatttgagcctatatctttcctttgacaattgtactctaactatatacgggtacttctaaaatgtggacttgtcataaagttagtttctaacgttatcacaactcaaaatatgtttgagaaataactttggttagaacacgcgcgatctgatatgtacactctcgttgaagattatcaaccaacaacgatttaagaaaattttgagtttgctatgtagactccaccccatatctaacaatgcttagtttcgtaaacctgttacacactattgttttggtgtaccagacatatgtattaggcaataaacccttgcgttttaagaaacattgcaaatagaaaataagtttatccatcctcacgaatcttaatgtaatattctccagcgatatttgatctcactatcttaatatataaattgtattatttctctacttaagatttaaatgtcactacaacatataaatctttaatttttgttgagacataatttatgcgggtgatcatttataaatgggataataaattttgtaaaatatgagtccatatctataagttttaattaacttgtataatttttaatatgataaaaattttatattcatcgattttgacttgttagaatgtattttcttaatgaaattcacacaagttttaaataaatttagtaaatcgagagtaatgaagtaacccgctatttactaatatttattctctttatggagataagatatacagtaccataatatagataaattcttattaat

SEQ ID NO: 30213 - DNA, 1373 bp, Cannabis sativa
caaaaggcctcatgtgtagtccagattttgaataatgaccataatattctcctccacgatctgaaagaacaactttgatgactttcgaattgatttcaagaacatttcgaaagattttgactttatcaagaacgtcagatttttctttgattaaataggtaaagtcatcttgagaaaaatcatctatgagagttataatatacttatttctgcatacgtggtggaataaggtccactgatgtcagtgaggataatctctaataaagattgactacggttagcaactgtctttcttattttagtcaatttttcacgagtacaatcaacacaagtatcccaaccagaagcatcaagatgaggaagaatttcagatttaattaaacgatcaaccctttcttaagaaatatgactcaatctatcatgtcataataatgatgtttccttaaaataagagggtaagttaagggagctaatggcaatttaaaagaccatcagaataataaataaaaatatttttcactaatctaaagttaaacataatgtcaacattatgattggcaaaagaaaaacaatatcattattaaaccaaaagcggaagcgaaattgaactcctcttataagtaggaacatagaaggtattgctcaaaacaatctgaacactaaactgtaattcaagaataaatgtgccaacataaataatatcgactccaacatcattgccactttgagctttgactctctctcgcttggctttttgagattcctagcccctggttgtggttgcttctattcatattttctcaatcttttttgttggccttaagttgagaaacattgtgagaaaattcacgcttctccttttacagcttgatttcctcagctacacaatgagaaatgaggttactaacactccatgttttattatcagtgttgtaggttgtattgataagacgaaaagagatgagaagtgcatgaagagctcgatgaatgatgtaagagtcaagaagaggaatattatgatcttttaacttggacggagcattcacaattttcaaaataaacctcacactcctttgtttatcatactgaatggttgtcatttcatccataagatgtccaattgcagcgtttttaccagtgccaaatagtttttttactgttttgaaaaattcattaacattttcggtgtttggaaaaccactaaatgaatgttcaggaattgaacttttcatagcaatgagactaagacgatttgaatttttccattgtgcatgaagaatttttgaggcaacaatgcttatattagtaagatcagcagatttttcttctcgaaggcataagtccaaatctattatgcctaaagtaattttcac

SEQ ID NO: 30214 - DNA, 2037 bp, Cannabis sativa
  modified_base (374)..(374): a, c, t, g, unknown or other
tatgactgatgagaagttgaaaaaaagtgacaataacaagaacaagaataaagtgattgagaaagatcaacataaagaagaagatgaaactatgagaacccttcaaagggtttagattattttagttatgtatatctattttgcataaatatgatctaattttggatacaaatataggggtatgattttgttctgtgatgtaatttcacggaatatattccgtggtacattagatggggtctcaggattcattaaatgagtgtcagggtacgattctactttttaaccctaattacccctagattaatctcagtcgtcagatcaaataactccctcatctaacggttgtcgtacatcacggattacaatccgtnaaagtacaataacaggacaaaatcatatccctacaaatatatattaatattattggtcaatatcaagaagattgtgataagtactacttgtcttgactattcccatttaacaaacttttcttatcacatgatttgttgatgtgtgataacatggattgtttgaatgaactccaaggaataattatcaaaggtttgaactttattgtaattatgaaagaatagtaagaatctttgctttatagtattcatttacatcatagtatttgcaaataattagttttcaatttgtaataataaaaataaaaataacaacaataatccttcatttaaaagaagtttatctccaccaaataacacctcaaagttgaagtaacattacaaatttgcagatttttataataattattaaactaaaatatgtaaaatttaatccttaattataacaataataatataatactttacattagatggtggtattagatagcatttttcaaatttgacgcatatatttttaagtaattcaatattatgcccttaaaaaacttatttcgatacatatatattttggtatattaaatagttttttagtctatttctttttataattatgcttattgtagttatttaaaattatctgtaatatttatattgccaaaaaataagtttaaatatattattacgtgcgtgatattttttaaacgcgtggtgaatactgaatgactatttgaactttatttttgatattgtaaactatttaatttttaaaaaaaatttacaactattttagataactataacgtacacgatcataaaaaaaaaaattagactaaaagattctcctcttctgcatgctgaatcagattaagagttaccaaaatggtctttttaagggtgtatcataaatatttctatttttttttaaaaaaaatatgctaaatatatatttattttattttttaattttagtgctaaattatctgatttttctttaattttcaagtgcctataaatcctaggtaaatacttttttggacttgtgttctgtaaaggttattaattagatattctgtttggtaaatgataaattagatcatgtattttctaaactggtataacatagtaccttaaactaatttttttattaaaataaaagttaataataacttgatctcaaggttggcctgagttgaaataagtctaaaaaaataaaaataaatattttggactcttattataatttataagaataaatagtacttttaaaagatatttttttatttagacgacctaccccggtttagcctaggtccaatcatgctgcatacaaaattgggtttatttttgggattatttcacaaatacacaaaaacagcagaaaaattacaaaattacggtttcacagaattttaaacatttttacgatttttttgattttatttacagataatacaatctttttatattgtacccttgttagtttgttgctgattttttgttgtactttttttgttatttttatgaaaaattgtaaaaatgtaaaaaaaaataaagaaaagatatttatgtaattattccctttattttttttttcacatgttgattctaaaataaatataaattcttcttttgaaaaaataagcaaagtagaagttccctctgg

SEQ ID NO: 30215 - DNA, 1327 bp, Cannabis sativa
aaaattaacactaaattatagtaaaatagacagcaatgacgataattgacaacgctgctttataatgaatcaactgtgccgccacgcggcaaaagtaacagtccgtcgctagtccaaccaatcaaacatagccacgtcatttgtaacctcaactacttgcccacctactggccccatatctctcctcaacttctcatatcgtacggttactttagctaattagccacctccaacatagtccattctgtacacccacgcatccttccacagtcccctcccaaatcaactttttttctttattattatttattatttatatataataaataggatttttacgcccacaatcatcatatatatgtaggattttgtgtcttaaattattgtttttttaaaaaaaaaaatcactttaaactataaaaataattatcttcaaaaacaactataaaagtaattataatttttctcttttgttgcatctctttttgagataatctatagatgttaccacagactacgggatatgaataaagtagaagagtttatttaaataagagatattagttgcaaattacttgtgttctagatttcttaacacttgactaactgaatcctccttttttttttgaggtaaaattatttaaatttttttttctattacttatttacttatttcgtctaaaagattatattaaatgtcacggtaaacatgtcatagtgtacacaaatatacacatgacaactaaaaatttatcacatgtacatttgtgtacactgtagcatgtccaccgtgtggcacttaacatagtgttttaaacagaatgagtaaatagttaacagattgaaagtttgagtaattttgccactaaaatatcaattcaggtatttaattattaaaaaatataaagtataaatgattttaccactaatatccctttaaataatttatgctaattggctacaacttagaatattaatactatttatttaattattttttatttggactcttaaattactataaattagtcttacatcaagaaattgtttgcaaacatgaaaaaaatgcaatagaataagcaaatttgtaattattttcaaagttcggagaaatatttttcaaaaaaattaaaaactaattcataggataaaattctatgagaatcataattgaaaggcaaaaatcttattttttttaatgagtattgctattaggatttatgatgctcaccaatagtcaagctatatcaaaatcagttcaagattctatttatactattttaaaaagagaaatttgattttctatacttaaaaaaccttaatattt

SEQ ID NO: 30216 - DNA, 2338 bp, Cannabis sativa
ataataataataataataaattacgtcaagtataggagaagaaatttatacttttaacttttaagaaattaagtctttgtaatagttcttctcacttgtttattagttgtatttttactaatattagtagatcttgtaattttgtcgcttataatatagtcaaatgagcatttgttcatcagaggtttagtgttattccgttatcaaccatttctacaaacttaatatgcaatgacagagaagtctaattattcttatttattataaaattgattttcttaaaaaaaaaaaaaaaaaaacttttaagaatacatggactatagtctataaggcatgttgacttgctaagtctatgctagctttttaggtatcactttccaagtcttcttctaaatatataatagataaataaaagaaacaacaacaaaagaaaagcatgtgaatatgtaccccacttaaaaacatttaacttaggttcttcaatattcaaatacaatttagagaaatgttaaaaggtaacatctttttatatatcaatattgttattggtccaattaaatattgagtttatatagtttaatataataaattttaataaatatcgttaactaatcgcaacttgacatattgaaaaaatgttaggcatcgttggtgcctaataacaatactttaccaatgaaccaaccaaacctgaatacttcagtccaaagcagacccctacacactacccagcccaaaactaaatccctataaaagtagacccctttgcacaaaccaggaaaaaacccaaacatcattaaaaaaccaacttctacaaatacaaacttgccgtaattatgagaatcgtcatcttctccccgcaccttcgacattccagtggaggcgtggtcttccctgtttgtcatcgtacgtcggcattccagtaaagtatttttaggttgctaaatcgacaatgaaaagaagatcaactgagtaaattagttagggagggtttatttaatttttttcaagtttaatctttttaagtgattataaaattttaattatatttagatttaattaatttatttgtttgggcaaattaatttttatttctaataaaattacacctaaaccaaaatcatgacacataagcaaataaataacttgagaatgccacatatatatatgcacataacggagagatgagcagaatattaaatttgcaaacaaaaccaaatttaatggaagttttacaattaaaaacaaaataaaatggggttaattgtataaaaagataaatataagaggtttttgtcaccaattactctatataaaattgtaaaaatgtaaaatgtacaagcaataatgcagggaaaaaataatagaaattttgcattttttttctctattctgcaatgcaacatctaaataaaactgtcactgtaaacccaaaactttttgttttccactgtcagttatagtatatagccgtaaagtataggcatctgtgaaaaaccataccaattacctagtattgtcgatggtttttgagtatcgagaaaaaaatttactgacatttttctaccgacgccaattctactaagttttgtaaaagtcgaatatgcatcggtcttagagacggccaaggatactatacccgactgttaaaaaaatttaagaaattctaattttttagtagtgtatcttatattagtccttgtatactttattgcaatatagagttttttaatttctttgttatatcttccgtacgttgttgtaaaaatttctaagaaatgctagatcaacaatcttttatttcagacaatattttaagtacgttgtagtatagtgcatgtcataggaagacacactagatcgatacacacatacactgcagcacaaaataaaaagccctttgaaaacttataaaatacacaacaccatgtatgtatatacatgcatatatataaaatatgcatgtacatatacatatatgtttttattcatgaatatatatatatatatagctactaattaattttggacttcatcatggttggcatcccttgctgtatctaggattgcatggcttttttttaggttggcagggtttgagcccacatggtccgacaggtttattaggttttccagcaccaatggtcaccttaggcttaggatcagatatttggacttgtggaatttcagttgtaccatcatcatggcaattaattctcctgtgtttgtcgcatttaggtttaggatcattacagtagggagaaccaggtttggttttgccacatggcggttttaaaggcctcccactgtcaccatcggttcctttgcttattggctg

SEQ ID NO: 30217 - DNA, 1960 bp, Cannabis sativa
cacccgccgttggttcatcatcagagagagagaggggacaacagcatcttcactgggggctgcacgagcgcgcttgagcatgctcctaatagaatcccccacctgagtggactgtcgagtgaaatgcttcctggtgccaacagaggaagtaggagaagactggggggaaggttcattaatgaccagcccaataggcctagtgcgaggggacctggaagtgtgcaaagcaatatcttttcctttggcagtgtgggtgacagtggaggtagtcatgattgggggtggaatggtggagggtaaattctgggaaggggggaaatagggatagcagtagtggtagtggtgatggtggtagtacggggtggggagtgtacacgcagaaactggttcacagcgtgctggaggctgtggtcaggcgaagaaggacgaggaaaaagttcctcaaaaggagtagcgttggatatttcgaagggattcttttttatgtgcgattgtgccgaagctcgaagagtgtcacagtattctaaaatgggaggagaggggaagttttcacaacgaagaagataatgggaacatcgattgtaagtgtgatccataaggccacaaaagtagcagaatttgggaagactctcgtacttaaaacttatccatttgggttcatgaatggaccgatatcggattgtcatgcccctacgcagaggcctagtgatatcaagaagaacacgtatcctaagaaatggaccagagttctcaagaagtgagagaggatatatttcaataagatcacccaattcatccgctatgaattgagccagctgagggcttctacggccaaaagggatgtggtgtgcttgaatccagaagggagtgtatctgatactttcaggggtgggggtgggtgagacatcaggatgagtgaaaacaatgagaaacttatcaaaatgccaaggttgttcttccaggacacgacggcgatccccatcacattggaaagtagccaaaaagaggccagaatggtattcagtgatttgggcagggaaacgaagagtccaggcctcagacatggccttctcgatccatgcgggcttagcagttctaggagatagaagtttgaaaatgaggcagaaggagttggggtcagaggaagaagagagtgagatgtggtcgaagtcgtggatgagactttcttcttcagagagaggagtgagaatgttagggttggtggaggaggaagccattgaaggagtagtaaaggttagggctaagatgatgagtaggggaggaatggatgtcaatcgagccaaacacagaaagattaaatagacagaggaaaggagagaagggtgtagaagatacctggagggagaaggacgcgtcaagggaagagagaagctctgaatcatcgcttcgattcctggaacggctatctgcaaaggcggaggaggaatgatgacccaggagtaaatgtttgaggcgacggataagatggttttggttgatttaggagacttgagaaagaagtagaggagaggaagggtctgagcaaacattaaatgcccaaaagagggtgccgtcaaaattaaatgcaactggaaaagagaaaatgcattaaatatgtactgagcacgaaaaattcgggggctatttgcaatgattaaggttgacatggagaatttaatgcagaaaaactgaaagggaagaaaaaatttgggggtcgtgaggagaaacgaagcagaaatgctcgcttactgtaccagagacgaacctggacaaaacttcaagaagaagaactaccaacataaagtttaggtagggttgttgttgaagaactcatattatgtctgttatatatatatatattaatctttgtattaattcttaatttttctattgaaaatccaataaatcttaaaaaaataatatttaaaattctttctttaaaaaattaagttcacttaaa

SEQ ID NO: 30218 - DNA, 2645 bp, Cannabis sativa
  modified_base (1010)..(1019): a, c, t, g, unknown or other
  modified_base (2196)..(2197): a, c, t, g, unknown or other
ttgtagcatttcttcctgtcgacgtatcgggtgtaggtacgggcgtcaatgacatatgataagtaccgggcgtaggtacgagatcgtctgattagacgatgcgatattgtggcagaggctcacctgattaggtggtgcaatgatattatatatgatattacattaggacatggacttgcctgattaggcaatgtaaatatatgagcatatctatttctatgcatatgactggttatattacttactgttgaatgttatagtttaatcattttgtgataatgaaatatataatcagctatttagtgtatcctactttatcacttttcttgttgagtctatgtgactcacgggtgctctgtggtgcaggtaagggcaagacaaagttagaacaaccatgagatggcggtcttctccaacaatgtacatattgaccccaccagtgtgcgtgttgagttgccaggagttgttttacactggctgtgtctgttgtattttgaattgttattgtatatcgtcttttggataaatcttttataacagtgatccccgaaacacctttttgctgccgttataatgtccgtttttagtgttttattttggttaagtttttattatcctcaaagtttttaataattaattaatatattagtattaaactagtttataaaattatacacgtggcgtccctatagaatagggcgttacagagttgactaaaagatggaaaattaaaggacaaatcaagtgaatgtaagactaatgagaaagtgagcataggtgtaggaacaaaagtatcagatccaagaatagaagatgttgatccatcagctaagctaacaatagaagtggaactatgagactgaaaaactggaaaagagattggaattacctgtcatatgatttggggcaccagaattaatgatccatttcgaggatttggaaagcaggcatacattaaagttacctgaatcaacaattaaaatggaagaagaagatgaagacttaagtgnnnnnnnnnnccttgagaacttggcaaattcatcaacagaaataaggatcgatttgtgagatgcatcactagtgcttgcaatattagcagagtgttgttgtcgatttttgaattgtaacttcctacactcaaacttggtgtgacttggtttcttacaatagttgcacatgatgctcctagaatttggtgcttgattatgaggtccttgttaggttatttttagtattaattttagattaagtttagtatatttttaatttagttttaatcgtgtttggagcattttcacgcttgttatctttatttttgcagatttcaaatagaagaatattagaaaatatctaaggaataagataaaaaaaagagaaaaatatctcacaaaaagatgatatttaaaatagagaaaattatgcaataaaataaagctgaaacatcatgcctaaatttgactatcttctgattagattttggaaaacatcaaaacaaaaagttctagatcgctcttttatctttctggaacatcttcaatcatccaattctgagcaatatcgagagagttatggccaaaatactatcagtcaacgcaacagaaaaattactgtcgaactccaacacgggtcgcggcccagctttagcatgccgcggcccgcccccctaaacaacacaaaaatcgtatttttctctcacgtgggtgttggtggtttcctaattcgaataggcatttaacatgtgcatttttatatctttttagtcgttgaaagcctatataaagggtgaactggagttgatttcagtcaagcaattttagagggaaaaggagtacgagtttcagagacagaagtcagtactggaggcattctgcagagggttttcagaattattttattctctatcttcttgtctttcttaaagttaatatgtgtgattttgcttctatgaacatgtgtagctaaacacttgattagggttagatggatgttgtttgacattactttatggtttcaatatgatttattttccccttaattcctatgtattctatttcatccatgcttaattacttttaattgcctggccatcaattaactattttatgatttcgatgcgagatctgagaagtgagtgtcaattatgctatagtgaaattgaactaaatttcgatataggacgagagtacctgtatggtnnagatagcttatagggtttttgtgtttaatgcctgttgcatgttaaatttataacgagagtagaaagtttgcatgtgattgagatttatatatctgagaagactacaaattatcttagtaaacctgctattgcataaaaattgatagtaggaagataatcatattaagccatattcagtagatacaattgaaatcgaagccctagtttttattaactgttaatttccttaaattgtttctccaatcactatttttattattttttctatttttaacatattcataatttttatttaaccaaatagaagtaaaagtttaattttaacataactactgttatccaaattctgatgtggcatcacacgatggtgacacgtggaatcaactccaggtatctgctcgcaagatacaggccgaacaggatacctcatatgcatgctcaagacgaa

SEQ ID NO: 30219 - DNA, 1654 bp, Cannabis sativa
gaacaaagtccaaatctagtcaggaacatctggccagaaaaagtgttccctatcgagtataccctttgacttagcttgagaggatgtcaaggacaatgctcgtgatcaaggaggtatgtttattgaaattcttgttgatcaaaatttttaattgggcgaagaggtggcccttatcaagccccctctgtcccaatgaatgttatttcctagaactgttggggtgtcgaattaaggctaccaaatttccaagctttggtggcttaggccaaaaaacacaaagttgattgtttatttctgatggaaactaagggacattaatagcttctttctctattttatggcacccacatagttgacgattttgtgaaccaataaaaaaaagtttttcagtcgatttgcacattttgtagtagtgaaatatattctatcttttttcctattgtttatatctaggctttgaactctaattcctacaaccatttggacaaactttacaaaactcttcacattggaacttcaatttcccataaagttcaaactcttgacaagcacttagagctaagatatatatatagatatatatatacatatccttcctcaatttgctattattgcatcttcaaatccatttcaacaacccttttaatcgaaattggtttgaaccaattccaattcaatgaatactttttaatttttttttttaaattattattattactatttatttagatacacgattcttcattgaaattaggcactccaatgaagattctctatcctcatcccagtcgtcggggaatgccctagggcaagggtgagcatagagtcacaagcttcatcataattttcaacctaagaatcaacatactttatttaacaaaatacaaacatataatttaatataatgaaagaactaaattcataatatatataatacataccaattatatcaatggtagtccggccattggtgaacctaccggttggactaatagcataattagcattaggattagagaagtcaatctcataaggtttgtaattagccttactcaatgttggaagcttgttgttatttccattatcagataaagaatcaccaaatatgtataagcatggtacttgtggttgtgaatctccattaacaccataattatgatcatgtaacaatatgatcatcatcaataccaccataactaatttcatcacttgatcttaattttcatactatgtgcttaatttatagataggtcatgataatgtatatatatatatatatacctaaattaattaatcaaattaaacaataactcaaaaattgtgactattgaaaattaattactcaattagtattggtacactcttttaaagtcaaatggtctataaatgtaagcttaattaattagtcttgtctagagttttattataactactcaatagcttggatatgcttctagatgttgggaaacaatggagtgtgaatttttattgaagaaaaaaaaattatatacttaattggtattaataagtacagtcaaaattattttaaaaaaatcaatcaattttgtggggtgcctcaaatgtttaaaaatatttgtggatattattattttgactaacataatacactttacatgtaataaatataaaagtg

SEQ ID NO: 30220 - DNA, 2620 bp, Cannabis sativa
ttcgataaaagatgatgggggcccaataatgtatccaacatttatacttttgtattaaatttttatatgtccgatagtgggttcgatagaggacgattgttgttttatagtgttgtagcattttttatttttcaaaatatgcatgtaggtccgataaagggcgattgtggctcgatagtgggatcgatagttattgcatttcttatttatttttatatttgtgtgtctgatactggtctaatatgggcccaatattgagccaatattttgctgcagaatttctaacttgtatgttcttgtatttttttttttcataattcaagactaccacaccttataattctagtcttagagcattacacaggtcgtgtcactcggcgtggcggaagttattactatccgaggattaaggcaaaatttgaggaatttcaatcatgggttatggtgaaggaatcccctttcaaaaaattcttcgaaagaaagccttaaactttttaggggtattaatcaatcagttattcatgcgtaagatcaaatccgagaagctagatgaggtacacttttatttcgcgaagaagagatgcatatttagttgggtcgagtttgcattagtgacggggttgaacttgttacccgagcctactgcataagaaattgaagggaaaggaagttcaaactggttgattgtggagtatttcaacggtgatccatccatcagctttggccaactacacaaagtttttgagagttgcacaaaagtagatgatgtctacaagttggggatggccttgtttgttatggacatactcgctggtaaggaggagaagacaatcgtttctctttttgtgataagaatagttgacaaccttgaattcttctacgagtatccatggggaaagatttccttcaacaagttgatggaaacttgtaagaaaaactttatagacgtgaagaatcggatgcataagaagattgagaacggagtttctcagaaggaggcaaaatactcatcatacagatatactgcagtgtttgcaatattgggcctatgaggccatcttagagctaagtaatgcatatgcagttaggatgttgcatcgcttttcaaaaattgtcaactgggaaaataaggagaataccatactcggtaagaacgaagttataagattgtttgctaaaaatataagttttttatgctttgtgtttagtcatatttatttcattttaatttccatctaataatatatttgtttttattttcagttgacagtgtactctttgttatgtctccagtaaatgaagaagagctcgtaaggaccatcatcggcggtgaggggcctttatttgttgacttggaggaactattgttgggtgacgatgggcaaccaactcaggatgctttgcgcaaccaggcccagaagcttacctcaacattggaagaggaaacagatgcaactctaatctttatagacagtacaccacctgcaccatctccaccaccagaggatcctcatgttgccccatcagcatctattcccaacacctcaaaggctcgggaaccagtatactttgccattttggcaaggttggagactatagagagggagcagattgctttgagacaaggccagactgctcttttaaaagggcaaacaaagattatgggttacctgaagaccctaatgggactgatagaagatcagagaagaccaaattcagaggtagagccacaacaagagctccaatctcttgaaaatgaaatcatttatctgaatgattatagactagatgatcctgatgatgtattgtgtgaacctgaccatatgaagattaccagcattagatatactcaagattttgagatacaaatattggaaacaactctagaaccagtggagaataggagaaagagaaaacaacgtaggtggtttgatgagtacactgaaatgaagaagaaatccaaggcatcaaagaaaaatgtgaatgcggacccacttagggtcgttgatcggaagttgctttcgtctatccaaagttgggttctcagtcaaattgggaacaagtatccgagggagtgctaaactggtagacacgatgcgacttggttcctccaactacatactccagggctattgcttggagacgatgtaagtttttatgacttctaatgcttttggtttttaagactttttctatctttttttatttaatctccgacagattttgttttcatgttttagcatttagatgcggcatttcacttgatgaataggcaacaacacgtttttcgaaggtgtacccaaatacgtgtgtggtaatgcctaaaattttctcatcatgagttattacttggtgggaagttgcgggtaatgaccactctaactttgagtgggatgacaatatattgaatttgatttgaggggatgatgtccaatacttgaagagttggaagaataaagagataatatatatggccctcttcttcgatggcccaaagcattggataactgtggaggtaaacttcgatcgttggctgttgagtgtatttgactcgagtcttggatcgatttccgatgatgaattgaagatatacctagaagtgtgggaaaagttattgcca

SEQ ID NO: 30221 - DNA, 6247 bp, Cannabis sativa
ttgatggggatcaggcagccacggttcattcaagacagaaatagaagagccatttcccacattccatctaacccccgcactaaccagagacttagcttcccaaacacttcgccaaacaaaactaggattatttccaagaggggccgagagataagtaccagtaggaaaataacgagctttgaagatgcgagaaaccaaagaatcaggtcttgtaagaaaacgccaaccttgttttcctaaaagagccaaattgaaatccctgagatttcgaaaaccaagacctccaatgtttttactctggcacattctctcccaagacatccaaggtatgcctttattctcctttgaggaacttttccaccaaaatctagccatagagctttcaatgtctctactgatctccaaaggaagtaagaaaacattcattgcatagctgggaagcgcttgcgcaactgacttgattaatacctctttaccggctctggatagaactttggagtcccaaccttgaagttttttccttacacgatccttcaaaaatcccaatacagccgacttatttcgccccatggtactagggagccccaggtacatgcttctatcatcagcttgtggcatctgtaaaagagaattgatgtcttccctaacatggctcaaagtgttagtgctataaaaaatggatgacttccccaaattaactttctggccagaagcacactcaaattggtgaaggagatctctgattcgggaagaaaaaaatttaaaaaacttactacaattaaagatataaatttcataaaaaataaaaattattaaaatggggtgtctttaaacatttttggggtgtaaataaaatttcccttatttattttatagaacacttttaaaacttatttacttaaatacccccaaagaacgttaaaataaaaaatatacaacaaactcaaacttagccgactacaacaatcaaaacaaactcagaagaatggggtctcatggccgaagcagtagtaggaaggaaggttcttccaagtctcgacgacggagcagaagatctgacgactctgattccgaagagaactctctctccgacgattctgacacccgcgaatataagcgccggcacagtgatagtcgcggtaaaagcagccgtcggagccgcaacaggagcacgtcgcgcgggaaggattccgacgaatcttccggtagtgaggagagcgatggccgtggccgcaagaggaagaagaagtcttccagggcaattacggacgaagaaattgcggagtacttggccaagaaggcgcagaaaaaggtttgggaattgggtttctaggttttgtttttttacttcatggaatgattgggttttgtttaggttgttattgatggtttgtttattcatttcaaggcaatgaaagtggcgaagcagttgaaatcacacacggcttctgtttattcgaatgattcgaacccttttggtgattccaatctcaacgagcagtgagtttctaaataaattttattgctttggttattgaaattgagtttgtgtttctttggtaattactgcttcagtgagcactgtgttcctatcctaattaacttttttgtttgggcatttgttttgagtttgcttttagtgattccaaccttaatcataagcgttgtgtgcttagcctaaaacttcttacttttcatcattggattttgcattactttgctattttctttggtgattccaacctcaaactattggcaaaattgtgtggctttgtaaattgatttgtaatgcctaatctatgcagattcgtttggcggaagaagatcgagaaggacgttcatcaaggagtccccctcgatgaattttcccttaaagccgcaaaaaagaaacagagagaaaggatggtatgtatacttcacagtgcttttctgcttccttgtcactttcaattcttcttgcgggctgtgtcaaagctcatttgttttatagtttaaaccatcacgtttgaggtggattactggacgtcattattttgtagcctattgtggagagaatggaaatttttggaagcaaaagaaatatgaaatattctctgcgaatttatcatacaaatatctgatgaattttgagcttagctagtacagttatttttccctagtaaattttgttactcattatacattcactattttttcaaaaaaatgtctttcccaaatacatgtagttccttactcttgtatctgtttgttgttgacgttggcaacttggcattatatctcttacaaaaaaaattattttaatttcaaacttgaaatacaggcagatgtagagaaggtgaaaaagagaagggaagacagagctcttgaaaaagcacaacatgaggaagaaatggtgagtttactgccacatatatatctatttgtttctccagcttaggttatgttgacgaatgaattatggagtcttttccggtgtgaattatttttcttttctcagtttgatccaatttgttttataaactctaccttttttatacaggcattgttggccagagaacgtgctcgggctgaattccaggattgggaaaagaaagaagaagaggtatgatactggtttgctatcaaaagtgttcctccaccccctttttgttttccttgcttttatcattagaaaaggccttcaatatcttgttacgagactgttaactaatgaatgtacttgctcattatacagttccattttgatcaaagcaaaatcaggtctcagattagattgcgtgaaggtcgcataaagcctattgatattttgtccaagcatcttaatggctcagatgatactgatatagatttacgtgagccgtatttggttttcaaggtagaaatttcttgttagtatgctatctttgtattttttctaagaaaaatttcagcttgtgatattttctgaattcagttatagaactgtttttttttttttttttgagaaaaatcattacaatgggaatgagaacttaaaattagtatatttattagaagatttttcttttaatgaagtgaacatgctatgttttaaaatttttttaatactgtactatccgattcctattcaacaagtgaatcttttccttttgttaggtatccaattcttagtaatcctattttcattctgtaatttgattatctaaattcatctgcaagttaaactatgatatactcaacacgttttgaaatacattatgcagggcttgacagtaaaagacatggaagagcttcgtgatgacattaaaatgcatctggatttggacagaacaacaccaacacatatagagtattgggaggtattactttcacttttcctccttacaatagtattctttgtttttgttgtgtgtatactttctgttctagttgcatactaggttgatgtctttgtgaactgaaatgcaatttatatgattacacagaggttgatatgatcatatgaaaaacttactagcagagatgttggctgaaaaacgttactttggatttacatttcaattttcacttgtcctgataagtgcaattggacaggcacttcttgtcgtttgtgattgggagctaacagaagctaggaagagagatgcattggatcgagctagagtgcgtggcgaggagcctcctcctgagttgcttgcagaagacaggggtctgcattctagcattgaactagatgtgagaaaccaattggaaaaaaagagttatggtgaattggaggcattacagtctcatattgagtcagaaatgcgttctggtactgctaaagttgttgagtattgggaggctgttctaaaacgccttcatgtatacaaggccaaggtaattactaaattctttattttatttagcttcttaaaatatgaagctactgtgtttgttctcactgctggattgttacaaatgcaggcttgtttgaaggaaattcatgctaaaatgttgcgccaacatttgctacgccttgagcacccagcagatgatgaagaaaagttggaggctgatgagagtgagaaatctgaagaagagaaagaaagtgacgatgatattcatgtgaatttggatggtaccctcgcttttttgttgtcagtttgactttgttgtaatggtagtagtttgctaattttctatcttttatcatgaaggttatcaagcatattctcctgagcccataccggaagaaacacatgaagctaaagatgatgctggatcattttctccagaattatgtcacgctgatgaaaatgaggaagctattgatcctgaagtggacagggctataatggtattatacaaagtgcaatttgatttgactagcaagcatgtaattaaatcaatatttgttaaccgcatcattggtatcatcaataggaacggaagcgtattgcagtgagagaagagcagcaaaggaggattcaagaggcgattgcttcaaagccagctccaccagaagagaattttgagatgaaggccatgaaagccatgggaagtatggaggaaggcgatgctgtcttcggcactggtgcagaagtgaaccttgattcacaggtagaagatgagtccattctattcttcttttgtttcttttcttctttaaatacctatataatcaagctttccttgtcatatgatacaggtgtactggtggcatgacaagtaccggccaagaaagccgaaatacttcaaccgagttcatactggatatgaatggaacaaatacaatcagactcactacgatcatgataaccctcctccaaagattgtacaaggatacaagttcaacatattttacccagaccttgttgacaagacgaaggctcctaactacactatcgagaaggatgggaacaatagtgagacttgcattattcgcttccatgcaggaccaccttatgaagatattgtatgttttctcatcctaattcagacattttattttttcttcgtaatttacatatacatatgttttgatagttaatgctggtaaatctttctcaggctttccggattgtgaacaaagaatgggaatactctcacaagaaaggatttaaatgcacatttgaacgtgggattctgcacgtctacttcaacttcaaacgataccgatacagaaggtgaaaggtggctttgttatgttacaatggtgatgcttttgaagccactctcaaccaactttataggcaggttatgttttcatttgatacaattttgtgaataataaataatccccctttaatttatccgaccaaaattcatcttcagttatttttagtggagaatactttcaggtgttgttgtatactaagtacaatatggtagcttttttatcaaacttcattgtcttcttgtcttaacaactaatgatttgtagaagacatactatcaaccagttttgaattgagcagtatattaatttcagttggtaggcattcctttttgtagtcttgtaaagtaattataattattagtattattgttttgagatagtataacatgttagtgcttcatttttgttctagagctaactatatatatggaagttgtttcagctaaatatgtaaccattacatgattacattagttttagtgaatggattattatttgaacagttgcaattaatttaaaaattgactaagaataattagtaattacttttaacttgataataattaatatattatctataatctgatacttatgtattataatatggaagattttaaacggctacatggatcattattcgaataattgctatttatttaataatgaactaagaatattaataaactactgttaacttgataataattaatttattacttataatttgatacacatttatagtaaggatacttattttgtgggtagagatattttattatgccttattgattacctaagggtgataagagagtataaaatataatagtaaaagtggactttttacaaaattaatgtctcttcaaattttattaatattttaataattagttttctattactatttttttagtttatgcatctttttcactttctaatttagatttcttttaacttaaaattagaataataattttttttgaataaaaaaattagaataataataataattaataataataaagaattaaacattagttttgctttttctttttgaattgtcggtccaattttttcttttctttctttcaaatcaatttatatatatat

SEQ ID NO: 30222 - DNA, 1924 bp, Cannabis sativa
  modified_base (1869)..(1869): a, c, t, g, unknown or other
gtgttttaggttgtgtgttaaattctaagtttgtattttaattttattttgaagattgccattctaatataactgtatttttttggttttggtgttattgtgttttcagtttcgctacttctgacgacaactattataatgggaaggtatttttcaatatgacagggagttgtttgaagacgttatagctttattgtctaaatttctgggcgtagttttgtcccatgttgctcgcaatatgtattctgcaactcatggcttgacaaaatatgcccttcgattagataatgagctatcttagttcgaggagattccaccgccgattgtggtttgctgcattgttaatcatgtgtgactttgttcaccgcaccaaaaaaaaaatattaaggttttttaagcatagaaattcaaatttccctacatatattatgtcacgaatgacactctgaaaaaaatatatttataaatatatattacacattttcttgattatcgcacttttcatataaatatatacaattcttttgttctaatgtacatgtaatataatttagtgttatgattatctataaattgtgcacatgtactaattcttgtggtaaatcgagtacacatgaatattaatttctggcaagttacgattgggatatgcataaatcattaattgttttttttttcttcacactttgtgataattttggtagcatgacaattttaatttttttttagatttcatatattttccatggttatatctcacttttgaagatcttttgtagcttaaaaaaaagcctagatcaaagtggtccatgaaaaaaaatataagaaaaatattggattaattttagcagtataaaagtatgtaaaagtagaattttttcctttatgtcttggctatatcttacttttggagaccttttatggcttagaaagatctatggagaaaatccattagagaaaattctaagggaagagcaaagcaaaaaaaaacaaagatttttttacctatcacttactttgtagatattcttgaagatgacaattttgtgcacaaagccttctctctttcttgttttctctcctgtttcactcttacgtttaattccaaaactaccaaaaataattctttattatgctgcttctcttccctttttaaagagaccctttttctttttatttttttatgatttttatttttactaaccacccacttaacgtagaagtggtgagagtggagagaatatctcctaacttaactctcatcttgactgatcttttttttttattattgttatcatattattattattattatcactatgtaattataaatagtggcagacaagatcaaaaaaggggacaaaaaatctcagacaagagaggcctaaaaaaaaacacaatcaaaaatttgaataagattgactcgtggactatggagaattttaactacaaaaccacgtaaaaaaccttgtgttcatatattacttttctatagcttttatttattctgtgtgaaatcatcatcgtgaggcttaaatttagttaacggaaaatctgcgttaacaatttagtgctttcattaagagcctctgtgaaaaagctcaaaaaaggcctcctgacctaaaagtaattgatgacaccgaagataataatcctcaagaaggaatcagtcatcatcctgaaaaagaaccattgagtcctcagggatctattgagtcatcacatgaatagactacaagcccaagaaaacccagtattagggtccttggcttgacggaccttgggtaaacaacaatcggccacttcctaaccaggttgactgtagtttgtcatctttgtcaatactcctcaaatacagtcgaatcgtcntactccattccaaataattcaaaccaatcaacttatggtccgtgattttagacat

SEQ ID NO: 30223 - DNA, 3082 bp, Cannabis sativa
tggcttgtgagaaaaacacaagtgttggtgtgtttctacacctttggtcggccagtcttgttgaaggctgcccggtgcttggaagctagcactcttggtcagccagctataggtccggcaaagaccttgctggtagggtcatggattccattttgcttgtgtgcaccgtcctacataaaatctcagaggttgagaggctactcggcactaatcttggcaggttagtatttactttcttaaatatattttctttttttttgccatgtggagagccacattaggtggaaaaaattgggataatattttcccccaagtccctatctgaatgtctggtcgggtagggactttttgctctgtcttgtatagctgctctttaccgtgcaggtatgcacaaccaaatgttagcctcttctcactttttcattctttaagcttctgccattgttgagcttcaagcttttaaactcttgattctcatttcttaggattataatctatttaggactcaggccggtgctttggtttagttagagaccttgcccagtgcttagacctatccaaagctcttgcccagtacttagatccctttcaggaactttgtctggttcttctcagactgcacagttcttgtatggccctagccttatgcatttgaaccaacttttttgttcttgcatggctcttaggccttttgcatttgaacaaatgaccggcccgacaatcttttttttagttcttgtatggccttaaggccttttatttttgagcaaatggtcggtgaggctgtctttaatcttagctttatcttccttaggttctgaacatgtagttgattgggagcctttaattacaggtttatgcattttatgttcaccttgaagcatgccatttgcacatacttagctgttaatttctgactttggcgaagcttcaatttttttttttgcctaagtatatttgtgcttgttcgatgatgtgtgtgggtgtgtcccaagtatcgagtagacttatggtctcttagtcacttgcaattcaccaagtatatagatcatttgcatctgtattttcttgggagaaccattttacacacacgttgaactaaaaataagaattaactttaaaaagctaaattgttagcaagttatttaatacaatttgaactggagaaatattttttttattcattaattggtttaaaatatgtgttgttgctatgcaacatgtattttttgtgtaataaaagcttacaaatcaaagtctgcctttaaaaccacgttttggctactcctgcacggaataccggtgagacgttataagaaccactactgaagtagtgttttgtacaagtgggctactggtagtactttttgagatgttctccgttccaatatcttggtaggaaagccaattccatcttctcattgtaccggccaagtttgtaaacacctttgcttgtaatttctgtcatttggtacggtccttcctagttaggttcaaacactcttgctacaaaatctttagcattcaggaatactcttcacagtagtaagtctcctacaaagaatttcctctccttgacttgcttattgaagtacttaacaacttttttgcttataggaatgtagttttaagttggcttggtctcttctttcttctatttcatcaatggattttgctaacaaagtgtggtttgttccttggccataggttatcatcctgtgagacggtgatttcaattcaacgggcagcattgcttcatagccataggctaatgcaaagggtgtctgtctagtggctgtcttctcagtagtcctgtgtgaccaaagtacctctgggaggaggtcaggccaactgtcttttacctcttctagacactttttcatagtgtctttgagggtcttgtttatagcctctacatgcccattttcttgagggtgtgcaacttcggaaaagcttttaataatgtcgtgtctaatacagaagtcagtgaatatgttgttatcaaactaattcccattgttatatataatcttctgagagagtccgaaatgacatatgatgttcttgacaataaagtcgaggactttctttgaagttatagttgccaatggctcagcttctatccccttagtgaagtagtaaactgcgactacaacacattgtaccccctccttttcatttaagaagttgtccgatcaagtctctaccccatatagcaaaagggataaggaaattgcatttgtgcgagctcatttggtggacctcttgaaatcttttagaatctttggcacttgtcacatttcttaacatagtccattgaatcctcgatcatggtatgccaaaagtacccttatttgagtatcttttcggaaaggctttgcccccagcgtgatttccgtagaaaccttcatggacttcaattaatagtcgttcaacttcttccttggtgacacatctcagaagtggaatttagaagccacatctatacataaccccgtccaagatgaggtaccgggcaactttcctcctcatttttcttgcttcattcctatcctctagcagaactcttgttttaaggtacactgttattggtgtcgtccatataggactatcatccaacatgtctatttcttctaaaatagtgatgcttgaaatatcatcctatccatcacaaaaaaatagtgatgcttggatctttcgggaactaaatgggcaccatgttggccttgtctgtcaaggttctactagctaatctggcaagtgcatcggctattgcgttttcttctctgggaacttactaaatggtgccctgagctaacttaacaagtcttgaatcttgcttaagtaggccatcattctttctcctcaggcagtgttctcacctactaggacatggttaatgatcatcagctgagaagagttatatgttggggattattttatcaggatctagattgcaaacatgtataattttttaacatcctaaatatgaattctctaaaataatgtaataaaacacatataaagtttagaaaaccttacattggtgacagcggaataatatgtcttcttccactcagat

SEQ ID NO: 30224 - DNA, 1462 bp, Cannabis sativa
agtaaagcctaaatggaagtgagaattcagattttgttttatctcgacaacctttaccggcgcatttgacgaactgcgccggtaaaaatgccttttcttgtagtgtccccaactcaacaacacctccccacaattttttactttttcaatgactccaatcgaagtacctggctcccaacagtttttaacaatttcgaacaacaatggctctttaagccatgagttttcgaaacggaaaaaatgatttctagccaccacaacttgattaacagtattcaaaagtaaaggagtatggtcagaagtagaagcttctaagttaaaaagcttagctgaaggaaagaaatctaaccaagattgattcactaatgttctatcaatccgaacctccacccaattcgcagtagctctactacgctcccaagtaaaagggtaaccatataactcaagatcatggagcccacactcagccaaagtatcattgaaaccatcaattaaccatctcgggtaagaattgccacttctcttatcgtcattagaagtaacattattaaggtccattggggtgtaaatttaagcactcttgaaatgaattatattttatcaatgtaattactttttggtcctcaaagtcactcgagttagtgccaaaatgtcttagtcatatatagtagtacttactaaattgatttttacaagacatcaataattctaattaattcattattaaaaatatgtgctgattgattcaatttatttactaatataatgttattttagatattaaaaaaatggcataaaattaaagtgcatttttgaaaaatacaaactaattatattacatacatagtggttaagttcttcaaacaagatgcatacaaatcattaaataaataaaaaaaaaaatacaaggctaataataagtaaatatcgcacataacaaataaaaaaaaatctatatcattcatcatcgacccaaaagaaaaaaaaaacaccctaaagtagatattgaatgttctccaatagttctccaattctcgcaaaatctctgtcaatcatagatattatcaacgtgttagtattggtgctcggtaaccaactcatcacgatcacaaatgataaaattcttcaatgttctttttaatgataaagttctaaatattggagagtttttcgacaagcttgaggcaatggtatagacaataaacttgatgataagatattacttattgaaggaaaagactattgtattgatcttcttgattgatgccaaaatttttctcattcccacatcaacgtcttcttctgtgaggggttcaagagcagttatttgagagtggttcagtttggctcaacaacgtcttcagttttaaatttttgttttcatttattaatttactattattagtttaattccaattaatatttttatggggttagaattataaggagttcattccttaat

SEQ ID NO: 30225 - DNA, 1555 bp, Cannabis sativa
tgctcaatatgccatatcagcatatatatctcaaatactcacaagatcaagtaaaattagcttcattcatctctctcatatgtggtgggtaaaatcatatttgtctaaatataaatatcatgttaattaaatattatttttttctcttattcacataaaataacatatttttttacaaaaattatttcaatagtaggtaactctaaaaattattcaccatgatcccacataccattttttaattaaattttaaattatatatattctcttaaaaattaattagtgttaaagtaactttttttttaaataaataatatcacatgactattgctcattttagacaataatattcataaaattaatttaaaatattgatcaaagtgtacgtagcaaagactggcaaccccctattagagatgctctaagtaatcatatcctataggaaaaatgctaaaaggtactggtacttagcatcctcctcagtatcagtgtaattatgtatcagatttcatataatttaagctagtaatttttaagaaatatcgttaaccaattacaacgcgtcatctataaaaagcgctaggtactattggtgtccaatattaatactctatactatagctataaatatatttattttttttaaaaaaaaaaaattgtcatattgtctccaaacaaatgacaatatattttcagatttgaatcattaaatatatttttgtaattaagttggagtataatgtgactttatttggcagtttcttctctttacttttttatttttttttgacaaagttctctttactttctatttaatatatatatatatatatatttgatatttttattagaatgtaaaaaaaaaaaaaaaaagttacttaattattattagtaataaaatgataatttacgctatatttgggccaatatattattattttctataattagtatatttttcaaaaaatatatatatataaatcaatagcacttataagtgaaaatgtacatgtgtgagagttgaccatgaataggttttacccttatatacatacaacacataaataataatagtttttttatttgttgatgaatttactactactttgaaaccatgtaaaactagaaagtagatgcctttatttagggggctaaaattaaaaaactatgcactttttccatttgaaaggaaaatgaaaaggattacacataacaatagaagaacatatttgagagagaaaagtagtaagaaataaagacaatcccatgtggtttttgtgttctatgcttctttttttttttcatgctgacccacctgttttttcaataatcttttaaatcaatataaggtcatattcttgtatatatatcaatattacattcactataattataattgattaattatttggcaaaatgtccatatatatataatagtctcaactatttcataagggacaggaagttgtcagctctagaaactactacctttttaagtagtttcacttttcgatcaatctctacaacttttctacttataataattggaaaaaaa

SEQ ID NO: 30226 - DNA, 1663 bp, Cannabis sativa
agtgacttgagaatggtgcataccgagtgacttgagaagggtgcatgttgagtgacttgcatggtgaccatgctgagtgacctacatggtggccatgtcgagtgactcgcatgatgaccatgccgagtgacttgcatggtggccatgccgcgcgactcgcatagtaaccatgttgagtgaattagatggtggccatgccgagtgaccatgcatcactactcctccgaagcgactctcttggcacgttctcgttaatatctcaattgccaattaactaatttcagaggttagcagtgctaaattttgagattaacacttgcccctagtctgtaagaattcttttaagtgctcttgtggactggttattctagtattctctagattaattgtgagtctgtccattggcacaaactttaagaaagcacaaactatatatagggagcctccttcccttcaacttcacttcataatttcttccttggcctagtggtgaacttcaatccttctttccaagagattctaggtttgattccaacctcagtccttccttttgttaatttcttaaaaaaaaattttgtgggccgagtgacatttgaaatcactcatgtccgagtgacttagtgtaacgtcctattgcttaggcacgctatagtgactttctaattattgtgcactcatttgctaatcaaagagtttacttaaaaatcatatcaaatttaaactttttacttaaactttaaactttgcaaatatatatctaaaataaagttgggatcccatttctaaaatttaaaaacatattcaaaatacactttatagacgtcgcacatcgactacaaaaataaggcccaagtcatcccaagactaaactttctaggtcgaaccatcttgacatgtacaatcatccccgagctctggactcattggtgttccgccttagcctttcctttacctacacataaaaacaatatatgtgagtcgacggactcagtaagaaaagcatataacacattaccgacttgcatttaagcgctcatacacctatttataaggcttaacatatgatcaaaaatgttccgaatagaagtacgacctctgtaccacatgcactaagtactcgtcccgtattagtgttggtagggctaaaccataccccgagtaccattgagtgttgtaccacatgcattacatacttaatcgtactagtgttggtatcacaggtttgtaccctttgaacatcatatattgtaccaatgcactccataccgtaactgtactagtgttagtagtatatgaatcacataacatagcatgcaatttacatacatacacatatacatatacatgttttatactaatcttacttcattttcgaattcaagtgtgtcgattgacctgaatgaaaaatcacgcactgaacggaggccctatgtcacaatcacataaatggataaataacttgctaaaacattctcggagacctaaactaaaaactagaagttttcctattgatacctaccaagatattagaatggagagcaccttcgcaaatattattggtaaccaacttacagaacactactccaaagtagtagttctacctactcaacattagagtacaaaagagctagtacccacgacctttttggcatggtctcccacc

SEQ ID NO: 30227 - DNA, 2484 bp, Cannabis sativa
atatggttttagtacaaaaaaaattattataatcttttaatcaaaacagctttttctaaagttgggttggagcagcttcagcttttagctataatttttccaaaaattcttcaaaaagttaatttttgattgtttaccaaatacgtttttatcataactttttaaaaaagtaacttttagctttttcaaaaattatgctaaacgggcccaaaagtccaaagcacacaaagagacttatttaaaaataattataagaactatatatcttataagagttacatcctataccttattatttaggtgaaagagttacaccataaatcattctagatagatgacttacattttaatgagatgactcttacatcttagataggataatttattttgagtatgatgaatctcatataatctcggatgggatgaggatcacacatctttgatgggattaatcttacacatttctgatgcgatgactctcttacatctctgatatgatactcacacatttttgataaaattacttatctcaaataagatgacttatctcagagagaatgccatatatctcggataggatgacttatctcatatgaaatgactcaaacatctataatgagataactcacatttctcagataagataacgtatctcaaatgagataacttacatatctcggataggatgatttacacatatccaagacagattacttgcattgcattcaagatggaagatacatccaagacgaatgacttacgtccaagatggaagacatatacaagacagatgatttattggtttgagatttgaaaataattttatgtttttaaaaacttaaaaggtgggggtccacataagaatacttgattggtttggtattttcaaaaactaaatttgaatatgattttgagttttaagctaaaaaatgaaaaaaaataattttatgtttctatgttttcaaatcattgaatctaaaaattcttcaaatactctcttacttttttatattgagattctcaaccaatcacaaattcaactttttaaaactcaaaaacataaaattacactacaaccaatcacatttttaaaaataacttttcacatacaaaatttaaatctcaaaccaatcaatttttaaatctcaaaccacaatttttaaaaaacactcttttaaaaaataatacattttttttttccaaaatactcttttaaaaaacacaatttttaaatctcaaaccaatcaatatcctagatgggaaagttacacatcttaaataaaaaaagatataaaatattgacacctaagggaaaataagtgacacatgtcaaagtatgtaaaaacaccatatagagaataacagagtaaaattttgttaagttaacacttaaggataaagaaagaggagatctttgggctaagaaaatatcaagaatggacagaagtaaaaatttcccaaaaaatataaattgagtgagattggccaaaaatggtcaaaacattttgcatttgtgatctaaagttaatattaaggcgtaagttgaaaaataccacttttttaatcaacaaatcaaattttacctctaattttatatttaattaagacatatatctttttatatgtattgtacccaaaatatcctgatataagagagtcacatggagagtatcttgaagtgagaggggtaaaattggtacaatattttaaaaaagaagtaaaaatgatagactttaaaaaagagggtaaaaataaaagaggacaatataaaaagggtatagagcgtaattttctctaattttaatttgaaacaaattatatatattaatgactttatattaaggattttttatttttatttttttaatacttaagttttgtgttagtgcttttgaagccaattataaagaattcctctaagactcttaagttatataataatttctcaaaaaatattaaatttgattttttgttattttgttagttttgatattgtgagatatgattacaagttaccatacaaaagttagttaagttagttgattgttagctctaggacaatgttagttggttttagttagcctaggatcaactcctaagttattataaatatcctctcttaatttgtatctcaatttaatccatacagacaagtgagataagctatttttgtaaatgttctgttttgaattagcttctaatctttaaaatccgatctgattaataatgaagatgatagaggttgttgttcaaacgaaatgtagaacattacacatggctcgaattcgttaaatcttaatgtcatttgtttattattatgttattgtgatcatgaatttgtttgtgtgttagtgaatttcttgaagctcttaatttgattccatcacaacaaatattaataaaatgtgacttgaactcagaatcttttaaggtttgataccattagcataagattgtaatgaccataagataatatatatatat

SEQ ID NO: 30228 - DNA, 1842 bp, Cannabis sativa
ttccataacttgtaatgtaatgccccaaggtcacaaccgcctatctattttctctcgcaaagatcattgtatcaactgcaaatataaggtaagaaatgatcaagatgacacctctcgcaatattaatgcctttgatttccctatcatcatgagcatgttgtgacaaccttgataaattatcattacataaaaggaataagaagggtgagataggatcaccttgacgcaaaccttaagacggcttgcaacggttcaaaggcttaccattaaggagaattgcataagaagcactcgaaacacaggtcataatcagtctagaaaaatgctagtgaaatcatgtgcacggagaatagttttgagaaacttccattcgatcttgtcataagccttgcgcatatcaattttaatcgccatcaactcccctttgcttctattattcctaatcgtatccaccacctcttgagctaacagagtagcatctgcaatccatcttccaggtataaaagttgactgaaaaggggatacaatgttatccatgatccatctcaatctatacgacaaaatacagcatataataatcttatacgaaaaattacagaaacttatgggtcagaataaatccaccctatttgcattgttgaatttcaggataagagaaatgcaattgaaatttaagtccgggtccatctaatcaccttatcacccacaatgtcccaacatttcctaaagagcacacctgacataccatcggaccaaaggccttaaggggatgcatttgaaaaatatagcttgagatctaatacactgagggaataacatacagggagtcattctcttcctaggaaggagaaggaacaaccaatctaatttttgagttttataaacccaaagtgtatgttgcatcaatattcttagctacgctggataaaaacacagctttaaaacataataaaacatgaactttggttccccttccataaggcagaaaggatattggttgcaaatggatttataagctcaaggaaaatccatatggtagtataaataagtacaaagcatggctagttgcaaaggggcttctccaaacctatggctttgattttcatgagacttttaatcttgtggtcaaccacactacaatcagagttattcttataataaatctcaccaacaactgggttttacatcaactagacattactttcaagaaaaagtatatatgatccaaccaccaggttttgaagactcctccactccaaatttggtatgcaagttacataaatctctatatatgaattaagacaagctcctcaaacatagtatgacaaactaaacgctctactctctcataacttaggtttcataatgaaaaatcacattagtctctattcataagactcactaatcaacacattacttatgtcttagtctatttagatgatataattataacatggagttctctctctataattaccgttcttattcaatgcatatagtctcaattttctctcaatgatcttggaccactcatccatttctttggcatttataggttcattatattgatgatggaatcattctatcttaaaagaagtacattacagatatcctctgtcgtgccaagataaaattttccaatatcctttaacaacacccatgattggaggtgaaaaactttcagttgaaggcaatgatcccatactagtacgtaccataattatacaaaaaaacttggttggtgcacttcaatatgtctgcatcactagaccagagataactttaatttctctgtcaacaaagcctcccaattcaagaaaaataccttacaatcacattgga

SEQ ID NO: 30229 - DNA, 1840 bp, Cannabis sativa
  modified_base (1411)..(1447): a, c, t, g, unknown or other
tttttttttttttttttattgtttatttttttaaaacagtatttgttatagttgaaatatcattttaatttgtaagtttttaaaattttttgaataatttaaggtatcgaaaatagaattcttaatattttaagtctaccgtgttcaaaaatttcaaacctattcttagcactgtaaatcattcattttttttttttcaaaaatttacaggaatagatgtaaatgtaatgaataccaccatgaaaaaaaattgaaaaataaatattctaacctgtattttcgaacatgaaatttaattaagaggttataataagaaattaactgtaacacttttcttaactaactaaattaagttattttgaaatttaatttattattaacactaaacatataaattttagctataatgaaagtatatatataagggctttttttatttttacacttcaaaataatttttttttgcatttctacggaattatacataaaaacccctattgcaactagcgcagcaatctaaattgtaacaaaaaattgtacagaaacccctattgcaactagcggtgcaaccactttacaaacccaaaccgtaaattttaaaaaaaaaaaatttaaaaataatatataaagtaatttccctatatatatataaactcataatatttgtcaatattggttaggagctatatatcatggttaaacaatctaacttcttttctttatcaaataaataaataatctaacttgacgattgcacaatttatacaatacaagaagttattatttagtgacgagctagcacgtagtttagttacctttgtgttatcaaagtagttttattcacaacctattatataaagtcataaattttgttgtgatttaaaactcatatatgatatatgtatataatagtttgttgagattaatttacagctacattatattgtaaagtagattatatgtgtagatataccccaaataagataacataaaaaaatgtagagtttacaatacatatttttatgatgtacttaattgataatcatgccactaatttataaagggcagtgaaatgaaaattttaaataaaaggcaatttaataggtcaaaaggcattacaaatttaattataccaaaagcaagaagtgttctagggccagtttacacatacaaatttacctccaaaataattattatctttgctcaataatggctataaaaatatataaataaataaataaataaaatacaaaaagactataagactacatatatgatacttgactcaaattaatgataatgacaatattgtacattacatgtgctaccacatggtcatatgagtgctacccttattataaatatcatatatatatatatataaacatagataataataataataataatnnnnnnnnnnnnnnnnnnnnnnnnnnnnnnnnnnnnnataataataataataatgttttagctagcttttagggtaaaaaagataaaaaattactctaatgatcaaactttgagaatgagatgatgtagactacaatgcatgggtcatcccatgtgagtactatagatatataaatagagaaagagtagttcttctggttgtaccaatataaaagttacaatgttaggtccttttcattaaccatgtacatttagtaataattaaatttgtaattttctatcaaaaataaaaataaatacaaacacttctattgcctccgatatatttctgacaaagtaatggtttgtcataataatatttgcaaaaaagcatatataccctcatccacttgtttttttttttttttttatttctttttttctctttgat

SEQ ID NO: 30230 - DNA, 1537 bp, Cannabis sativa
  modified_base (1185)..(1187): a, c, t, g, unknown or other
  modified_base (1379)..(1385): a, c, t, g, unknown or other
attatcttgtatccaagttaattgaactctgtgactttaaaactagggacacatcatataaatatttccttatcttttttataagtatttctcgtttcaattgggatggtacggtataggaaatcagtagggtatacgagtatatatatagcgattctacccatatcctacgactctaccacagtacgcatatcctattttattagttagagtacatacaggtgttcccttgaggaggttaacttatcctattttattacacatatattggacaggtcttataaatatttatccgcaacaaacatttacaaaaatatctattgctctatccattcaaccttcctaaaagaccttcttcgacaaagacaactttcaaaaaccaaaccaacaggccaactgaaaagaaaccaagttagacggagaatcaccataaatttcagcgtcacctcagaagaagagtggaagaaatctaaacacatacaatttcacatttaagagaaatcatgtagaaaaattagttcgaaactaaaattcagccctgaattacaattaaaaccatagaaaattaatcctcttagtatcaatttttagatttataaaatatagatttgtctgaaatagatctgaagttcttgatcaattcaaatcaggtataaactgaagaaaaatgtacactagctaatgtttctctcgttgcattaacgttgttttctaaatttttaatagtgaatttattcatatcaaatcacgaataccaaagaaaaattgaattcttatagagccacgtacatagaaacgttgttctagtttttaagtttctgcgtagttgcattgcagttgcattaatattttactaatattttgaaactagacatatcaatgattacaaattgtcaacgatacaatagattttatgatatttgtaggtgtttcatatctacaatccaacacaaagctcttgaaaaaaagattataacatgttagttttatcaatatattcatttggttgttataaagttggtttataaaattctaattgttgtttctccacatattattatattaaggtacaattgattgttgatcagtgacaaaaaaaaaatactaataaatttttttatgacgatgtccattcaaattttttatttctagttgcatttaagttgtatattagttgaataatannngtgctactacaatattattattttaaaaaaatagggctagaaattggcaatacacgactcaaacagagaacactcgattgtggtaagttttgtttgtattatatatgggcattattagttgttttaaggtttaatattagttgcctcacaacaaatataactgtttgcattacagtttcatgacagttatcnnnnnnntgacttacaatgcttaaattttcaaactgtcaagaaaaagacgcaatttcatttcttatattttgcaatggacagtttgatcaaggtacgaattatgtaaattataaatttactggccaatacatttcaatagattgcaaatatgaagaact

SEQ ID NO: 30231 - DNA, 1691 bp, Cannabis sativa
aaaatatctctacattcaatagcattatcgtcgtattacaccttaccataatatcatgcacgaataagataaatacatggtagggtatatctaaattcaatgaccttattccgaatcataccccaccatgagtacccctcatttgtacctgagatattagcatacagcatacaacatacaatatataacataaaacgtacaaaatataccaaccacaatatacatcgactcatattgtgtctatatcacacattctcagtaccatgtacacattcataataattgtaatgcctgtattcgaaaaattgttaatcatattaatattattatattaaatttataaaacctcgttggtcgggctcctgtgttttaaaaccatagttaaaaattacttataccaagaatatagttacataatatatattttgtttttttacaaactacatgcagctaaaaaatataacccaaaatatagtaagaccgaaaccctccagaatgcactgccgcgatatgtacaatccttgctgagcccctacacactgctcctccagcttagctttactcttacctacacaaggtagcaaactgatgagtcgaccgactcagtaaaatatgcataaaaaatatataaacaatgcaagaccggttttatgcttaagtcgtcttgagcccaaatgctaagctcactaaatagttaagaacattctcaacagttggtgctactgaccatgatctcacccactaccaacactatgatcgcactgcgggactcataccatgttcgtaccgctatgatagcaccaatagcacccaaaagtacaattggtcatgatatcactcttaacatgtacggtacctgtattgccaaactgccacaatggttgtgccgctataatagcaccaactaatactttctggggtgaagatcactcttaaccagtacggtacctgtactttcgaaccgacacaataggtgtgccaatatgatatgacccaaaataaatacaatcacaaatacaccatgcatatataatatattttatgccaatcttacctcatttccatgctcaggtgtgccggttagcctgagtggaacaatagctcgacgctttagaggaccctaaaccaaaatattcgaaattctaatgagagacattctaagccacttcctagggacttaaaattaaaactataaatatccctatcgatggataacatgataataccctaaatatcacaaaaacgggaaaactagggttcaaagatttatcccaaccggcagaccagttccccaactagaacttcattcggtggggtttcttggggaccaatcgatcgaccaattcctacacgtccccctaaactggtcgaccggttcctataggtccccctaaactgtttgaccggttcagtgcaagaaaacccaaaaatatccccaacactccaattcaactctaaactttccaataacctccagaacatatgtatataacataatagaccaaattctagcaacaaacttaataataaattcagaatttcaaaacaacattaaaggaccacactagacttctcaagctccaatttaacacaaacgcctcaataatcaaccaataaagcttaaaacaacgcaaataaattcaatctaacaccagaactcaaaatcaaaacaaccctaaaatgcacagaaa

SEQ ID NO: 30232 - DNA, 4457 bp, Cannabis sativa
ctgtttttcttttaactttttccagaattccttcagtttctcttagttctatagcagttttttttcattcttcccatttctgttaaactttacttgttctttcccttgaaattttcctttgtccttgtatctttaacttttgctgtgatggatccacttctacataagatgaaatcaaaaattaacctcactgaagatgaggaatctgtttttgaattccatgatactgaagccactctcccacaagcatctaacgactctgttctatatgcaagaatcattaccaaaaagaaagtgtggttatcaactttgcaaaaacaaatggccgaacactgggatgggagattccctgtcaaaatatctgaatctctggatatgtttctgcttactttcggttgtgaaggggacaagattcgtgtattggatcgtgaaccctatcactttcagaatcatcacatagtcctatactctcctgaagttgggacaaactttacatctgaggatctgaaattcacacctttctgggtgcaagtataccgtctcccttttcttagcaagaccaaatctttggctattgcacttggtaacattattggggattataaagatgtttatgaagactctttaaacgaaggatggggtcccttcttgcgtatcagagtgctgttggatgtgtcgaaaccactaaagagaggaagaacgatttctctaagtcatgttaaggataagttttgggttgattttcgctatgagaggttacccgaatattgtatggaatgcggcgttattggtcatccgttcaacaagtgcgtggtttatcttgaacaattgaaccgtggtgaagaaccgaccttggaataccagccttttatcaagggatctgctttgccaacttcaaattatgatcgctacagaaccgactttgccaagggggatgcttggcctttgatcaccaggctggcaaaaagaagtttaacatctgcaatccctcagttaaacttgcgtgaacaacctcatcctcgcattctttatgctggagaatcctctgacaacaataataatgaagtccctggtattaatgttgaaaatactactgctgctagtatcatggtgccaaagtctatgaattcaccaataacatttaaaccatcttctctaaatccacctactatgttgaattcaatttctttgggtcagaattcgaaaaaattgccaaattcttttgtctctgctgaatctactaccaatttctcagatctgtcatctatctatatgcctgctactgctcatcatcctttgaatacgtttgccacataccccccctccactcattccattgacgttcttaatacggagtctttggtaacccctgctacaaagacactgaatgttgaagctgcaactgtaacttcaaatattgcagtctcgaaattggaaaaggagaattttaatccaaatgtgcagtccaaacggcaaaatgaaagtctttcactacgacaaacattaaagagatgccgaggaacaaccactactgacttcacttcaaccttgtcagttgaaaagaatgatcatcttcatgtttctaatgattttatggattcagatgatgaaattgacaattcagcggagactgttctgcagtcccgcaaacagccatgaagatcgtaagttggaatgctcgtggtttggggaacccgagtgctatccgaaaacttcgtttgcttgtcaaagagcaaacccccactgtacttttcattatggaaactaaattagcttgtaattctgttgtacgttttcgtagtcttttacatttcaataatggtttagaagttcctagagttggtcttagtggtggtttaatgttgttatggaaagatgatgttgatgtaacactaaacaatttcaatataaatgtttttgattgttatatggctttctcaaatggcccctcctggcactttacggctttttatggtgctccttcaattccaaaccgattgcatacctggacacttttgaagaggcttaaagatgttgctcctatgctcccttggatggttattggggatttcaatgaaatcctttatagccataataaaaaaggaggtaacttgagaaatgaatcccaaatggatgagttcagatcagttttggatacttgcaatttgaatgaattgccttttaagggagacccctttacttggactaaaggaaggcatcgagtggacacaattaaggagcgattggactggtgtttcactaatgatttgtggaactcttcttttcaacctttacaaacatcacatttggacttctactcttcagatcatcgagcaattgcagttaatgtgctaactcttgactcttctcagcatgcaccagcaaggagaacacggtttagatttgaaaaaatgtggctaaaagaagaagaagctgctgctattattcgaaccaattggtcttcggataacccaagggatattggagtttttttgcacaacctatccacatgtactgctgccttgcaaaactggcactctcacaaatttggaaggatgaaatctgagatttctcaactgcagaaaacaatttcaacactcaataatgcagcagaccagacgcctaataatgtgtttcagctcaaaaaatctgaagccattcttgacgagttacttgtgcaagaagaggaatattggcatcaacgtttaagagtggattggttgcaatgtggagatcaaaataccaagttcttccatgctcatgcctcttcaagaaaagctaaaaacaccatcaagtctctattgaatgatcatggaattatggtaaataacaaaaaggatatgactcaagtaatctgctcctactatgacaacttatttgctactgatggagtccagcaagattctcttcaagatgtgttgaacgctattccatccaccattacttcttcaatgaaccaagcacttaccgaacctttcactgctgctgaagttgtggctgcccttcaatctatgagtcctgataagagccccgggagtgatggaatgtctgcaatgttttatcagcaatattggaatatagttggcaattcagttactcaactggttctgggtgtccttaatgatgggaatgatatgtcactgcttaacaaatccattatcactttgattccaaaggttactaatccttctggaatgagtgattatcgaccaataagcttgtgcaatgttatttataagcttatatccaaggccattgtactcagatttcaaaaagtcctaccatttgtcatttcagaaacacaatcggctttcctctccaacagactaatcactgataatattcttgttgcttttgagctaatccatcaccttcggcataaaacacaaggcagagttggtttttcggcgctcaaattggatatgagtaaagcctttgacagggttgaatggcaattccttgaagctatgatgctcaaaatgggttttcactcacaatgggtgactcttatcatgaattgcatcactactagctctttctccttttctctaaatggagaagttgttggccatgtacaaccccatcgtggtcttcgtcaaggagatcctctctctccttacttgttccttatttgttctgaagggttttcaagacttttgcaatatgaggaatcggctgggaacttggaaggattgcgtttaactaggaatgcaccttcggtatcacatcttcttttcgctgatgacagtttgttattttgtagagctacagatcaatcagcaaccgcaattaaaaggatacttgatacataccataaggcttcgggtcaagctcttaataacaacaaatctgtgatgtctttctcaccaaacacatcacctgctgcccagaatttttttgctaacacattgcacatgccaatcactgaatgtcatgaacggtatttaggattgccttcttactcgggtagagataagcaagagttgttcagccatatcaaggaaaaggtttggaaacttctacatgcttggaatgaacaaattttctcagctggagggaaagaagtcctacttaaagcggtagtccaatctattcctacttatgccatgagttgctttaaacttacgaagaaattttgtagccaattggaaatgatggctaacttttggtggggcacaaatcaaaatggcactaagattcactggaaaaggtggaaggctttatgcaaatctaagcatgaaggaggtatggggtttagatcttttgtccactttaaccaagctctcttggcaaaacaggcttggagaatttttgatatgcctcattcattgttaagccggcttcttaagcacagatatttttccaataactcattcttggaagctcacattggccactctccttcatatacttggcaaagtatttgctgggggagagacctactggttaaaggtatg

SEQ ID NO: 30233 - DNA, 1201 bp, Cannabis sativa
attcaaatataacaacataaataattattttaagtattttaagtattttaaatttaaatttcttaacataaattacgaaatttgtggcattaatacctattttctttgacttgtttctaataaacacccgaatcttaaaatttgcagtaaaaatacctaaagcccaatttccttttttatgtaggttcatcttttaacaattttgttaattaattctgaaatggcacatatcattctctatctaaaatggagggagagagtaattaaaagaaattgttagttttatttttttttatgttaaatttaattttttaaatttatgtaattatttgtttatttaaatatattttaataatttttttaaagtagaccggttagaaaatgacacatgttattttaggagtaattaacacaaatatctatataatttttacctacataatttttatttttaaatatatatgtattattgtaaaataaataaagaatatcctgttaagtaataggatattctgttaaagttaaccaagaattttattacatagcgaatatataataggatattctgtaaaagttaacataggaaaccaaaaaatatcgttaaaccaaaaattgtgttacatagccacattttatataaaatagtatatgaatattatataatctagaaaattcatacataatactatttaaagatcagggtgcacgtactcttttatgtgtgtatataaatttatgttatcaatagagaatcaaatggaaatagtggaaaaataaaaagaaaataagtaacactctataatatacgataagaaatgaaacaaaaataaaagaaaggattaattgatacttagtccatttataagttctggcaattttggagatgttgttttgtagaaatgagagactcaaaactcttcattgtcaagtgtgttggaaatgagaaatgcaattgtaaattgaattcttctgacttcatagatcattgtatacgtgaacaactacacgaacgttcaaaacaacatcagattcggacaagaagaacccagcgtaccaagccatttgttgacttgggcggtagatcctttcaatagagctccggagattttattttttatactttcaaggattctaaacttgaggacagggtctcctcccccatttttgatcatgtgccggattcaatggtcgcatcgaattt

SEQ ID NO: 30234 - DNA, 2652 bp, Cannabis sativa
  modified_base (36)..(51): a, c, t, g, unknown or other
gcattccattggaatgccattccaatactttaaaannnnnnnnnnnnnnnnaatggaatgaaaattatttcctttccattccattccatttcattaccttcaaccaaacgccaccttagagtaattttaaaatattagtgtgatacatgtatttaaaggaatgtaaatgttgtaaatatttatttaagttatcaatgtagttttgaattatatgcttattatatagaatttaaataaatatatattaattactatgtataattgattaacacgctgttaaaaatgaaaaatgggttatcattttttttctttctttcatattactatttttaaaattatgttacgagctggaattttttttgaagaacaacttttttataacttttaaaggaagaaataatttaggggcccgactattttacgtagccctgggccccattttcccaagacacgaccatggtagaacgtcttcaattacaaattttgaaaatattgaagctaattaaaggcccgaaaaaccaaagttaaagacttttttttgtagtagctattgttctacatataatatcgacgaatggtcctactttattactagtattttatatcatttgtaatcgttattttccaacaaggttaaagtgctttgaccacaaattatatatattacttatctatcacgatctagggtttggctcgtgacaaccaatttttagtgctatattattatactagatttgtttttttttttttgaaaagcattattattactagactagatgtttaggtttttatgtattgtctcacttatgtgacaaattcggttagaaaccaggacagatttcattgtgtcatttgtatcgttctaaaaacaacagaaacacaacacgttaattcgctatatagcctacatctatatttcagacatgaggttttcaattcaataatatgaacaacttttaatgtatataaggtaatattttggttgtgattgtttttaattaagtgtttctggtatatagatcaaatgtgtacgactctattatattttacacatgatcctgtatttacaggtgatatctgagattaattacctattcaaattaattaagatttaaacagcagctaatcaacttaattactcgagcgtcttctccatactctccatacagctatttccagcgccccttataagaatataacatgatgaactctccaaattattgtaagttttaattatcgtaattgtgttgagaatttttcgtagtatatatatatgtgggtttagagaattcatcatggataaaattaagccatcatacgcatataaagatatatatatatattgtaagaatttcaagcttggatgaacatacataattggaaaaatctgtgagttacatataatggagttataggttatattttgttcgtactagtcaaattgtagcttactattcctcatgtaattattcaacaggctatatatcagcagcaagtagggtttttaatgttggggcttttttagttttacactttaaaatagttttttttttgcatttttacgaaattctacataaaatcccctattgcaactagcgctgcaacttaaaattgcaattagcgcgacaactaatttaaaaactcaaactgtaaattaaaaaaaaacagttaaaaaaacagtatatagaataattctcttttaattttcatttcatatatatatataaatcagttcaaatatgtaatagccacaaaaaaaccctataccctaaataataaaacgacaagaaagaaaaaacatgaaatttaattaacagtgaagagaaaggtgacgatatcattatccccacttgctcacttttctatagtgctatatatgcaacagacttactttctcgttcatcccattcaactttctctatttgtgtcgtcttttacttttacttatcacatatacctaataaagagataagaatcgatagtggaaaaagtagggttctaccaaagcatagatcatattgttcaaggaagatgatagtcgcttgttcatatattaaccaagtataatgcagtaaatatatgtcctatctctggtatgtattttgaacacagagagagagagagagagattactataaaaggtttagttgaaactgaggaattcatatcaattcttagagatatgtgggtaacacacgtacatactatcaaacttttatatattatatgaaaaatttccctgtttgcctgcaagaaacgggaaggatcattataattatcacatattattgtttgaggttttggaccaataattgatgcaagtttgtgacatatatcttctgcaaattaatatatatgaccaatcaaaaataaagaaaattaatgttattgggtattagtggtgcccagtaccttctatagctagtttcctagaattagttagcgatatttcctaaaagttatttttttaagttatatgagacctgatacttaattacatcagtaacgatatgacaacaaaaaggacgctaaatattagtggtgccttttagcaatggaaaatttgaatttgtatacttgcatttagttaaaatttatcctcaaaactcataatacccaatatttaaaatatatgaccacttttctattatg

SEQ ID NO: 30235 - DNA, 1508 bp, Cannabis sativa
  modified_base (1467)..(1469): a, c, t, g, unknown or other
gtcttcaatccagcatccggaggatatggctttgataatggatctggtgaattatcttagttgggccttaagtaattgagctgtaccgctttttaaattacacatgtcctcatccactgtatggatttggcattcttttttgcaagcttgccttaagtcgtagacgaaaaggatttaggccttggattttgaacatcttgcagaataggtgcatttgtgcacatattgtatgtagttttgattaggttctgtgaaattctacccttttccataaattttaattaaaatagctaaattttagcaacaggaatggctaaaactatctcctctgtttgggacccttatggttctcaatgatatatcataaattttaattaaaatagctaaatttgctggcaacagattgttctgcaggcaccgctggaaccatagcaaccagcacttgctgtggaggcactgcagaaggaccgtgctgtctcagcctcaaaatctcttcgttttgttggcaaatttgagcttgcatttctgcaaatctctgctcctaatccgaaggagcttgaggtgggttttcaatgtttaccaccttgaaacttccacgcctctaccgcatccacggggattcaagggattttaacctcaatgatcacctttgatttcgaccctattaccttgactccttgtattttgatgggcgtccatttaataggacttagcctgcgaacccataagtcaggcaggttagacaacaatcacataaactctatacagcacttatgaattttaaggcaatgcattaaaataaataattaaaaactattatgcttcctaacatgctcttctaatcacatacattataaataagtaaaggcttactgaaccgcgagtcgagcttttctttgacgatgattgtacatgtcttgatgatcttcggtagacaaacttggcgactctgataccaaaattgtaacaccctgatacttaggcacgctacagtgattttctaaataacgtgccaccttcgctaatcaaaggattttcctcaaaaatcatgacaaattaaaacttttgatttaaattattaaaatttataaacttatatatatttatctacgtaaactaggatcccgtatttaaacttttacaaacattatcgaaatacttttacaacttgtcttacaacaactacaaaatagaatccaagatgtcccgagaccgaacactccaggtcgcgctgtctcaacatgtacaatcaccatccaatctcggagctcactcctattcaacctttgcttttcctttacctacacatgaaaatagcaattgtaagtcaatagactcagtaagaaaagcatataacaatgatatattaccgacttatatctaggcgcccatacatctatccacaaggcttaatagttaagaaagaacgttctttactaaggtatgtctgttggaaatattttaccnnnatctagatttactaccaaatatgtttcattaacatccta

SEQ ID NO: 30236 - DNA, 2289 bp, Cannabis sativa
caccggcgcttatttttcaccggcgttattcctcgccggtaaaaggaagttttaccgacgcagttactatacgcgccggtaaaaagtcatttaccgaccaagcttcttagataatctttgccggcgcacaactaagccggcaaagctttgccggcgcagtcagggtacttttgccggcgcaacaatgcgccggcaaaagctggttttcttgtagtgaacataaaaaaacggcattacgagaaaattgcctgaaaaacgacaggccatccgtttttttcctaaagagtctccaaacaaccccaatttgatcccacacttcaaactaagctccagatcacttaataacatcacaatagactaattctaagtgatagaacttcaaaatatataaaaattcaaaaaccacaattacgagccaagtttgagttcttcaattcaaactttctcaacctcaataatcaacaatcaaaattcacttaaacaagtttaaaacaacttgaaataactccataatttaacccaagtaaccctaggttcgaatagaaccaaaattactatttttgcatgcttaaacttatttaaagtttacaaacttaataagaaaagtgtttagggctttactttagcttgaattactttaacaatagctaggaatcatcaagaattatgaagaaccctgattctttagagccaaaagagaagagagagaggaaaaagttgtgtaatctttttcttattctaataaaaataacctaaaaatgcttatcataatcctttaatccaaaatatactcatcttaataaaaataaaaagaaattatccacaattccataataagacaaagtgaacctcttggataatttccaaaattactcctaacttaccacttaagtaacccttaagtttaggagtaaaatagtctaaaaccacaatctcgcctagtccatatattccacatatcaacacatgaatatcctattaaaataatgattatagactaacctatgtgactctatcagcctttcgtcacatttttcatcgttaccaagcaaaaattataaaaatattaaatttcacatatagcataaataatacacttaaagtttaataaaatctccaaaattgagaagttataactctaatgccaattttctaaaaatgagacccacaacatacatattcatatataatcataaaataaaagtaattaatgctaattgccctactaatccatattctaatcatgcggtcattataccttatgtgcccaacataaccaatcttattgcggaatctaatggaaggggtgtgttcgttacaagtggggcatgaccttgtaccctttggtgctctccaaccagacatcaaatcatatgcagggaagtcattaatggtccacaaaattgcagtacacgttgtaaatacagtctcgctataagcatctcaagcctggacacttgtcttccataactctttcaattcatcaatcaatggtctcaagaaaatatccatgtctttcctaggtggtacaccttaaaataagtagagacaacatcaacgactccgctttcatgcactaccaaggaggtaagttatatgggactaagatcactgatcacatgatgtaagcgttgctcatgttaccaaacagattgaagacatcagtggccaaaccaatctcacatttctaggttcaagtgcaaaggatggatggcgcatgtcaaatagcttccactcttctgcatatctatctacaggatgcctaagcacgccgtcctctttgggtcacttagagtaatgccactgcatgtccttggttgaatgtcttaaacattataacctcttcagtcttggagttagggaaaagtaccacatcttttcaggcaaccttctttcggtatccctttctctttttttttcgaacgattttctccacaaacaggacataaatctttcttctcattatccttcaaaatcaaggcacatgatccttgcatacatcaattgaatcttaacctaaactaaggttacacaacttcatctttgactaataatgagacttgggtaattttgtgccctctaaaaataacttaatcaagatggatagtaacgttttgttgaaataactgaatagagataaaattttgtaaaaataacgggaataaattatgagttataatttcagttttacgcatctaactaagcgtaaatattatcagtacacactacaaatttaaaatggtatcgtttagcaatttttacttaaagagaaatttgtaatatttaata

SEQ ID NO: 30237 - DNA, 1838 bp, Cannabis sativa
ttttagataaagtggtcatatattttcaatgatgatatgtattagtttagaaataaaatattaagtatatgtaagtatagaaaatcaaatttcccctttatttatctataaaaaaaaaaaagtggtgcatgtaatttaatattttaaccttatttttagtatgttaaaattttataaattatcttaaataactacaagaatataattgtgaaaaaaattaaaacgaaaaaaattgtatgcaccataaaaattggttcaaaacaattttctaaatttaaataaattttataatttttaatttgaaattaattttttaaaaaatagttgttcacttgaaaaaaataataaaaaaaaatcatatcattgttatataattagttatcatattcatagttgagatttcaaagaaaaaaaaaattaactaccatatttttataaaaacgacaagtagattgtgaaggaataaaaacatttgaagatgaaacggtttgtcgttttaaataatttagttgccaggaagataataaaggagttctatcatatcctctgttatatcttctacttctctgttaaacccttcttctcataattgtgagccacaaaaccccgccaaaaaagccaccggaaaatacagtcagtccagtccaatccaccggtccgactacctccgccctgggtccccatttcttcttatccaatccaaatatgtctgttcactgagcttcttctacatactctgaaaaatggcgctaaagttccccatacaattccccattttctcgcctaccgcgaacccgaacccgaacccgtttctcaatccgcaccaccatcgctctccgtcggagcttcgcttcgccagatggaacaacgcaaacgccgagaggtttaacgagcaacgcaggtccctccaagatatcgaagacgatatccgccgagagcgtcgctttgattccgccaccaggattgccactgtttacgactccgcctccaccagaaccaccaacggcgacgacggtttcaaatccattggtacaccttcttacccgtcgactccttctatccctggtaagaagtccaagtactctaagaaccctaatcctcccaccgattcgcacccggcatttcgccgggcttcaaaatccgctagaaagatctcgaaagtgaccaaagagaagcccacaggcgatcgtgcagctcgtgttcaaattggtgaggatgggatgtcgtatgtgatcgacggagctccatttgagttcaagtacagttatacagagactccaaaggtgcagcctcttaagctccgggaggcgccttacgtgccgtttgggcccacgactatgcccaggccgtggaccggtcgtgccccattacctccgagcaagaagaagttgaaggaatttgattcctttcagctgccgccgccgcataagaagggagttaagccggtacaggcgcccggcccctacttaccggggtcggggccaaaatacgtgatgtcaagggaggagatattgggggaaccattgacacgggaggaaattaaggacttgattgatgggtgtctcagaaccaggaggcaattgaatatgggtatggaacttgaagaggaataagctgttttgtttagtttgattgtattactatttgtaatagtgaccatgaagcttatggtttctatgcattcaaattatgtgtctttttaggtagagatggcttgacacataacatgttggataatatacatgctctttggaagaggcggagagtttgcaagatcaaatgcaaaggagtgtgtacggtcgacatggacaatgttcgccagcagttagaggttggtt

SEQ ID NO: 30238 - DNA, 2034 bp, Cannabis sativa
taaaataatataacattcccaacccactagattaaacatataatatctcatttgtaattaagtggctttcaaaaatactatatgaatataaagaagagagcctctccagaacacttagatgtcgtttggtttgaggtgatgaaatagaatgtaatgaaaataaaacaatcttccttcattaatttgtttgattgcatattaaagtaataaaatatcattccaatgaaatgacctttcaaccattttggtagaatgactattctattttgaaatagaataaaacaccttccaatgcatgatgcggaaaagtttaatattttttatctaattttttatacaatttaaattttattctagtttattcttattaattcttatttttattcttatatttttattcctgccgctaccttaacgtttagaggtcccggagagtttgaattgctagaattttctctgcaattgatacaatgaaagaagcacaaaacaagttttcattccaaattctagtcccacgtaacatcaagtccctcaccttgaaatccaggcaatatcctggattttaatctattattattcaaaatatatagctcactaaaatctcaatttttatattttacttacacttctagattatatcatatcgtacattgttaagtaacaactcttttcaaaacatgacaaatctctcaaaatgaaccaaggttatacttctcattctacatcaattaacttctaggcaaatacatatttataggtatttcatattactaataaattactaataagcccttaatgtaacactctcaacccttccaaaacgcaatttcgggagatttgtaccgtttcttaatattagtcctttcattaagatctcgacactattttgtgcttacatgtcttgctttcatactaatatattcgtgcttttgaatttgctatgcatgtcgtgttgtgcttatattcatattttttgtgtcgtcctaggctcaaacctatattctttttgtgttataccatgcttaatctcatattttttaatgttgtatcatgctcataccacccaaactcgtaccagtttctgatcatgccaaaaaatatgattcgaatatgttagatctcgttcgtgcaacttgctagatcatcttactttaattttcacatcatagtattatattatccattttgagtctaagccttgatgattttattttttgacacctttttaaaatactttatattaataaagtaagtgaaatacttataattaagacaactcttacatattcttccaatcaatcgataccacttgggctgataccctaacacaatggattggaggaagttaattaatataaagttgcatgtgttaacatgagatgtgtaatgtatgtccaacacttgaattgttatttattttttttttttgatttaaacgtttatatattacaatcatgttttacctaggactcgaatccaggacctccaagacacacacacccacctatagctaagtggttaacacttgaattgttatagtttaaattaatgggtctcatttacatcagtgtgtttgtgaggaccacttaattaaaaacacttgaatgatgtcgtttagttatatagataatagattatagagagaggaactaaaaaactgaaataactataaatataatatattatatatatctgaaataaatatgtaactaactagctattgttgtgttgtctgaaaactcttacatatttctacttcatcataaatctatataactaatcttatataaacacccctctctctcaatatatattggcacccctctatattagaataatttgagttttcatacttaattttttttatctaattcattttttttttatttttacattatacgagctaaagttgttcaatcacctgaaaaaaattaaaaaaaaaaatcggttaaaaaataatttaaaaaattgagtttgatttaaatattttgtatataaacatattttgatatagtgtaaaaagagatattattt

SEQ ID NO: 30239 - DNA, 1330 bp, Cannabis sativa
taaatttttttaatttattttttaataagtacaccccactaattaaaattaaataatggttgttaatggaaaatctttcaaaaaaaaaaaataaaaaataaaaagaactaatcattaatggatactatactctaccctttgttgcaactaattatttaatatttacctattccatttggttttcctagtgcattattaatagattttactttcatacaaaaaatgaaaaaaaattcatacaactacaaatttcaatcacttccagattaattatccaatagagtatcatattagaactgatatctcgtaatattttaaccaaaaacctgatttgaatatttctattagtgcaaaaatgagatcaaaattaaagaagaagggaagcctaagaacaagaacgcaaatgtcactgatggtttttttttttttttaaataatgtaaaagaaaaattttagggtgtacaaacaacgtttggtaaagggagtgaggtgtggttataagaaaataattagtaaacaggtcgcagttcgcgtgcgtggtggtttataaaaaatttaaattacatattatgaataattgaacaattaaatcatatcaaataattttaaatatattttttaagtataatattaaaaataatgtatataaggaactttaaggttatatttgaaaagatttttgtgaagaaaaaaagttagaaaagtgtaggaaatatggtgaaaaaaaaaatcatatttagtatggaaagaaagattaaaaaacactcaattcaacaaaaattttcatatgaagtttaaaaaattgatttatttttttgttctctacacttttttttttggaaaatttgatttactatgcattatttacacccaaattaaaatattatacctaagtatactaaaattgggcaaatagttatagtttttcctaaaccccaaaatacccctcccacttttctcaaccctctctctctacctcctttctctctcaaatccaccctaaacccacgagcaaccccaccgtccaccgcccttttcccctacccacaatgtcctcctccgtcgaaccgcaccgcacgacgatcgtctacacccaccgcccctacccacgatgtcctcctccgccgcaccgcacccactgccgatcgacgaggaacaccacgaaaatcgaccgaacaccattgaacatcaccgacaccacgactaagaaaatcaaacccatctcgactgaaccaccaccacccaatgtcgacaaaggtaagatctcgtgtctttggattttttgaatttttgaattattgatttaggtttaaaatgcattttattgata

SEQ ID NO: 30240 - DNA, 1312 bp, Cannabis sativa
taacctcccaacagcctcttcatacttcaaaagtcgagaaagaccttccgagcagattagaaatagatatggtgagagtgggtccccttgacgaagacctcgttgtggcaaaactgagccagtaaccgtgccattaatgagaaaagagaatgtagttgttgtcaaacaattcataattagagttatccaacggatattgaatcccattttccccataacagcagccaagtaagaccattctactcgatcaaaagctttgctcatgtccaatttaagagcagcatatcctttagtacctcgcttcctatgtttgatgctatgtattagttcaaaagcaaccagtatattgtctgtgatttgtctttgaggaaggaaagcactttgcgtttcagagataacatgaggaaggacctccttcaatcttaaagccaagatcttcgaaatcaacttgtagataacattacataaacttataggtctgaaatccttcatagaaagtggcgtcttgatcttaggaattaaagtaattaaggttttgttgaaagagactggagatgcaccatgatttaaaacatccaataccaccttagtgaccaaatcccccacaatattccaattatgttgataaaacatggctgacattccatctaaccccggactgcgatcactacccatattcttcagagcttgaaaaacttcatccttagtaaattcttttagaagagattcattatggactgaagtgattgttgttggaatggtagataaaacatgtgaaagagcccaataatcttcttccccagcagtgaataaatcttggaaataagaggaaacaatatcagtgataccttgctttgatgaaactttgttaccctgatgatcatgcaaaaatttgatttggttgttggatttcctagctgaagctttcgcatgaaaaaacttagtgttccgatctccagatttaagccaatcaattctagagcgctgcttccaatattgctcttcagtggacaacaaatcatccaaaatggtttcagcagagagaatctgttgggtgaaatcatgacccattgctgcagaattattaagcatagtgacctgcttttgtgcttttttaatatcatgtttcatacgcccaaacttccttgtgtgccattgctgtaagttttcagcacaagtatttaaacatttaaccaacatttccgcggggtcacaagcagaatcaagctgccaacttgaaagaatgatatctgagcattcggcttctttcaaccaaatttcttcaaatcgaaaccgagatcttcttttttgc

SEQ ID NO: 30241 - DNA, 1480 bp, Cannabis sativa
atgctcggaacagacctattgtttaatggacgaaacactgagcctcaggccaaatgtcaacttgggtgcctagtgtggtgataggtggtgtttgggagctaaacaaccacttggatgatattttctcctaagtccaaggctcatatcttgttttgggagcaaaaaatgaataaagtttgagacaaattcgaaatcggatcagtggaactacatgttcgtgtataacacgtcaacttgggtgcctaacatctcatctgaggtccaaatggctttaattttcccaaaagcatttttatctttattgtggatgaaaataaggaaaatgcctgaaagacttctccataaagatgtgttagagtgccccagattaaaatacgtcaacctgggcgcccatagtggcctagggcatgcgctgggcgcccaggtgaaacatctttgaaatttgtgttctgatcaatcttctatttggtgaaaagtactccacgaatttcattttcatcaaatttgcacacacattactcgatgaaaaaaatcggtgcccaggttgaaatgtaaactttagtgcccatagttgggaatgggctctttcaggatgtctttgataaaatatcacattctaggattgttccttgataaatttaaggaattggggtccaagaatgtccccaaaaacctaaaccctggccgttgtatgcccaaatcgaataggtgcaacctgggcgcccttagggcttcatagtgcccgggtgtcgtacacctacctctaaagttttgaaacttagttagggccatttgtctcatgtatcctagggcaatggctatggaaatcacccataggaagttgccgggaaccaaaacttatgcaagatgacactcatgatgtcaacctgggcgcccaacgctagtattagacccagtttgagccctaggatgtccacatgacattctcagcttcatggttcatcgttttagggtcactaggacctatccacttaaactttatcgaaggataacacctaggaacgactttgttggatcttggtgcccctcagggcatcccttgatgtcaactaaggcaccaacacagttcccaatacccaagttgaacaccctatttttgagaggtagggcctaaggttattttcttcttgccacgtgtcaaaaatagtgttcatgtcattgggtcaaatttctgagtaaacgcataagtattaaaatgaggggtaataaaagacttaaataaaaattttaattattttaagagtactaaagtgggtaatttttataaataaatagtatcaattaatcattatccaaaataaaagatatcaaatttgtattttagcaaaataaataataaataagtatttacttttgtcttatataataaaataattaacaataagttattattttttatataatttaatgaaaacatcaaattgtacaattgtatgcacattgataaaatttgatacaa

SEQ ID NO: 30242 - DNA, 1346 bp, Cannabis sativa
gcttttgaattgatgataacaaccctttagtggctggggcatgataaaaactcagtattattttagcaacaagcagtcaagattagatattgttccaagcttagccaataatcatctggcagagttcaaggagtatgatcggcgaggccttcatttgggattgggccttgcaaacccagttgtaaactgatctagtcaatggatgccacctcctcttgaatcctttgctctagtgatggatgcttagataattttgaggagggggagtgatacgggatgcagagggtgtggtttggttggcatggtcatcaggtgtgttaggtgatttctcggtcaatgtggcagagctgcttaccattcgtttgggcttggttcttgcgcatcagttttttttaatatctccattattaatagtgattctactgtgataattggttggattaataagctttacattaattttaatttttagtctattttagtagatatctattctttattagctgttgttggtagtggttcttgtagtgtcattccacaattagcgaatggtgttgtccatatactggtaacctctatcactagtttaggagattgtatttgaacagatatttgtccttgattttttagttcttctataagagtggatttttataaatgaaattcgtattttttcaaaaaaaaaaaaaaaaaattgagttttttttagtttggcaactttattgacaaatttatgagaaaaaaaaaaaaccaacttatcaaagggagaaggacatgtgggatcgcaactcataagaagtaaaagataaaattaaaataaaatgatttgatggatgttttgctgttataaaaatgcattaaaatttaatttttatggtgaaatagttcttatccaaaaggtgaatttatgaatatacgtattataaatattagagtaaacagtgacataagtacctaaagttttaggtttgtaagtggtataaatctaatgatttcttttagcggtataagtactcaatgtttataaaactgtttattttcttctagttttatcagtacagactctgttattgtcttaaatagggcacatagaagactcaaattctagattatttagtttggacggaaatatgtagtatcacttgcttttatatttttttaaaaaaaatttaaaacagagcttatattgataaaaatagaaaaaaattacagttttataaatattaggtacttatgccactaagaaaattattgggtttatgccgcttacaaaatagagaatctattttgttatataataaaaaatccttaaatttataccgcttataaatattattatgctttca

SEQ ID NO: 30243 - DNA, 3315 bp, Cannabis sativa
aaaaaaaacacaatatttttttaaaaaaattccatctcatagtaaaaaaaagataaaaaaatttaaaattttcattatgtagtataaaaaccctaaataaaatgtgtagtttacaaatctcttatttattttaaatgtatatacattaatatgatgtcatgataaaatattgtgatataaatactcatcggactttatgtttcaactaaaattggcacgagctcaacttgacaagaaaaaaataagtttgggtaaaacacagcactcaaggcttaaacacgaaatgacatgacaaatttgaaaaacacagcacataagcataaatttattaacctcaaaatacaatcaaaacctcataataatttaatgacaataataaatatgtatttatttattgtaaataaattgataaataataaaactcaaatgtaatacatatcatattaatttattagtaaatattaaaattcaaataattttttttttttgtagttttttgtgaatttgttgtaaaattatataaaaataattgaaattaaaaaataaatattatttaataattaataaattcaaaaaaaaaatgaaaaagagacaacacaaattcaagcatgtataagaaaatagattaatctattaattaagaaaaccgaatagatgtaagtaaaatatggtgcgaaaatatcgtgcttatagagtgtgtcacgcctatatcctttcaaaatattagtacgatacatcatgactcatattattttatggcatggtatgcacaatttatattttgaaaggtaggaataatataagtaaggttagctcaagcatgtggaactgattattatgtattattgtagtttattcattttgtttttgtatgactctcatgaagattcgtttatatagaaaatattactttgacgtaaaatatataagtggcgtttggtaatacttttatttttaaagtgttaatcataaaaataattaatcataaaaataaaaaatcataaaaataaaagtataaaaataaaagtaaattttttttgtttttaaaattttgtttttgaaaaataaacatgtgttcaataactactttcgttttttaattataaaaataaaaaataaaagtgtgtttgtaaattttattttcatttctatatgttgattttatttaagtctggagtcgggtctggattcggtttttaaaatttaagttggggttggagtctaatctattaactaaacaatttgtttaaaaaagttttgaaagcgattttttttatttttaaaattcaaattcttaattaaaaaattaaaaataaaaacagacttataaaacatgattttaaaaaattatttgattttttaatttaaaaaaaaaattaattaaaaaaatattaccaaaagcattagttccgttaatttattattaatttttttttgaaaaaaaatatttattattaattatccttactacaatatgtgaaattgatgatattggagtattattagtctaatatgaacaataaaatgatcacatcaaactttctcattattatttaggaacgatgtctgatgggcactagtaacacccacgacggcccacccttctttattaattctaacactaacctacgttacttttaatacattaaacaattgagaaatgctaagtttatagcattagggtgcaatattattattgatgtaatttaatatctaattttatttattttattttaaaaataattataaaaaattactaattaattataaacactactttagtgttagatattttaatgtcttataataataatttatttgatttgtaactaatttaattattattataatgaaattaattgagagagtaaagataatatgagcatctaaaatttgtttttgtaacggtaagcaacccggaaaagggacgcatatatatgtaggtccaaactcagccggcaattaataattggcctttggtgaatatacatataaatatatagtttttgtaaatatacgaaagtttatattatatatattatgtgtggctggggaactgggatgagaaatcttgtacttaattattatttataagagttcatttccaactagtagtagtactacggctaattataatataatgagaggccaattttcatttatatgtctcttcttcttcttcttctacttattattattattatataaaaaatgaaacggtttatttatattactttatatatgtcttgtcagatatagttgagattaataagattaattatgtattatattttgtgatttacttttgttacaatctaaatgccattaattattgtgattagaccttgctcatgactagtcattactcactctctccctctcttttcatttaataaccttatacatacatttatataatataaataaatttatgtcttcttacacgtttaccatatatctttaatcctcagtcgtgccttttagatgcataaacagttttgtgatgtttcaatttatcttgccaattttggacattataataatatgaatctatgatattgattgaccatctctttttagacttttttgttattgaaatttgaaaccatataccacctaattgattagttgttgtcaacactagcttgtcttgccccttaatttccacgattcacaaccctagttagttctatccccagctaaaacgaaggagaaaacttattcaaattattgctaattcaaacaagttgaaagaaaacccattcctacaaattacaacattacatatatatgactgtgatttagacttgtaaaatgtaaaaatgctaaccagtgtaataacaactaactaaatattatgggactggggtcggttttgtaaaatataagatttaatttctaaaagtggtacaaattttgtgaggtaagcaaattattacccccatagccgattttgctgaccgaatagtatggtgtccaaacatttactcatttaatattagtttttgtagggttatgactataatattttattttattggtaaatataatttattagtatgagtaattgtaactattaattgttacgcaaaaaaagtttgccgagagaaataagtatttacacaatgaatatacacactatttgatggaatgtaaagtcaaaatgtatatgtttagcgggctctcaaatctaccaaggttcattatgcaagtgaacctcgctgctatgcccctatttgacttgaagtgaaactagttaaccctgcacacacacccgtacgccgacaaacttagtactgcttcgggtcatatgta

SEQ ID NO: 30244 - DNA, 2550 bp, Cannabis sativa
  modified_base (678)..(696): a, c, t, g, unknown or other
tccgaagcattgatatgtgaaacacgttatgatctccaaacaaagcagggggtaaggctagccgataagctacctgacctatcctttcaagaatcttaaacggaccagtaagtctgggacttgactttcccttctttccatatctccagattcccttcattggtgatattcaaaggaagacaaagtcccctacttggaactcaatatccctacgcttcgaatcaccgtagcctttctatcaactctgtgaagcaagcttatgagcttgaatcttctcaatggcctcactcgttctttggaccgcatcaggtccaagatatctctatacaccggcttcgtctcaatgaatgggcgaacaacatttcctcccataaagcatttcatacggtgccataccaatagtactattattgatgcatgagaactcgatcagaagaagatacttgttctaagaacctttaaagtccatcacacccacccgtaatatatcctcaagtatctgaatagtcctcttagactaaccataagtctgaggatgaaaggctgtactgaactttaattttgtacccattgctcgttgaagactctcccagaacttagatgtaaactttgggtctcgatctgagatgatcgacttttgagcaccatgaagtcgaactatctctttaatatacaaannnnnnnnnnnnnnnnnnntatacgtagtccacactggtaaaaaggtgagctgactttgtatatcaatccacaattacccaagtagaatcatagaaccctactgttcttggtaatccaaccacaaaattcattgttatttcttcccaattccacttaggaattttcagaggttggagtaatcccactggtctctgatgctctgccttgatttgctgacaaattaggcattttgacacatattccacaatatcacttttcatacctggctaccagtacaatgatttcacatcctgatacatcttagttattcaaggatgtaaaatgagactcgtctagaatcttctgtctgataccttcatcagttggtacacaaaacatatccttaaatcattataatccatctaatgaaattgagaagtcctttgttaacccagcttcaagttttttatttatactcttgtaattccaggtcactttgttgggttgtcttgattcttcctaacgaatcaagctataacgtaatattggctagtttttccaactacgaactcaatcttctctctagtcatatcctcagccaatttcaatgagatcttcttcaattcataaacttgccctagaccctttcgacttagagcatccgctaccacatttgctttcatagcgtggtagagaatctcactgtcatagtcctcaatcagtgccaaccattgtaattgtttcatattcaaatctttatgagtgaaaaagtatttgaggcttttgtgatctgtgtacattttgcacttttgcccatacaggtcatggtgctaaactttcaaagcaaaaactactgttgctaattcaagatcatgggtgggatatcgttgttcatactcctttagttgcctagatgcaaaggaaataactttctcggactacatcaaaatgcaacctaatccttatttagaagagtcacaataaatcacaaatttctcattactaactagcaaggttaacaccagtgcagtaattaacctctgctttaattcttggaaaatactttcgcacttgtcagcccaaacaaacacaattctttcgagttaattctgttaagcctcaaagaaccttttgtagtatcccgctaatccctagaaacttctaatttcggttatagacttgggttgtgaccaatcttgaactgcttcaatctttactgggtcctccaagataccatctttgtttacaacataccctaaaaagcttacttgaggcagcaaaaatttacatttcttgaatttagcataaagcttatgctcttggagacattacaataccatccaaagatgtttctcatgtgccacttctgaatcggagaagatcagaatgttatcgatgaagacaatcacaaaatcctctaaaaattccttaaacactcagttcattaagtccatgaataatgtcaaagcatttgttaatccaaaagacattaccaagaattcatagtgtccatatcaggtacaaaaagttatcttaggaatatcctcctctcgaatcctcaactggtgataaccagatcaaagatcaatcttagagaagacggtctttccctacaattgatcgaacagatcatttatcattggcaaaggatacttgttctttactgtcagcttattcaactcccagtagtcaatatacattctcaatgttgcgtccctcttctttacaaacaaaacaggtgcaccccaaagtgaggtacttggtttagtggatttaaagttcaacattccttgtaactgaaccttcaactctttcagctccacaagtaccatccgatatggagctttagatacgggcttttcccccagtataaattaaggctaattaggattt

SEQ ID NO: 30245 - DNA, 2762 bp, Cannabis sativa
gagcccattgttactcagatagttggaaggttgaccttggcttagggaagtcaaggtactgaagaggtgttcttctgtctgaaaaggtgagcccgtgatagttggtatcagagccaagttcatctcagtgggaggtgaacctggttggcctatcttagagagtatgtaggcgtgtggagagatgctagaaagacaactaccacgtgcaattgtagaaaggtgcaacagagttgttgaaactcgttggcataatacaaggtttattgggtagtccatactgtatgcttggtacactaggccaagttttccttagtgacatcgtaagctgtaggaggcgcttttgttgaaaaggaagcttgcaggcaggggtgtgcaagtagtgcagggaccgtcagattcttgttagtaacgacagtggttgagagatgatgaccgagatagttcaaattatgatagacatggaatgcttcaattgctacgtgtgtgtgttaagagggacgcacatggaaaccaagggggcggaggccgcaatcatcagaggatggttatacttgaaggtgttcgcatgtgacttttatttgattcagattgaagcaccgagacagttgagtgccatgtgttggctagtaaaaccgtcagagggcgttagtcagacaaaggaatcgttagagatgcgaagttgtggaatgaatgcattaaagaagtcagcacggctaacaagaccgagcgcatgcattgagatggtgctagagtttgtgtgcaggctagagggtcgtgccagtgagattagtaatcatgtttacctgggaaggccaggagggtgctacagtttgcatgatggcaagaaggctgcatcattggaacttagtacatcgtgggagccataagggcgtgatgcaagtgtgaatcagttggatggttgagcgaacagtgcatggatatggaaattgacaggggtgctatatgagatagttgacttgagagtgacatcctacaggatgcacttgtagatggcatggtgtgaatgaaaagttaggcggtcgcgtgtgggcatgttgtcgaggaccccaacaaatgaagttggggagatacctcacagttcactcatcagactagggattcattacaagcatcaagatgagtatcatggagattgattgttgttcaggatgtaaagtcaagaagacttaagacacaggcagagccagttatctatggtgaaagtctacatgactcaagtactaaataacaccgtggaaatgtttgcctaaggtgaaagtcagcaggactaaggcactaaggaaacattgaaatgtcgaggggcgaagagtcagaaggactaaggcattagttcaacatcttcatcaaagagacacttggaatggaggaaccatatgcgagtatgcggttagcttgcgagctatatcttgaggggtattcctctaagagagaagttttttccaagttgaagtgggggagcctactagttcatatgtttcaagaattagggtatttgttcagttttggtgtgtgagtccagagggaaacactacaacagatggtttattcagtgtgaagacttgcatgattgctgcaagttatagatagacaatatgcaggtgcataggctgagatcaagactgagctagtttgcggcatgttatgggcatgttttgtgtttatggggacattggtgttgtatgggacactgtaagccaaatggtccagagagcatatgccaatgggagatagcgaattgggatgacttcaagtcttaagagtaagactttgtgttatcaagtttgtcaaatgttagcgagtcatcagaggatgcagtgtttattttgggagatagacttgtgacatagttttgagagccaacacaagcaggagcctgagggctaatttgtggttttgggtgattgttagatcattaaccacatgaaagtagctcagaggagcgagtatgcagtgggtcagtgggaccttttgcataaagtcgtgggtgtgcggtagggccaaagggccaatgacaagaacttcacggagaaatgttgtgcaagagtgcacttggtgctgcattgggtgcagttggcttgcgagcctcatctaggtgggacgcaccaaattttatcctacaatgagaatgtcttgctcgttttccatcaggaggatggtgcgccatagagttggcgtgtgaatttcccagagggaattggtttcagtgaaagcgtgttctgtaggtgtcattgggtacggttggtttgcgaacctcaccccaaagggtgcaccatacttactccttctcaaaataagtatgcatttgacgattggcgagtgagctacaagcagaggatgtggtagcttcagggtcagtgttgcaagggctacttggtttactggagggaaattgtgatggactcgaaggagttcatgttgggggaagtattctagtgtggaggggctactccatgggagattctaaatagcgatagtggcacaagttctttgatcaagtccaagagtgggcgagggagatcgtcaccaagagggtggttctatggaggtagagggacaagtgcagacttaggattcgggagcatcttggagtaagcttaggagacgagattaggaagattggcatgtggtccgtcgatgagggcatcgacatgtttaagtgggggagaataaaatgtgcgtgccaagatggcatgttactgttgcgattttatgccctaaataaaacccatttcaatctaatc

SEQ ID NO: 30246 - DNA, 1245 bp, Cannabis sativa
  modified_base (757)..(766): a, c, t, g, unknown or other
atcctagctattgttaagactcaatacaacgtgccaagctattcattcaatatatttaaacggattgttagccttttgtttttgaaatcatttattgagtgttgctaatgtagctttcgcggttgaataaggaaatttatataatataggattactatgtttacttgtgagtgataacctaagggagcaattatagagttcattttattaatttacacattcccactagatggtaatatttttacacgtagttttgttcttttggatgaagtattaaactctatatttcatcaaagagtaaaaatacttttagcatccattgttgtcgttttagttcatttctcaaatatttcatccgttgttgtttttagatctattgtctttcagaatttattgtattgtactttttatgatgtctctgctttctttgtggactcttgaaaaatacttagacactcttagtagaagaaaagaaagcaaaatatacttggggttgtgattacttatgcataaagagtcaagataatataagtatttatctttttagtacacctaaaaattttaaattcttatctcaacttgtcatctacaacttcataagttatatttataattcaatttgaatagttcatatatatccactagatcattactattgggcacaagcacggactcaggattctctgtctttttccatgctttaataaaattgttgaacaatgtttttttaataaattgtattattattattattatnnnnnnnnnnattattattattattattagagcagttatatgtttgattaggtgaacaagagacaaacataatttattgcatctacatgagtcctatcaatttaggataaaatcaatacccaaactactcataattctctctaacaattcttattatatcacaatcttgttgattgcagaatgatttgaagtctacagaacatggtattgggtacttttattgttacattataggtaacaaccatacacacagagatgataactatcactgtttggatatgaagcactgaaattatacaaagaatacaggaagagaatctgtgaggcttccatgaatgaagtgcacctcatcttgcattttatgctctttgttgcctcttactaggtactattggtggacttcgagtcgggctcatttcataatccagttcttctcgagattgacatcatttcacatgtactaccttgtcactaaactaatctattaca

SEQ ID NO: 30247 - DNA, 2370 bp, Cannabis sativa
tggaggcttgaagcggggacgttacaaatgtcatgaattccaagccgagaggtgacattccttgtcactccatttcaaattggtacatctatagtcgtgaaaataaccattatctcaatatttgtgggattttggcctagaaataaagagatttttatttatttgtaattgtttattcattattgagaaggaaatacaggatttgttaatggaacaccccgacatgtgggggatttttaaaatctaaggcctatataaagagagtgatagacaaagataaggggattacttgcttgctggacgattgctaagaacaccatatctcttccttcatcttttttctaagtcctccatatgatgtcgacaccaagtctctacaactcaaacaccatttacatacacagtttccaagaatagggaccattcccttttcttacttttattggttcattatttcaagaaccttacaaccaccatctttatcagatttgtgaacattgagtctcccatgagccttgtgttcataagtctcgatacagattttacctaaaaatctgttgttgtattattgtcctgacactcttgagaacataactttggtgtgttagatctaattaataaaagagtaatttatagtataaatacctaagtttaactcccagttgcaaataaatacctaagtttaactcccagttgcaaataaatacctatgtttaagttttagcggtaataatacctaagttataattttggaacttctgtaggtacctaattaaataaattgccacatggcaatccctgattggtccaagtcattaaatttttattatttaaaaaaaatagttcaaatataccaataagaaaatgacacatggatataatggcttaacatttaacagttaaatacctacagagttccagaaatataacttagatattattacgtcaaaaattaaatttaagtatttatctgcaactgagagttaagtttaggtatttatgccacaaaatactctaaataaaaataaaagtagacgtaatcttattaccatcacgacatgaatggtaaactactataaattcttgttttctattttatttattgtggttttatttagtcaaattaatttaccgtaattctctttatttttacaatctttttagatcagttgacaaaaaatagcatcaacaattctgctcattcattgattttcctaaaaaatgaaaatgtaatattataaggtacttacttttttattttttttttaaataattcgctaatgacaaaggagagtcatagacatataatttcaatgatattggtatactaacgagatcttctaaactgattcgattgaaaaaattggaggaagagtttgaccataaatattaatttgtaactacacaaggacttgaatatacacattataagctttattaataaacatttaggaggtgtaacattgtaatctaattaatatgctccaaatcctatatatgaattttttaatgtaatgcaaataaccacgtcgatcgttcacagttcacggactgccacgcttacatgttaaagaacaacaatgttcaagccaaacccaaatctaaacaaatctaatttttaactcatcacatataattagagactatcacacactaaagtctaatctatcgtttccttaccaacacaattcaattagcctgataagttgatcacatgcatcctatatgtgcgcaagcgtgtgcatgtgcatatatatatatatatatatatatgaatttaatttacttaaaagtagttctttaacccatgactagacaaatatgggtctcctgtcaaccaaacatatatgcactaatattcataaaaattcaagagagagaagaatgtttttatcgtggaaatggaggagctaatcaattataacacaacaaacaaataaatatatttttgtgaaagtgataaacatattacatggagagtattaacccgaatcgttagtggccaaaataaaaagtaaattaataaaaactaataaaatataagacaaaatatgatgagaattgtctgtgtgtcattggaaagggtgttaattagtctttatcgtagatgattgtaggcagagagtgcagattcttgcctctcttttattagtgtagtcactcatcacatggattctcttccacagtactctccatcactcttttactatatatatatatatatgccatactgttttaccttcaaatactacctattcttacatactggtttatagggtgttttaatacaatcttataatatatagaaatattgtataatgaaaagtgcttttatatattcttatgaaagatccactcttataaccaaaa

SEQ ID NO: 30248 - DNA, 2099 bp, Cannabis sativa
cccacatacttgggagtaagagctaacaactcattgacccacatatttgtacatgaagaaaataactacattcatccatctcatcctttacgcaacagagtagtcacctcaaaaatatctttaaaatacgaagaccactgcgaggagaagtatatctatacttagcgttttttcttataaagacggataagaaggacaactcacatttagcgagaaataaccttcttattcagcataatcgtttaaggatcaagacaaagagcagttaaatagttattaaatattatcccatgtgcataaaaataaaatgtgaggaatgtccacgtttaattcatgaacagttgtaaatggatagatcccaataaaaataactaccatcctatacacctataaataggggcggaatccaaggaaaaaggatggcaagttgagagaaaaaaattattatttatattttactgagaattgtactctatattcaaataaatgtcccgaatagaaggactcgtggaatatatagattttaactacaaaaccacgtaaaatatctggtgttcatttattattattattaaattctatagtaaatatattacgtaaaatactatatatttagttaacaaaaatctgcattaatagtttagtgctttcattgagagctttagtgataaaaactcaaaaaaaaaaaaatccctccttataaacacaattacaaatctataccaatggcggattaaatcccacacgaaggaagtcatccagaggaaactacccatcgtcctaaaaaagaacctttgggatcacagagaaccaacacaactgaaacaccacgtttgggaggaatgatagaaatatcaatcctgctggtgaacaaatcctagagagaagaagttaagattcttatgatcctaccagatatgtcccactggtggaattagaaaatagataactttgacaatgcatggatgaatcaagctgacaaaatgatgagttagagcaagaagctgcgacgaccaaggctacatagggaatcgttcctcaaactcaacctaatccatttgtaaggagaccacgaggaaggcctcgaggttccaagactaggatgcaagaaaataaccaaggaaatccaacaaatgctcaagaaaaacaacctgtgaatgcgagtgttaacgcagattttcgttaacaaaatatgagcctaaaagtgataatctcacacagaaaaataaaaacagtaaagaaaaaagtataaacacaaaggattttttacgtggttttgcagttagaattgtgcataatccacgagtcaatcttattagatttttgatagtttttcagggcctttttctcttatgattttttcgtcccttttttaatctaacttgccactatttataatcacatagtagacagttaattacaaagttgactataatctttacaatgtttatcccctaaaatcatggggtttgattatatatcacgtagtataaatgcggttattatttgaatatcacacaacagtgatttacccaattttattgggtcaaaataatcgtgtgtttaaacacgtcttaaatcgtagcgttctgagatgtctcgacatgaacttggttccaatgaccttgatagagagccggagctttctcccctatcttttgaaggcttaatgcttcattttgacaatcgcagtgtttattaacagagagtacctcagcagtcatttgaatgtcagcttctgactctccaagactataagtctcactgaaagatttcaggagttcattggtgaaagtaacaggaatgcgtgttcctatagcgagataggcacctcacttattaggtcttgagtccacccgactgttatacttagtttgtacattatacgctaagtgttttctcagtcaatatgcgttgctttttgtcttcctaggtgtaaagaagttgatgtctcgccttatgcattcaatacaatatggtttctcgttaatacccgaggcaacatattgtatatttttacctcgcataagtgttggtattatatttatccaggatcttagatctacttacaagtatgttgatttaacaacctaatattg

SEQ ID NO: 30249 - DNA, 1087 bp, Cannabis sativa
ctaagcaccaataatatcttttagcatttttgattatgtaaaatggtggttagtctacttccaattttctactttatattagtcgttagcacaagtctttatataatatatatatatatatatattaatttgagtaccttcagtcagtcttcctaactaacagacttgctaatttataagtgctaaaatacaaaggttccagctttcagattctatgcatgatgcatcatgcatggtaccacctactgagttgaaaatgttccttttttcctttatttttttcatccattcatctaggtggacgaaaataataaaagacccaaaatacttaataacatgcatggaaagagaattgtgaacacaaaatatgagcatctatacaatgatattgttataagaccgtgtcaatacatagttattactatagttttatatacaatttatttaatttaaagcatgtggaatacagtattaaattgtacttctaacgaccatggctgtcgagaagtcttaaaataaataaataaatgaaaataatttgaatcctcttggtggctacattgtcattgtgtattcgtcaaccaaataataataaaaaaaaaacaatttttttaaaggaacattttcattaaatcatatgttaagcaaagaagagacaaaagactttttttttaaaatatcaaatttcagacgtttctgcacttcagaagcattagaagtagggacattttctttttgaaatgttaggaacttttggacttcaaaaatgttgtaactattaatattaataaaaataacgacacagtcgaatcgaacattactttgtgttaataagtcataaaacaaccaaccaagtacagtagtagaggtcgagatttaataacttgtttaatgtatgtcgttacaaggatcaaaaatcaccaagcaaatgcaatcaacttataccaaagaaagtagagaaaatttgagagagatttctgtattgaatctctgtaactaaatataacaaacaaggctaacaatagtacaaagctgacaaaattgtcatcactcatcaggatcgaaagtgaaggttttaatcggcaga

SEQ ID NO: 30250 - DNA, 1000 bp, Cannabis sativa
ctgaatgggtggtgacttttccggatgcaggagttctcaatttcccaatcacggtttctgatcatgcgcctattctactcgacactgttatgtacagaaagaaagaattcatccctttcagattctatgaagcttggacctctcataaatcttgtgaagaagtggtgaatcgagtttggcatcattccgaccctggagtcactcacttaatacgtaatgtggataataccaaaagaagtttgcaagcttggaaaaataatgctttagaagattgtgaggagtcaattcggaaactggaaagtaaattaaggtggcttcagaatcaagacataaacgatctcagatgcaaggaagaagctgaaactcatgagcttcttaaaatagcctggagccaacaagagagtcaatggtgccaacgatctagagaaatttggctgaaacttggagatagaagttctcgtttctttcatgcggccactatgattcgaaaatagagaaatcatatctggaatttgaaggaccaccacgggcgagtttgggaggataagaaacacattcaacaaataattaacaattactttgttgaccttttttccactgggtccccaacgattcctcaagagtttgactctctttttgtaaagaaaattgatgatgcagctaacaacttattgtcgtgtactccatccctggaagagattaagcagacagtttttggatttcatccactgaaggcccctggacccgatgggttctcaggggtttttttccagcattattgggagcaagtgggaaatagtgtgtgctttgggattcaagagatattcaatactggatctattgatccaaagttgaattatactcacatttgtttaattcccaaaattgctaatccggatagaattgaaaacttttgtctgattagtttatgtaactttacttacaagatcgctgccaaaatcatatctaatcgtctcagacctttcatggaagagctcat

SEQ ID NO: 30251 - DNA, 2390 bp, Cannabis sativa
atttaaatattttttcctataaaatgtatttttttttttataattctttattttaatgtatttaaataattaaaactatatgttaaatttataggtttatatatattttatttgttaaccacagagaatgcaacagaaaaataggtgtgatactgtttcttccgaggcatcacagagaatgcattgagcatctgttgtaatctgaaacttgaccagcctctgcctggtttttaatctgtccagcattgctagccatagcagagagctatgtttaggaatgttcatcctcgaccatacttgttcgctccaatgacattgatcatttgctgctgttagcagcttatatactttagaaattttgcagctttgagcagtaaactgggtatgattgatttgctctttccattcatctttgagttcaacaagtttcctccaataccagctactttgggtgggtgccttgtactcccacctagattcattgttaatatagacattatgcaccgacttaacccatacattgtctttttttgatgcaattgcccaaatattcttgatgatagcagctttgttccattcatggatgctcatgaatccgattccaccagcttttctaggcttaaaaatgttcccccatgcaacacttccaggacctgccatttcactctatcctttccacaaaaaacttttacaaacaacttcaatatcaacaatcactcttttgggaagtatcataacttggctccaatatgcatgtatagtaagcagaactgaattgatcaataaagccctaacagcatatgaaagatttctagagctccacacctttattcgagcaatcatcttgtccactagcagcttgcaatcctccttagagattctttttgcacagatggggaggcctagatatttgaaggggagatctgctctagtaaaaccagacatgtcaaccacccttttgatttcagtttcagccatgccactgcagtatattgctcatgtattcttgtttggcaccagccttgaggtgttggaaaataaatttaggccttggagcattcggtagatgcttttaaaatcacatttgcaaaataagagtacatcatctgcaaagctcagttgatttagtttaaggtcgctgcatctttcatgaaaatagaaatctgtcttttcaccaacttttctcatgattctacttaggtactccattccaaggacaaagaggaagggagacatcgggtctccttgtcttaatccccttcttgcttggaagtaaccatttatagaaccattaagcataagcgagaatcttggtgttgtaatacaagtcatgacagtagctataaacttcggtgggaatttgaatgctgtcaaaacttcttcaagaaagtcccaactcatggtatcatatgccttttgaagatccaatttaatcatacaattggccttgtttgatttccttccatagtgccttatgagatcttgacagatcatgatattgtgagctatgaatcttccttgaatgaatccgccttggtttgaagctactaaatctggcaatatactttcaagtctactacagataagcttagtagctactttataaagtatattgcaacaagaaattgggcgataatcacttaccaagtttggacatttactcttaggataagagtaaggattgtagagttgatcttttttagtaagtgcccaaagtgaaggaagtccaggactgcatcggaaacttcatctcccacaagctcccaattgtcttgataaaagtaactactatatccatctggacctggagccttgcctcctggaatgctaaaaactgtctgcttaacatattctcttgtgaactgagctaaaaggatctctgtatgtgtattagtgatgatcggtccactctccattactttggttgaaacttttgatctcccatccatgcttgatcccaacaattgttgataataggcaagaaaggctgctgtaataccattagagtcttccagtcggataccatcaacattaatcactgataaaatcttgttttgattccttctctctcggatactgaagtaaaaaagtgcaaaattttcatctccttcctttatccatgccatttctagacttctgattcaaaaaaaaagcaatagttcttatgaatttcagcatatacctttcttctgttagcttcctgttcctgcagctctttgttcaaggggtctctttgaagctgagtttagcaatcaactagttcctgcctagctttaaaatctgctgcttggatatctgaaaaatggcacctgttaagctctttaagggtaggtttaagagcttttaatttagcaactgttgggttttgtgccctaaataaaacccattac

SEQ ID NO: 30252 - DNA, 2085 bp, Cannabis sativa
ctgtgcatatttcccctccaatttctggccataacttcctgtagaaacttgaaccatggccatgtcgacccagagacttagtgtttgggatgctgaaaacagttttctttatttcttttctggtgaagggatttaatagcccaacttgctggtctagagaaagctttctccccctgtccatacactcccggttaatcaaagaccgtgcagtactcaaactccccataaacccttaaagtactctaaaaaatggtccaccacctcagggaaatgatccacctgctttccttccgtattaacaaaggaaacaattctattatttgttttcctcttcttaagaaatgcatgaaaataggcattattatcatcaccttttcttagccaagtaattttactacgttgtctaacgaagctatgatacattttaccttgagtttcaaaagcctcagctacccttttttcagcttcttaaaaagaaaaattcccaggatttacttgagcatcgaataaagcctcacggtatgtctcatttgccaaagaataagattttccaatatcaccaacaatctctattgaatctaatcagactgatttcaagcctcatcatttttagaaaaacactatgtaaccccatgcttgcacaaggcttcccccaactatccatgacaacattcttgaactcattatgctcagaccaaaagttgtagtatcggaatggtttgtagtcaatattttcaagttttccattagacaccaaacacgaacaatgatcagatagggcatcccatttaaatagagcaacagagttaggaaaaatatcaacacattcttcattagcaaacacatgatctttcttcaagtaaattcgctttcttccttcatgtttattggtctaggtataagttgaacctgaacttatcaaagcatctattaactgaagagataatcagttattggagtctaagatctctctaggggaaacaaatttcccaccttctctatcatcaacatgaaagacaaaattgaaatcaccaagcataagccatgacttagctggtaatgtcagactagcaagatcatgccacattattttcctttcttctattgtattcagcccataaacaaatgtgatactaatagcagtagaaaaacctgccacattgacataatagtgaacaagttgatttgtatccttggttacaataacatgagcaaatgtactcctccacataacaagaattctacattatgtaaccgagctggaatagtagtcccaattttgaaacttcttctccagcatatcttttattttgttccacttcaacctagtctccaaaactgcccaacaccaacattattcagattacaaaaattttaaacatcaacctatttattcaaattatttaaccctctaacattccaacttaaaatattgcaacaatccattaacatgtatgtaaagagctagtatctaaatttgcaccttccatccattcttcagtatctgcttccaaccatcctgcctgaatatcaaggatgtcaaacgaattttgattgtccttatccacttgaagctcatagcctcctacttctctctgtttgtgtgttattttcttcgaggtaatctatttatccttcacttcttttttgttcagaacaacaaccggggctaccgatttatccactaacttcattgcctgctgcacgatagcagtaggggcttccttttcttcaatagtccctgtagctgccttattactttgttccagcttcttactatcttgactcttctcgactttctgacaatccaccattagttggccataacctgaacatgatttacatttgacggggaaccactcatagttaactgcttgctcgaccagttttccatactcatttaaaaactcaataaaccgaggaggattatcaactatgtcaatctctacaagaactcttgcaataactcactcaattataataaaaattaaatctttaagaactaaaaagcaaaacaagaatacctaataaaaaattataaacccataaattattaacaaaacaagaaagacattattaacaaaa

SEQ ID NO: 30253 - DNA, 1726 bp, Cannabis sativa
ggcataaaacccaacagaatctccttcaccatgaccaacaagaaacacgcgctgctatgggtgatgcttttgcctaacagagatgtgaattccaagaatggacggatcaacaagccgcaatcctccaagcccaacagtagagttgaaccaccaaaatagggaggctaatgacctggccaaattgttcaatgagaaggttggatcttagatcgaagagccatccctcataagggatccccgtcggggaaaagtccttgtgtcccagagggaacttagcacccaaggcattatgggcaaacctcaaggcgaggagggccaattgcatcctaaacaaggttgtcttatcagcctaatgatgggaagatcttgtctaaaagatcatatggtaggattgaccgatttcaaggcctacccggagataaagaggggagggaagacatcccaccaatgtaaggccaaagaaggtctcatattggggagtcttaacccaatcctaataatgatagtgccactagtcacccaagtggtgagcacactaaccgcagaactcagaatacttggtacaccaatgatgttctgccccaaaatggctaggtacacgttctgacccaagatctagagattttatggttgctagaatgggccctcatgttagggtagatctttggactggtttgaaccaaaaaatgaatgctcaggatggtatgtcctgcccctaaacactcaaccaatagagcaaaacaggccaaatttggccaaccctcgcaaaatacctcctgcccacccactggccaccctggctgggcaggggttggcaggataggatttttcgagaaaatgtaagctaatttgatcctttagtgcaggcacaactagatcaacttaagaatatgatacaaggcctatctggcccaaagctgtatgacttagagttggacaggacccaagggtcacctttctctacgtgcatcaatgcactgctcttgcctaccaagttcaaaatgcctacttggaggatgtacacagggaaagaagatcccttgactcacatcaaattttttgaaatccagatggatttgcaaaatgttgaggttgatacccgatgcggaatcttcccagtagccttctttgaaaccgcacagcagtggtttttcaaactagctggtgggaggtttgattcatggaactcgttcacaagaaagttcttcacacagttctcgtcttccaagcaaatgccttatagacttagttgaagtcaaatagaggccagggggacctctaaaagactatctccaaagattcatggctgaagctaccaaagtcaagaatctgatggaaggaaagtatacgaccattatgagtggcatactacctttgagtgagttgtggaaggacatccgccgacactcaactaaaaacatggttgatttccttgatcaggcagaaggctttgttaagcttgaagaagctgtctggcaagcccaaaatggaagacatgcagatgctggacatgtcctaagtggaggatagccctcagctccgcccagcacacctgctagcataagcggtcagccctccaaaggccaaaacatttgaggtaagagtaacaacaataaatttggccaagcgaaaggcaaaaagtggaaatttaataattctcccatgccacaagactcaaaggagaaggaggaaagctttacatgcttctgttggaattaattttacc

SEQ ID NO: 30254 - DNA, 1262 bp, Cannabis sativa
  modified_base (1232)..(1237): a, c, t, g, unknown or other
attagcaacaagctgcacagttaagttaaaaatcacgttaacacgcctaatctagtagggtgttacaaaaacccaaactccaaagcctaaagcctttttaatttctctcttgtcgaagctatttctcaagtttttctctctcactggagtcgaagcatttcagctttgacttggccatctctggtggttaataagcaagaaaaaaaacccaattttgggttttcctcctaaaaggcatcaaggatctgtggctcgatccttcgtgcatccactttgaccgagaaccgccgccacccgtggagtaggtccagtgcgcattttgatcagtcgttgttcttagaattcttggcttctcttcaagctttgaatctaattttaagactcataacgtctatgaatataagtttcagtgtaattgtttgagtataatttatttacttattagtgtaattgtttgagtgggatatgtttgtgaatcaagaatgtgttgtttgtaaatcaagaatttgttgttgccaatttgtatatattttatatcgaaaaatattgtaaacataataatttgaaattttgaatatatattttatgattcttatttctttaatttttacttatattattatttttgtttaaatttatttatattattataattagataataattcatatataataaactagcttaaatgtatttttttcttaatctacataatacttttgccattagttataaatagttatttaacaaaaaatttcccagccattgtaaaccatcatttaaagtcttttcccaatagttataaaccgtcttttaaaattttatatttttatgacacccacatagccagcggttttaggaatcgatggaaaataacatataagacaattataaactgatgggaaaagctaattttgtagtagtgttgccctagaagatgaaccctaattcttaggacttgttctcaaaaaaaaatctcaaccttttgcatgaaggggtaatgttctatttatatgtgagatctgggtatgggtatatctgggcccgatagagtttaaaggtgtcaaataggcccactgttgggttaaatacaatatatatcgactttgggccaattaagtgaggcccaattcatgaggcatgatcgtctatacgagaagagacaattcaaggatgataggtgttatgcgcaaccatgtctgtatcgagaacaagctgacggtgaagaatannnnnncattacctaggatcgatgacttgtt

SEQ ID NO: 30255 - DNA, 1107 bp, Cannabis sativa
atgttctataaaactgtttttaatattcaattttttaattgagaatcaaaattttaaaaataaaaagagtcactttcaatatttttttaaacagtttttgcttttcttaatcaatattttggagttcgatcagatccagacccaaatcccctcacggccctgacgactcgatctctgacctaaacccgaatccgactatggacttagacccgacgtaaataaaatcaataaaatgaaaaataaacttacagaatatacttttattttttgtttttaaaattaaaaaacaaaaatattaccaaatagcacttaaagaaaatatgcattcaaatattacacacattcatttgctttttaaaataataaatcttaatagttataaaaaaaaatcttaattcaaataaatataattgattaaagataagttataatatttgggtgcatccatatctatacgaaaaaaagagacaaagttgtgatttggtggaaagaaaaaagaatggacttcttttactcacacgaattactcttggataaaattctcataaatattgaaggttgaacaacatattactattatattttggaaaaataattttaggtgtattgttcaaatcacctgatctatgattcaaagaaaatataattaaaaaaatataacatttttattatttcatataaaataagttgtaatagtgaaagatatttgaagatacacgggtacagatgtaaagccatggaggttggtccgatttaataaatgtgataattaggtggcatacctatgtatggtgattgaaagataagaaacaaagccaacaaagccatttgtttttcgttttttcttttaatctggtagcttattgttttctgccaaatccaaaacatattagatacctacggtgtccaagaaaagcttctaactttagtagaaagtgactcgtgaacccaccctccctttattatctgccacaacccagaattcatcatcatcttcttcttcttcgtatttggtcttagtttcagtactccttctcgttgctgggttaccattagattcctcttctgagttattttgttcttggtagttggtaccatccaaaagta

SEQ ID NO: 30256 - DNA, 1951 bp, Cannabis sativa
  modified_base (1878)..(1882): a, c, t, g, unknown or other
aataagtaattttttataaagtttgttaaattaagattcaatattaatttgtatcaataatgatatcataacctacaaaaagaatgttatgcgacatgagtgccttttaacatttcttaaaataatatcgtaagcatatattttttgttacgaaatgattagaattactcaagaatttatgatgcaaatatctgcaatcggtcctagaaccttatcgaaccagaatagcccatcgtctaatcgaaggacatgctttgccaaaccattggttgtagagttcttgtcacgagccacatgggataaaactgcctctcaaaaatttagataataaaactataatattctcgaaacaacacacctaactcattgaaatacacatttctcttgttaatacctgtcacttgagaaagcaaatctgatgtaatatctatcgtgctagaaactaataagtaaattggttaccctaagcttaagtaagttggttacatgttttacatttatttgtgctataaattgacttcaagttagttacgttaaaaaacattacgaaatatgatattatggtactagttactagtttgtactattttaaattttaaaatttaaaaaaggctaattaggatttttgtcccccaaattttcatttgtaacaaatcatgccacttgaactattgagattgttagatttaatccaatcttaataagaaaaatctaacatggatgaaagttcatgggacataatttagtacatgttgaagttcaaggaacatgacttggtagatatcaaagtctaggaagcatgatttagttcataaacaatcactgaattagtaaaattaaataaaattagataaagatccttaaatccaacaatcttgatagttcaaagaaaatttttaaccgccaaaaaaattcaaaaagcatgatttagtacatgtcaaaatttaaaaagcaaaaatcctaattagctttcaaaaattcagattggacgggtaactttagtaaatcatatagttaaaattggcatgatctactgtacttttttttatctctattttaaaattttcattatttatgtaagagggtgaattttattttttctgaagttagttgcgtcgttagataaatattatttcgaatgtcaagtgagtaagtttgtaagaaaataaattagaaagaaaatataaaatataagagatcaacaatggttaagttatttagtttaagatattgttaggagttttttttcttaattattataaacgactttatagtttattattgatgattttgttggatgagtaatatttagatgtaataaattgtgtagttgaaaaatgtaattttaaaatttccttacatgtttagaacttaattatagaaataaatataatatatatccaattatccattatagaaagaaatatggtgtaaagattttttctttttcttttttttttttaaaaaaaaaactcaacaaatttcaccaccatgttgtcacattttatacgttttgatattttgttattagtgtaatagatttaaattcagtatgccaaatcttaaaataaatttacttttaaaaataatctcaaattattttattactaaaattatcttttttgaaagataattatggaaggtacgactaaaaaatctcaaattattttattactaaaattatttaaggtgtaataattagtaaaaaaattcctaaacacttattagaaaaataaataaaaaaatatgattaatttattattacaaatatagtttaaagttacatacacaaattaaaaccaagttttagaataaatttttgctaattacaatttatatatttatacataatgtataatatatatacagtagaacctnnnnncaagaatacacttggaaccaactaaattatattctaattgagaggttaaaactaaatagagttatacta

SEQ ID NO: 30257 - DNA, 1634 bp, Cannabis sativa
gactataaaaaattcgattaaattttattgtcaaacaccgaaacagataaagggtatatcgatggacccctttttaaagggtgaattgttgaatttttctttattattttggtcactctttagtcggttattgtattagttacttttaaaatttgtttgtgatacttctggtaccttttagaagaaaaataacttgtctaatgaaagttaccaataaaaacagcatcaacagaaaaacacatatcattttgttttgattatgtattggtaacttatttactttgttacttttttgtaacaatttatcaaatgcagaaaaacaacaatagtagcacatttcaattttcagatctaaaaataggcaaaaaaaagagaacaataataaaatttagatctacataaaaattaattaaaatgtacatggtacaattttttgttttttcgttttttttttttaagaaaaatcattaaaaaaaatgtctgaaatattgtctctggacatagaaaaaaaaaaagaggaaaaaagatatcgtcagtcattcatgagaaataaaaataaagacatcggtgtggaaaactagaattaaaaaatacaaaacactaaatataacttaggaaaactttctagtgtgcaccaatgtaccttttagctgttttgacatttaagataatttttttgtctattttttttataatcgtgtcgttcgccaaaaacaaagttcaattcaaacaatctacacgtgtatacttcttttattttatatgcttgtttgaacactgctttctatattgtaaattatattaaattttatttaatatcttaaataactataaacgtatatgataattaaaaaaattgctaaaaactacttatttcatgacatataaattttaatgggtcggacactagttgattaaaataataagtgcacctacaatagaagaaaaatcaaacaaccttgaacatgcaaatcatcaatcaatcaaacatttataacttttaaattttaagcttaaaaaaacttaagcaacatttttcttatttctactaacatatcccaatttcaaaataacaaagactaactatttatattacaacaaatcaaaaacccatgagcatgtataactctcaattttttttgagcttaacaaaatttgtgcaacattttctctatttcaaaaagtaactatatcactaacaaatcaaatatcaaacaacattaatcatgttcaaagttttaaacaaaacatactaaaaattaaagtctataatccaagcaacaagagtattgttgaaatatggttacaagtatctggttactaatttcagtttgccacattagcaagtcactcttgctatttctggtcactcggatttgtgacttggtagggtgttagttcagtccctataattataagggtcaataccattttagatcttgtattttataaaagttattaattagaccattgttttgtaaataataaaataaattctgtatttttcgtaatggtataaataatcagcttgagtaaacgtaaccagttttgtcataacacttttagatcggattattattaagttttatttcgataaaaaaattacttcaggtattatttagtattattttaaa

SEQ ID NO: 30258 - DNA, 1676 bp, Cannabis sativa
ttcaaggagtatttttaacgaccttaaaaattcaaggggcatgatttggtacatgtcaaagtttagggggcaaaaatcataattagcctttatttaattagttgctaaaattctcgataacagacatgttttcatatttttcattttggttttgaatgaacttttatgcctttggacctactcttctttcttaaaaagtttctctttaagtgcaacatgttaaaaacgttaatcatgataaataagtttcaccgaaattgtttaaatatgataattgagaaaagtaagagttgtttagacaaagtgcttaaggttttataagtcattagtgagctgattttgtagtttgtaatcaatgtgagatgtagtgtagtcttgctagtataaaacaaagtaccatgactcaacaacataacatcaagatagatttgctcctctctcaaagagtctttacttccacatcaaggtggttttgctcctcgctcaaggaggccttgctcctccttcaaggagcctttactcccatatcaatgtggctttgcttctcgctcaaggagaccttgctcttctctcaaggagtctttactcccacatcaaggtagctttgctcctcactcaatgaggccttactcctccctcaaagagcatttactcccacaatcaatgtggctttgctcctcgctcaaggaggtcttgctccttcctcaaggagcctttactcccacatcaatgtaactttgcttctcgctcaaggaggtcttgctcctccctcaaggagcctttaatgccaccaatggcttaggcaccgcgctttagccaacacttttgggcttggcgcaattttctccaagtcctaatgccaatagcttaggcactttgagaatagtcaacgcctcccgacttggcgcaattctctcaaagtcttgatgctactgacttaggcacaaaatcctaatgctaatgaattaggcacattgagaatagccaacgcctatgggcttggcgtaattcttttcaagtcctaatgctaatagcttaggcaccttgagaatagtcaacgcctctgggcttggagcaattctcacaaagtcctaatgccaatggcttagacacaaagtcctaatgtcaatagcttaggcacaaagttttaatgccaatggcttaggcatcttgagaataatcagtgcctgcgagcgttgcgcaagtctccaagtcctaatgccaatggcttagacaccttgagaatagccaacgcctccgggcttggcagaattatctcaaagtcctaatgcaaatggcttaggcaccataagaatagccaatttttttgggcttggcgcaatactctccaagtcctaatgccaatggctttgacaccttgagaatagccaatgcctctgggcttggcgcaattctctctaagtcctaatgctaatgacttaggcaccttgagaatagccaacgcctttgggcttggcgcaattctctcaaagtcgtaatgctaatggcttaggcacaaagtcctaatgccgatggcttaggcaccttaagaatagtcaacgcctctgaactcagcacaattctcttaaagtcctaatgctagtggcttaggaaaaattcctaataccaatggcttaggcaccttaaaaatagtcaatacctccggacttgcataa

SEQ ID NO: 30259 - DNA, 1300 bp, Cannabis sativa
ggccacctagctaattgggtgaggataccaattatctattctggtcagggagtagcacatgagcaactctatattccaggaaagcccaaagccgtaaatcctcctcaaggagtaggtcttccacaagctccaactatacatgccccttggggcacaaaatgccccagtggcaaggcatgttattggtcttggaccttgaaatccatatccacctggggttgctccaccaacactagatggccatgtggcaaccatatctggaggcccatatatttttagaagcacgtgaaatgctcaaaaaagatacttgaattaattggaataggatgaatcatgtaatcttgtacaaacaattgctcagtgatctcgaatgatgaatcttccaataactttcatagaagatgacgctaagcatgtgcattttccacacaatgagccgttggtgatgatagctcaaattgtaaataagagagtgtccaaaattcttgtggataattggagttctctccacattctcttcaaagcagcttttcaagctataggcctggtgcaaaccaacctaacatcttgctagttcaactccaaggcttcaatggagatgcattgcttccaatgagaaaaatacaacttccagttacactaaatggagaaatttctagagcgtaattgtaatattccgataagtctaatggtaaataattaggatttatatttatattatgggttaatcatgtaataagtgggattatgatcctactaatctatttcaacataaattttaattttgttataagtggataaataaacgtaatttattaattacggagatttatatagcatgtgtgaatataatgtgagctatttgtgaaataaaaatatttttaggtttggcgaccatcgagacccgattggaggccaaaaatgtcacaacagctttagttagaaatattgatgagattattgagataagttaattttagaaataccgaagtattttggggtactcgaaattgactaaatatcctaaaattaaagatttcttatagctaaaaaataatgagataactattaataataaatttttattaatattatattattatattattattattatcagtttaatattatatatattaaaaacattaatatatattatgttttaagaaacataaacagaagaacaaagaatgaaaccctcatttttctttgtgcgacgaaatcctctccctccttaatccattttcttcaattttcaacttgaaacctagtaatttaagctccagtagtagcgggatag

SEQ ID NO: 30260 - DNA, 1758 bp, Cannabis sativa
  modified_base (287)..(289): a, c, t, g, unknown or other
  modified_base (1379)..(1379): a, c, t, g, unknown or other
tttatttcattgttatagaattcatattaggatgttaatgaaacatacttgttagtggatctagatcgtggtaaaatatttccaacaacccctgcctccaaaagctggtctccatctctgatggctaacctctgcctccaaaagttggcctccatctccaaaggtagacctctgcctccgaatgttggcccccttctctgatgtttggcctccatcagcgaggcctggcctccatcttcgaaggatgacctctggctccgaaggctggcctccatctccgaaggctnnntccacctctgaaggctggcctccaccttcgaaggcaggcctccatctccgaacttttgcctccatctccgagggcttgcctccatctttgaagtttggcctccatctccgagggctgccctccatctccgaaggttggcctccatctttggccagacatacaggcatgtaccaccaattctgtccaaaccttcgatggaaggacacttaaggggccatcattaatggagcccatattacaggcaagaccaacaaagctggagactctatgctcaaacactccatcacaagcctaaaagtgacttcctggcaatcgaagaataaggctcttatcaacataagctttgagagcccacgatctctttctcaaaaaggagatcctgcctaagaaaatttctcacacaatgacttcctggttgttactacacaaatttggaatataactgcagtaagatacatagtggagactagagactccctcaactttctttttaaaatcaacacatgaaaagatgaggctccaactcactgacttggcaccctgtaatcatttgatgtatggcctctttggccaaagcatcgcactcatttggtacattagattaccctttactgttggagaaaatccaaccaccagaactatgatggcgcagttcgtcataatcgacgttccctcagctttcaatgccatgataggctaaccagccctatacaacttgaagccataacatccatctaccacctatgcctaaaattcctaccaaggcatgtagtaagatgtcaagacagaacagtaatcttgccatcaatgtcaaaacatggccttatccagaagcaaagaattagaagatgcatccatcagataaggagcatagaagcttcataatgttcaatgatcttatcggccacaacatggaggtgtgcgtgaacgacatgcttgtcaagtcctaaaggattgggggcatatggatcggaggacctagactgtaaagaccgcttaacttaaatttggaaatgagcagataatcaaggtttaattatggaaattatatattaatattaattattaatttatggtgatttatttgaantcagaatgcattttatatgtcatacatagaaatttcataattttgcatattcggtgcccggcaacattggaacgcggtgtttggctaatagaatcacatcttagtattttagtgtagcggggcagtttatattgtctttgggattggtcgggattttagaatttcccaaaatacccttaagtggccttttatgttttatagtgttaaaggggcaaaatggtcattttgccaagtgtgttttgtctttttgtgggatttattaaatcagatttttatagattatgttggctgatatttttagtaaaacaaagattttactcatttattttacaaagaaatcaaacaagggaaaagatcctatttctctctctctctctct

SEQ ID NO: 30261 - DNA, 1494 bp, Cannabis sativa
agagtggataagatggcatccaacaaacaaaacatcaatattatagatatggtcaatcgtttggacaaaaaagaagatataaaggtacgcaagtacgtacaatatcaactttgttttttttctctcttgctattagttagttataacaatttctacaatgtttttcttttcttttttatatgacagatccaagagaaattgcatcaagtcctcgttaaacacaaaatattagagaaagatgttatttacccagaatcaatgccagtaaatccttactatgaaaaaagattaacagaccgcgaagaaataatgaaagaggagagaaatgagtggaatgaaaggaaaaagttcatcactacaaaatacaaagagtcagctctagttgcagccacattaattgcaacagtaacatttacagccggtttcactttgcctggaggttattttagtaatgagcttaaaaatcaacaacaacaacaacttattggcactgctgttctcagcaataacaaagcctttcaagctttcatcataacagacacaatagccatggtgctctctactacctctgtctttatgaacctcttcctcactatagtgtcttctgaccaacatagtgaagacttagtatcgtactatattgggactatggttttagcaatggtggctatgggattaatggtgatagcatttgttacaggtacttatgcagtattgtcaccttcccttgctcttgctattgccactggtcttattggattgtctttctttggtcttatattgtacacagtaacaaggagcaaaagggtagtagaattattttgggatcttctacacaaagtttgtgatctactggaaaacgtttgctatcttccagtaatacttttcaataaagtgtgtagagtcttacactattatctcttcatttatccatattggaagttaagatcgactataagaaagtgcatagaaaatggcattgatgaggatctggacccgaaacccaaactttgattagaagattaaataatttaagtgtattttaaatgataattataattactcttaataaatttattaaattttgtacatgtttgactactataaaaataatatatttgtgtgacttttttactattttagtatataattattgttgatacaatttttttatttactggtcttagaagattgtaaataattaagatgaatacaaggatttgttaatcacaataaattgattttatcaaaaagaaatttaatcaaggtgaacataaagtttttatagtggtccaactcctttcagcgataagatgttatccacttgtagttttattggtctctgtaagccccaaattcttgttttacctatctttttcatatttagattgattttatcttgatttaagcttgaatataaaaagaacaaaatcaaagattcaacaccagaattttacaagcttcacctgttctagaaactcattctaggcggct

SEQ ID NO: 30262 - DNA, 2120 bp, Cannabis sativa
gaaacagattcatcgatcacaaaggaaccaaccagcgggttcttcaaaataccaaagcagctcggggagctagagctgtcctccgaaggatcatcaatctccaattccaggtcatttactttattcttggtatcccagggcaaatcacaaacaacatctggatacttgcgcggaactttgtggggcctagagcaaagagaggcggacacttcaaatttccgtttcttgaaaggtgtcgttctctcattaacttcagaggaagccgggaccccaatatcccctcctatatttcaaatctcatacaaatcgagcttcccaaaatgcttgaggtcgtgtagtaagccttcttgagcattaaagaattgagctaaggcttattcttcattaacatgcacctggcccccgtgagaaatgtaaggcattgaagtattaatccccacgagctcacttttatcttttgctaagcatccggcccattcggattagagcagctacccaaatgacacgggcccaccgaacctcctttaaaattagaatcagcaataggcccacccatttgagcattagaagttaacataggaagcccaataccatgattattattagtaggcccatttccaatagctttaataataccagccttttcagtagattttccattcggcccagtcacacacggcccattatccataacggtcacacttttcaaattgttatccttgatagaatctttaacacagctgttcaaattcaaaacaggtaaaacctcagaggcctttctcttgtccaggcgttcagtcgcacccccatagccagaagtggaaactgccttctccacgccaagaggacaattcttagggaaccacaccgcgtgctgggtcttcccgaggacagccgaagctcaagcgatccctatcaccggacgtctcggacgtcgagaggagcttggaatagttcccttcgaaccatcatcttcattacccaagatcgccggtaatgataacacgacaccaccgtcgtttcttccagccgaggacacaaacctacgggtatcaccagagataggaccagaaaacacagtttggtacactgattgaatatatagccatgggccaaacataggaaatggaatcccatctatgttcgcaaccgtcaccggcgacattagagaacatcccctgcgttggtgccccaggcaaccgcagaaataacagaagatgcctaatttttcatattttacttgaacccatctcttgaccccagaagctaagtcgaaaaaacaacccgaaaacagaggtttttcgacctcgatgtccacctgcaccttgagaaattttcgccataaagccggcctatcttcctctagctcaacttgcaccaccttaccagccaactcccccaacaggtaaccattagccttagagaagtattcatgggggagattatgtatttgaatccatacacgcattactttaaagtcaattggtccatcaatggacggagtccaggctcgaagaatcagggtatatccacgcacacaccatggtccattgtccagggcccagttcctatgttcagcacatttaaacccgaacttgaaaacattggatgtcttctcttcatccaccagagccactactgaaacatgcatcttccaggttttggccacaaaatcagttacatttatttcctccaccaccatgggtgcaactactttcccaaacaagcagcacgaggctagagccttgagagaagtatcagaaggagataggttgacagaggtttcaaggcaagaaaaacatttgcctttatgaggggagttggaagcaatgattaactccataaatacccgacaaagagaacaaagcaaagcttaagacaaacaaaacaaacccaccaaaccgaatcttaccaaccacactaaataccaaaataaaccacccaaaaacgtacgaggcaacaagcttacaagacaccaaataatacagacacacactcaaagaaaagagataaagcacaaaccagccaacaaaccccaacacttcttaaaatgtaaccattatggttacaataaaaatgtaaccattgagtagtcacctatatatatatggaacacttct

SEQ ID NO: 30263 - DNA, 2037 bp, Cannabis sativa
  modified_base (1955)..(1955): a, c, t, g, unknown or other
gtgttctatgttatatacaaatagatcttgggttaattgttaatttatctaacatggtattcctttatatttgtttatttaatttaggaatggaaaaatttgattaaataatagagaaaaaaagaaaatactttcccaccaaattttttaagaatttggtacgcaagattgtattagattggattagaaaagattggactggatcgaactaaataggattatgttgaattcatgtttggttatgagttggattggatttttttttatgggatatttttttacataaaatgccatttttttcactttttaaacatttatacggttttatactttcagtttttatatttaccattttttaaaacaaatatacggttattatttaaaattttacaacaaatatggttttgcttatgtcacttaactgcctacacgtttccctccattctgtcaaatatcaatcactttttctgcggttatcactctctaacgcactctctctttattatctttttattttgaattccttctccttcatcattctcatcatcatcatcatcttcttttttttttttctttctttttttttttctgagtggtctttattcgtttcatctttatttttgagtaatggctgttactcgatctcgttcaagttcattgtccccttctcctaagaaacccaaaaaaaaaaagatatattaaacaatctaaactaaaatctgttgttaaaaaaattttgaaaccccctaatcagaaattcaaagttgttgttgatgttggtgagccatcatctaagcttcctgattatatctttggtgatactaggaaagctaagaggaagagaaatgataatgatgatgatttcgttactgtgcgtcctagaaaagtatttttgaattattttttttttgtttttttgttgatttgttattttttttggttttttatttttaattcaaatgttttattatctgtttattttttgtttatttaattattttttttggatttagggttttttttctttgttgatttgatgttgtgggtttcaattttaattttacaaattatttttatatgttctctgtttcgttgtttatttgtttatttatagttttgttcatattaatttgttcaatcctaagttatgttttatctgtattttttttttgttgatttttgatttatatatattgttactgggttattcgtattttaacttataattttttgtaatattttttttttcatgtttttcttcaatttttgttggaggttttttttaggattttttttttatcaagaatgtgattgttttcatataattttgttattttttatcgaattatatgatatttgcttatttgttgattttaagaattttttgtttatattttgtttattccttgttcctttgatgttgtgggttttattttccatttttcaaatataaatatgtataatctattttttattggcttttttattttttccctatttctgttttttttaagtttatattttgtttatttacttgttctttcttattatttgtttatgtattgtttatttaatagttgttgttgttttactgttttattgattttactattttattttttcaattatgggataataaatttagtaatgaagattttcatactacacgggtgacttctacttgttattttcaaatcattgagactatcaattcaattttgtcagaaggaaatgtttgcataaactatgtttggatgctttttaagaactccttatgttttgcaacacaatttttctatagtttgttgttgagggaggtggtccagctgaatgataatgagatgtgatttaatgttgctggttggatgctaaggtttagcgaggaattcgctttggttttaggccttgattgttctggtcaatgtaacaagttgaggtataaacaagaaaaaaanttgttgaaggagaagatttttgctggttttaaaaaaataaacaaggacgtggagaaaattttgttgggaaaaggttcggcga

SEQ ID NO: 30264 - DNA, 1701 bp, Cannabis sativa
acatggagcaatcaaatccaggtcaggggagctgaaattacatgaacatctcccctaggagtcaacttgggcaccaagggtttcacccagggcccactttgatatccccatcaagggtttcaatttttgagacagtctcagtgtaaatgggtcaaattttacattgggatacgaactagacataccatggacatattagaggtataaaaattagatttggagaaaattcatttgtgagcacccggagcactcagtgctcgggcacacagcgcccaggttgacaatttgccagcctaggcaactttcaagtataagatcgacgatctgacttttgtatcatcttcgtcttcatcaaaaatatggaaataagtactttcggggaagaaacaacacttctgaagtgccagaagcaaggcctagcgcccaggttgacaattggccaatctgggtaacttctaagtatgagatcgacgatctgacttttgtatcatctttgtcttcatcaaaaatgagaaaataggtactttcggggaagaaccaacacttcttgagtgcaagatgcaaggcccagcgcccacgttgacacctagggctagcctagggcccaagttggaattttgtcaatctaggcggatttgatgatgttttccaagaagtctttcgagcatcttctctgttttcaacaaagattaagattcaactatttttggagaccaaacgaaacttctgaaaggccatgaaggggacccaccaccttggttgacacctggcactaggcctagcgcccaagtttacatattgtgaacctaggtttttttccaatcaagttctcaaaaaagtgttctggacattttttccgtcatcaaaaatactgaagattcaagcaaacttagggagaaaaccaaaaacctgaggccctagaagcacaacccaacgcctaggttgacagtcaacttgctgcgctggtttcaatcattcaaatgcaaaatttgatccgagcattcaatctaaaatggtaaaaatggggtaggagacctcttcctaaactgaaagaaccttagaagtatcaaaatgacaatccaggagctcgaaaatgaagtacacatcacccaggttgaaaagtaggctggtgcgctaggttctgcttatccgattttgattctgcctcgatcgttcgtctagttttttacaataattaagatctatgaagtcagagaagccaatttcacaacttcacatttctcatttccaacttgggaaaaccattcgaaaatgaagagtttcaagtctcttattttcgcgaaacagcaacatctctgaacactagtgactagcttcgctagaacacatgatgtcaaaatatcacttaggcaccaaaaagtacatccctaggatgttttaccattcactcagcgtccaggttgacatcatatgtctatctgggggttgggatgtcaacctgggtattggatgtcaacctgagtgctgggcccagaataaccttcaataaaacggtcataactcactcaatattgatttaattgacgcgattcaacttgcgtttcgaagctaattcaatgctctatcaagtcattcctcagagttcaatcgcaattctgaagttctcaatctcaaatttcactcccaagggagttacaaaaatacgctcctggttacccagagtgggtcccgcgcgacccg

SEQ ID NO: 30265 - DNA, 2281 bp, Cannabis sativa
agaagccactagaaaatccatctggacccggggatttatttgcaggtatgctgaatactgccttttttatctcatcctttgagaaatcctgtattagaaaatcagactgacttgaagaaaggatcgggccattgctgagaatattattgtctactaccttcctctgctctctttttgttccaagtaaacttttataaaagtctaggaatgctgctgtaataagttcaggatctgtaactctgctgccctcttgattctctatggaaaggatttggttttgccttattctatgcttaatgcaagcatgaaataaggcagagttcgagtctccatcttgaatccactccactttagctttctgttttaaaaacaaagagtaatcctgctgtttttggttcaaatactcacgggctagtctttcctgctgatgtaaactttcttcaagaggctgctgttgtagttgactttgaatactgtcgagagaagacttggcctcatgcacctgctgatgcaaatcacaataagcttccttgtttaacttcctcaatctctctttaaaaagctccagcttgcaaacaacttgatacattttactacctgaaagtttcaagcaccaactgtcttctaagaaagagtcatacatttttcttatgttattaagaataaaaaatgaaggtttaatagaatagctacttataaggttaaaaattatatacaaaaaataacaaaatttaaaattaaaatacaatatttaatataattttataatttaattattattaaataaaatataatcccacgcgaagctcgattggtttctaaattttaagtaatgcataaattttttttatacgttattccaatgtttgtgaaaatagaaaaataggaaaattttgtggagaatatcttgtctaaattagaaaaaaaaagaataaaatttatttagtcatcgtaccatcttatcaataaatacaaaatataattaatggtcataggcgaatgaataaagtaaaatgttcagtggcatattatataggtttagaagtagattgtctttctattattcgtgttaaacctattttaatttgacttgtataccaataaatagtaatatttatttattaggcaaaaatattattgttaccttactgttactattttattttacacctagtttattgaaagacagtttcttctgaaaaaaaaaaacactggtgtttttaatttgaaaaatgctaatgctaaatggcatatgttctatgttacactaaaaatgttattggtagttattagtaagaggagtgttaccgtcaacctctagttacaacctcttagttaatttccacactctaaaatatatgtaggaatatattttttttatttttcttttattcacgaaggtgttcgttatgcttacaacatcatccctctaaatttttgaatagtttaccgtggtgaaaatacgtttgaaattttttgaacgagcgtggtaaattagaatatcataaactctattttcgatactataaactatttagaatttttcaaaaaaattcacaaagatgatactgtaactataacgaatactgttatgaaaaaaaaattagaaaaaaaatatttcggcatataatttcggacgtaaaagttaactaagaggttgtaatagaaaattgtaattagcattcccttattactaatttactaacagttttgtgaatttttataattgtaaagtttaatggaaacaaaatgaaaggataaaactttggtttgtatgagagattagtattgtctcgaagtcggatcccattttcattggtgcatttcatctatcattggtgtgctaacactaccccaaatattgtgaatcaactcaagtattgtgaatgtaattaagtatgaggaagtatatattataaaagatcacttcataaagcgtaacttttttttttgataattggagcctcagagagccaccaagaccagaataaacacaaagagcctcataaaacgtaaccttaatatatctgtactattttaattttagcttgagtaaagtaaacgtacattcgaacttcaaaagcatttaagttagcaaaaaaagaatttctaaagcaatttttttttaaaaaaaaactgaaagtgataatgataggttattccaaggaattattatattgattctttttcaatattttgtttttttcgaggaatataatatttatttatttggtaataaacttgaatttagacttaaatttaaaaaatcagtaactggcga

SEQ ID NO: 30266 - DNA, 3456 bp, Cannabis sativa
  modified_base (569)..(571): a, c, t, g, unknown or other
tttctacagatttgacaaggcctataccaacaactcaccatcacaaagcaactctggataccaagctcagatgcaggcacatttggccagttcaaactctggttgggactcgaattggtaccctgactctggtgccaccaaccattgcacccctgactcccaaagcatcatgacacgcactgaaaacactactcatcctcttttacttaacaatctattacatgtgcctgccataaccaaaaatttgctaagtgtttctcagtttgccaaagacaatgatgtctatttccaatttcttgctgatatgtgttttttcaaggaggagaagactcatcttaccttgctgaagggacaccttgtgaatggcctgtattcttttgactcttctcaaatccagctgcactctcctgatttgaatcaaagtgcttcttcctcaactcaagccagtgcatacctcatcactcaacctcattctggtgtttctcccactgcttctattcagtgtttgtcatgtgtcaaatgtaatgccctattattttctgaatttagtttgtggcataacagacttnnncatccctctgaaagggttgtcaagacaaacacattgacttcaataaaaatacgccttccttatgttctgcatgttgcttagggaaaatccacaaacttccttttcccaagtactctacactgaatattcagcacccctgcagctggtggtgtctgacttgtgggggccatcttttacaccatccacaaatggatataagtattacatccatttcatggatgtgtactctcgtttcacctggctttatctgttaaaaagtaaatctgaagccttgaaaatgtttcaaattttcaaagctgaagctgaacttcagcttggtactaaacttaaatctctacaaacggattgaggggaagagtacaggtccttcacaccctttctcaaccaactaggagtcattcatagacatccttgccctaccacacatgagcaaaatgttctacctagaagaaagcatggacatataatggaaaatggcttgacacttcttgctcatgcatctatgccactgaaattctgggatgaggcttttcgaactgctgtgtacattcacaacaggttacctactcctgttcaggacaacaaatctcccatagaggtcatattcaacataaaaccagactatctaagtctcaaaacctttggttgcacctgttttcccaacatccgaccctacaataagcacaaactagagtttagatccactccttgtacctttgttggttacagtctgaaccacaaaggctataaatgccttgatgcctctgggagattatacatctcaagggatgttgtgtttgatgaacacaacttccttcatgctcaacaccctgttcccatcgtacctgtttccacaccagatacttgtctcacatctggtcacatacctaactttcatagcactgcttttgatctcacaaatcaccctcctcccagacctgttgcatctgtcccacactcttttcctaacatcatgacagaacagggtaatgaagtcactactgaatccccttgtgtctcagctgagaatgtgtctcagtctgaatctcatgggcctgttccatcaccagagattcttcctgaatctcaacctgttgcaccaaccagtaactccactatatcagatccttgcccaagtaacactcatcccatgaaaaccagatctaaatctggtatttccaaaccaaaaacctacatggtgtgcagagaacctctcaccttgaaagaagcattgcaaaacaagcattggaacaatgttatgggtacagaaatagtggctctaaaagaaatggtacctacactttgattccattacttgcagggagaacaccagtgggatgcaaatgggtgtacagaatcaaggagaatgcatatggctctgttaataaactcaaagccaggttggttgccaaaggtttccaccaacaacctggttttgattttacagagaccttcagtcctgtagtgaagcttgtaacaattcaggttgttcttattttggctcttactcaagattggactatgaggcaattggaggtggacaatgcatttctaaatggagacttgcaagaggaagtctacatgattcaacctcttggttttgaagatgagtctgccccacacttggtctgtaagcttcacaaagctctgtatggactaaaagctcctagagcctggtttgagaaacttcaacactgccttctcactcttggtttcactccttcaaaggctgatcattctttgtttattcagcataccacaacatctacaacacttattctagtgtatgtagatgatatcatcatcactgacagtaaccaagatcacatttctcatatcattgttgatctcaacaatcaattctctctcaaagacttaggcaagctaagttactttcttggaattgaagtttctcacactgataaaggaatgcatctatgtcagactaagtatgctaaagacctactgtgcaaggccaaaatgcagggagcaaagtctatttccacaccaatgacaagtggcctcaaactttctgcatatggtagtgatcctgttgaagatcccaagctgtacagatctatggttggtgccctgcaatatcttaccatcaccagaccttaaatagcatacagtgtcaacaaagtatgccaatttatgcaaaatccttcacaggctcattggactgctgtcaaacggatattgaggtatattcgaggcactttggattatggattgcatctcactaagtccaccagctttgatctcactgggttctataatgctgacttggcatcagatcctaatgacagaagatccacttctggttttgctctgttcttgggaagcaatctcataacgtggcaatccaagaaacaacatactgtctccaggtccagcactgaagcagagtatcgaagccttgccattatcactgcagaaattgcctggctgcattctctcttctctgaactgcacattcatctgtccaagcctcctgtggtgtggtgtgataaccttaacaccattatgcttacactcaatccagtcttacatgccagaactaaacacatcgagttggatctctattttgtggagaaaaggttcaacagaagcaattggaagttaagcatgtgcctgctttcgatcaagtagctgatggtttgaccaaggctatctcaagctctagatttgacatttttcgaaacaaactcaccattggtagtaataccaattgtaagtttgagggggcctgttagaatatatcatttgcttgagttagtttcagttagttagaaaccttttattagttagttggttgttattttccagctgtctcttatcaactaacttgtaactgtttatgttattcttgatctgagtgtaag

SEQ ID NO: 30267 - DNA, 2370 bp, Cannabis sativa
taaattctgggtccgccactgcccgtgctgcaacaaggtgaccaagatggtttcgggcaataattctgaaaccatacttattgtcgtgatttttatgttaatgcgcatagcgcattgcatttaagggagtttcttaataccttaacaatccttagcaacgatgtattaaattgtgtcccttgagcttttattatttgttagtaaaattagaataaaatttttaaatttaataattttaatagtttgagaaaatttttaacggtctaaaaaatttgagaccacaatttaatacatattaaagttaaggagaaaatttttaattagcctatatataaatatgaatctaaattatgattctttcttaatctcacattccatactagtccataccataaatgctttaatgttatcattttcatgtgctattattatttttaacaaaaagtgattaaaaattatatttttaggagtaatgaataattatttagcctataggtacattgtgttgtacttatacccatttaaatatgcataattacttccctaaaaaaatgcatcatgaccataacccccaaaaaaaaacacctttaatgaaagtagtacataaaatattgatatttatatatatgtttaaactctacgcacgtttttactataattatataaattatataaatataattatttggtaggtgtatgcttttggccccattaataagtacttttttataaaacaaaaaaaattataatttaattcctttttatacagctttatacattgtaattatttaaaaaaattcaataatttatattgcaaaaatagacatgaaatatggagtatttttattttcttttctttttttttttttttttgagaaaaatgacctattttacattatttttaagtttttgacacataaattgattacaatgttaacttttttttatacgacgatatataatatagttattagaatttcacacaaattttttagaaattataattaattcaccatgtcaaaaatataaactatttttttgaggcttgttaaaataaaattattttgaaacttattttcggttacataaattatttaaagttttataaaaaaaattaataaaatatctaaataattataataaacattgtcataaaaaaagaattaagtgacataattttttgaaatagaaataggaatgccctaattgctccattttaatatcatatttaatttaaaattattaaactcatcattaaaggtgtcattgcctttatgatagtacactaatctttaaatatattctacattataatattatattatgggcatgtgttattttattttagattattttacttcgcacgtgttaatttttttcttcgatgaatttaatatattttgtcttctttttttttttgaaagggtcaatttttgctttccaaattgtctttatttgatcctctttcatctttttttgctttcacattcataagtttccaaaaacaaaaaaagatacaaaataaaacaaaattataaaacctcgacccacataagcatgtgcacagtccacaagaatttcttatcctcatatatataaaagaaaatataatattatattatatttgtttgagattttattatgatagaagaaaattaagatacaattttaatgtagaataatataatgactaaaataaaagattgattaaatatatgttacaacacatatatacaggaccggttcaaattttgggcagcttggggccattgcacaaagtcactatttttaaaagctttttttatagaattttttttattattattattataaatacattaaaacatttatatataaaagtctagaaataaaaaactagtaatggaagtcttaatgtacataattttttttacaaaaaactcaattttaatcttttgcacaaagccctcaaaatatttgggtcagcctatatatactatatataagggtaagttaaaatatactttttttcatcagttaatcaaaaatagtcttatttttaattcaattgaaatgtaccctcttttataagtttattaccgattatacccttacataagggtactgttcagggagatgaggaagattttcttcattacataaggatataatcgggatataacaaataaaagagagtataaattaaatatataaaaaagaaaggataaaaatgaaatgggttaacaaaaaaaaaagctatagggtgcaatttccacttatatattgcatatatataaaagtagaagaaaaataatacatgtaatataataatctatatatatatataacaatatagaagaatatatatacacctttgtccaaaaagcttat

SEQ ID NO: 30268 - DNA, 1655 bp, Cannabis sativa
  modified_base (26)..(26): a, c, t, g, unknown or other
aggatgttaataaaacatacttggtngtaaatctagatcctggtaaaaagatttccaacattatattggtttgcctaatatcttgggtcggtctaagtctgtgattctaggattcttgaaggatagaattcggaaaagggttcaagattgggatgggaagcttctttcttatgctgggaaagaggttctgattaaaacggttgctcaatcattgcctacgtatgtcatgggtgttttcttgctcccaattgatatgtctaaagatttggagaaaattatgagtaagttttggtggtattcaaattcttctcacggtgatggtattcattggatgagttgggaaagaatgagtagatataaaaatataggtagaatgagcttttgtaatcttcatgacttcaatttggcaatgttgggaaagcaaggtggcgtttactgacataaccaaactctttggtgagtaggttatctaaggctcattattttctcaagggtaattttctttcagcatcccttgggaataatccaagttttttgtggaagtgtgtctttgaatcacatgagcttcttaagtctggggttcgttgggcaataggttctggtgggaaggttggtatgttgcatcagccatgcttctggatgatgcgtgtccttttgttacttctgatacccaagctttggtgggccatgcagtgagctcgttgatgtgtactgataagagggaatgagatttagatattattaaagaacttcttaatgagtgtgatcaacaacatatttcagcggttccattggtccaaatgtagttaaggatcgttttttctggtgtaaggagcatcatggtttctacttggtgcgtagcgcatacgagttaatacaagctcatatagaaagttggattgcagccgagtcttctgggttctagcacaagctcaagaaattgaaggtactaccaaaagttctcaatttggtatggcagaatgcttcaaattgtttgcccaccttgactcaattaagtggtaagagggtcctaattcaaattatgtgtccaatttgtcaaaagggtgagcaactatttttcatgcgcttatttcctgttcgttcgctgctcaatgctggcagaggcttttggctggggttaggccgattgttgctgctgatttttgaagatggcttgatcaaattttgcaaaggtgtagtaatagaaagtgtggggaggttgtttgttgtgctgggagttgtggaaggctcgaaacgatttggtttgaaaccaaaagtatgctacggtggatggtgttcttatctcatctacaaattgtcttgtacaatgaaagtcaacccaaaatagaggttcaaatgcttctttttcagtttttgaaactggtgatggagttgaattttgggtttagccgcaagagaatacaagtaaggtaactattgatgttgcaattttttgtgatcgagctgcgtttgattatgacatagtcgatcaggactctcaaggggaattagtgatggctcagtcagacaattttgctggtataggtgcttttgatttggccgaagcaattggtataaaggaagcgctaagctggattaaaattcaatcatggcagaaagtggagctggagtcagattgcttggtagtagtacaa

SEQ ID NO: 30269 - DNA, 1251 bp, Cannabis sativa
gagctctgaaatcgaaattaagaataggtttacaggaatgaatatcgttttctggttggtcacagagctcgagggaagacattcatgtgttttgttgaaatttttttagcaaccaaacagaggaatattaagcgtgtgtgtgtgttcagctaagatttgcttgttattgattcacagagaattgagctttaattgtttgtttacacaaactctgaaattgaaattaagaagagtaggcttaaaggattgtatatcgttttctggttaatgggagagctcgaggaaagaatttcatgtgtttttcttgtttgtttaacttgtttttctcttttctcatttgaaattttcttagaagccaaacagagtaatattaaggtatgtgtgtgtacagctaagatttgtttgttaccgattgacagaaaattgagctttgaatgtttgtttacacaaactctgaaatcgaaattaagagtaggcttaaatgattgaatatcgttttctggttggtgacagagctcgagggagggcattcatgtgtttttcttgcttgttggacttgtttttcttttttctcattttaaatttctatagaaaccaaacagagtaatattaagtgtatgtgtgtactgctaagatttgtttgttactgattttgaatgtttgtttacagaaactctgaaaaaacgaaatcaagagtaggcttcgtttggcataagttccatcgtttttttttattttattttatttttggattgtttgaatatcgttttctggttggcgacagagcttcgatcgaggaagagattcatgtgtttttcttgcttgtttgacttgttttctcgtttctcgtttggaattttcttagtatccatagagagtaatattaagcgtgtgtgtgtttctgtacagctaagatttgtttgttactgattcacagaaaattgagctttgaatgtttgttttctggttgatgacagaaaaatttcatgtgtttttcttgcttgttagacttgatttctcttttcccatttataatttcttagtaacgaaacagagcaatattaagtatgtgtgtgcgagggaagaaattaattttttttcttgcttgcttcacttgttttctcttttctcatttgaaattttcttagaaaccaaacagaataatattaagcgcgcgtgtgtacagctttgatttgtttgttactcattcacagaaaattgggaagactgacatttttggttcaggtggca

SEQ ID NO: 30270 - DNA, 1703 bp, Cannabis sativa
atgacttaatatttttacatttaacccatgtgaataatatattctccagtaagttcatatgtattaatgtatattgctatatgaaatttgatctaaataaagcaattatttagtaattataaaatattattcttatgttctaattaaaatattcatgattaaagatattagtcacaaaaattataatttgttatgactaaatgtgttctcagtcacaatatacttgttctgactaaaactaaattagtaacaacttgtatatgttttagtcatcagtaattttttgttacgactaaaaattacatttagtcataaaaaatttatgttgtgactaaaaagttatcactaaaagtactaatttttttatagtgagtacttagcacattaaactagtgtcttttaactatttctctttcatatatatatataccatcatatcatatatatatatatatatataaaggaaaggatatataaattttgaatacctcgagccaagagtatgatcttatgagctcataggatgcaaaacctccattattgttgtcttgtaaagataaaagaatatgaacagcatccttaagatgatcctcttctatgccttctcccacaatctcacaagccatctctgataataaaattgctgcctatgcatgcatatatgtatatatgtacatgttattataataataaaaatgcatgcatgtaatgtaacaaaaactatatgaattgcatatataaatgtataaatatatacctctaaagcttcagcagtacaatcagagacaatccaactattgtctggagttgaaaaagcccatcctccctttgaaatgtggcgataccacttacttggattacccccactgttttctgatcttatcttcattattaaaaacaatacaaaaattaaattacttaattaatatatatacacaaaaataaataattgtataaggttgaatgaaaattctattaatcagttaatataataatataattgctatgtttaatttgtgatagcaattgaaatttgttttgtattaaaaaaaaaagcatacatattattttgacaaaaaaaattagactatatactcattttcattttttttttgttactctttaatttatatttagttttatgaccttctaattttgataaattatatgagattatatttagtattttaattatgtatttatcaattaaaattattttgcagttatatttaattaatgtgtaataaaaaaaagtagttctcaacttatgcgcatcatgactggttctaagaaaattcacaataagcatgtacttagagtccccaccctatgagcccgcaaataaaaaaattattttattttaaatataataaatatatttttatctgtacataaatcaaaatgttatattagtataatggcaaatatatatgagaaatgttaaatggtactggtgcctaacactctcctacgtgttaatattactattaatgtaattaagtattgggtctcatatagtttgatataataacttttatggagtatggctaactaatcgcaaaatgatatatttagaaggtgctaggcactctattagtacccaataacaatgctctgtttgtatacacaagattttgccccattttcgttggcagggtcctggtatgcatgtgatgatgatatatatatattatatacattta

SEQ ID NO: 30271 - DNA, 2697 bp, Cannabis sativa
  modified_base (2645)..(2669): a, c, t, g, unknown or other
tgaagatgataatttctgcatttatcaaggtttcgatcggctgttctgcaggaggaggaatatcctgaatggagggtcgaaaactgccatcaaggaactcggagcagatacatttaattgcaccaagagttatattgatatctgcaactcctcttttgaatttaaccttatttctgcacttccaaatctgttgaaaaacacagccaacataagttatgacctccaatcttggagtactagcaagcatcgggactaagatttctaagaattgagccatactgttgcaaacaatacgatccaccgagacaggaaagaggcctgcaaaccaaatagccttagcaaaggcacaatctttaaacagatgaatcgtgtcttccacatcattcccacaaagacaacagccgaaacttgtgaaggtggcaagtctatgtccagttggcagagcatcactgagagccttccaaagtattatagataacctggggtgaagtccaggatcccaaatccacttccaaatatctttcctgggtctaaaccgagttctctgatcctctaaataagcatccttaacgctgaaacgatcgtgttttcttcctttcaaaataactctatcctggtggggataaggaattctgttaatggtaagaatttgatcacccaacgcgtctccaaagatttgtctcactaactcctcattccacgcatgaccagtggagatatcggccaaagtcttgactgtaaacccacgatccctcatggtatccattactccttgaaactcaacaaacgacatccatggtatccatgcttgcctccagaaatcaatatgctcaccagcagtagcaagagaaattgaacccttccttatcacatctctagtctctaaaatgtttttccaaagggccgaatcacaacttttaggtgtcacctcccagaaattttcataacggcaatatttacttaagaggcaagaagtccatggtttctccacacgactggccagatcccaacatagttttaaaatgagggctttgttaacatcctcaaatctcctcaaccccaaccctcccgactctttaggttggcatatggtatcccaagaacagagagctaagaatctatccttcttttcacttccaacccaccagaatttatcagaattccatccaactctctacaagtggtaaccgaaattttggaagtcgacattgcataaattggcatggaggataaaaccgattttaccaaagtcaatctccctgcagtagagagaagtttagtcttccagccttcaagtcttctggtcatgttctccttcaagcggttatattcttctctcttccttctcttgaaaataaaaggattccacaaatgtctttcatctccacgaactggagagacattcagaaagtttaaaattgaagatcttctatgcatatcaaggttcttagaaaagaagaccgatgacttgtgcttgctgcaagtttgtccagaccatgattcatagattgataaacacttaatgatctcctgtgcttctttttcatttgctcgagcaaagagaattgtgtcatctgcaaacataaggtgtgaaatagggggagcattccttgaaatctttataccatgaatcttccctttctcttcagcttgtagtaagagtttcgtcagaacttcctggcaaagaatgaagatgaacggagagaggggatctccctgtcttaaaccacgctccggggtaatcttctttatgggactaccattcaggagaactgaataagacacagtacaaatgcactgcataattaggtgaaccactctattacaaaaaccattggccatgaggactttcgaaatgaatctccactccatcttatcatatgctttgtgcatgtccagtttaatagccatcaagccacctatgccttttttgttcttgatcttgtggatgagttcccgagtcaagatagaggactccgctatccaacgaccaggaatgaagcccgattgaacaggagacaccaatttatccatcaaaggtctaagcctattggaaaggatcttagtgacagtcttgtaaacgaaattacataggcttaagggtctgaattgctctaccttctctgggttatcaattttcggaatcaaacaaatatatgtgaagttcagttttttgttcatatcccaagtgatgaaaaaatccttcactaaagcacacacatcttgtcctactattccccaatattttcgataaaaacaacccgagaagccatcaggtcccggggctttcaaagggtgaagatcaaatactactgatgcaatttcctcatcagaaggagttttcagcatattttcattatcacccggttctattaatggggataatatgttatcaaagtcagaggaaatatcaggttggcatgaagtaaaaagatctgaaaaataccgattgataatggttgagactcttctcctgtcttcccaaatctgaccattttcatccttcagagaccatatctgattacgccttcgtctgattgaggtagaagcatggaaaaattttgagtttcggtcacccaatctcagccaaatctctcttgacttttgccgcatcatactttccttgtaacaccctaactatcttnnnnnnnnnnnnnnnnnnnnnnnnntactgtgcagctcgttgctagtcaacga

SEQ ID NO: 30272 - DNA, 1591 bp, Cannabis sativa
aacaattacgatttatacttttttattattattattatagtgttgtctacctaataaaataattataatcatatatttcaaactatttcgttttttgatttacgagtatattagatttatactgacatgacaataaatgatatgatttgcttacacttgtataagtggaatgtcttttcatgagcattagcaaaataaacttgtatcaaatgtattggttatacattaaaatggactgatattgaccgtagaaaatgtattagaaatttatcgttatatcttttctaaatcaattttacttagttgatcttagatcaattaatctcaatcctcagatggttaaactttaacctatagtagtatttgagatctttaatttgttcattattaggttacccatcggactaacccatacttacatcttggagactcggtaatgcaattgagtgggagctttcattatagatataaaatttatagcttctataactatttagaagtaaaacgatagtttacttagaaattgactaaacgagataaatggaagaattcttatttaggtaattatattagtttactgaaatatcatttataaggagctaagtgttttaaggataaaatacatcgataggtaaaactaaaaaatttatccctactcgatgtaaattgtctatagatgatcattggttatttaaattgaaacaatagataattcatagcgtttttatactgaatatatagagcgttctatgtaataaagagtgcacttctgaatctatgcttgagttaggaggaattaataagttagaaaatttatttagtaaatttcatatctacttattgggagctcgatttcgtaggcccatggtccccacattatctggaataatatcatcttgaagactcaattcattaatttaataagtcaattagaattcaaaaatagattgtcttatttgagaattttcactaaggttggaccaatttgagaaaaaaaaaagagagagagaaataatagtttatttgttaattaagacactttgtggtctaattaataaatatatttaatttatattattgtttgataattattattaaacattaatatttaaataaatagatttaataagtggtaataaattgaaaaaatgcaatttgtttcatttaagctaaattggaaaaaaaatggaaaaaatcaaagtcatggttcattcttctaaggtttcagccatgctatttaattgagtccaattgtctttattttagcccatatcatttatagttaaccctagtgtaatattatataaggaaagagatgagacagctttggaagacaactcattctatgtgatacgtagcctaaatctgataagaaaaagctctctctatttctttctattattttcgaaatagcctagtttatttctcttctcaaaatcactccaatagtgagttgagtgtcaacccatactattcaaagtgatactcagatttttatggaagatcatgcagcttttgtcgcttatcaggtttaagaaagctattcagatgcatcacttggcaatgtcctgctacagaaagggaatcaaag

SEQ ID NO: 30273 - DNA, 3526 bp, Cannabis sativa
  modified_base (3479)..(3500): a, c, t, g, unknown or other
attacaacatcaaactaaacacatagtagttaaatcaagtcaagtaattcaaatgcaagagaagaaaaatgtaatgaacacatagatcgaaacatagaacttaagagacaaaacaagaaatttatattggtttagttcaaaatcgatttgacccattttcttagtccagtttaaaagcactatcgcccttctttattgattgaaacagcaatatcaatctcaagagctacaaggaaatagtctcagtaaatcttttcatggcgtagtcccttaatattcataagactcacaatcttggagctaacatgttcaatgaggagtaccaactccttttataggacaatggaccgaatataccaattgagcaagacagtaaagttagtttgaaatactaactaacaggatattagctggagatttaaggaataatttcatagttaagctgtcaattagagttttttcatgtttccaattaacttggcaaatcaatattcaatttgagttgagaaggaacattatatttctcatatgaacaaaccttctcacactcagctttgagtttcggatcaatattcaacccaaactgcctcttataagcagcaatcaattccttcgtacgagcatctttagccgctctctcttcggctgtttcaagcgcttcatcgggattaatcactcgcccaccaccaaactacaaccataaaagataagtttcaccgaattcaacaaacaaacaaataaacaatcgaccatataccgttttcgaaatgttgctcggtctaggaaatactccccaagaagacacctttggcttgtaaacatcagacaaatctccttgagcatcaacatttgatgagtttgcatcatcaatgaacttacttgaatctccaacgataaactccacctcaggaatgtctccttctggaaaaggatctgagattggagctaacccggctggaagccccctaccagtcttcttatcagcaaagtttagtcccacaaaatcaaggcttgaaactgaaagctctcctttcttgccacctttcttctccacagtcccaccacttgaattttcaccattttccttcaatcctaaaaagttaatgggcactaattttaactcaaattatcatcaaaaaatgaaaactttacataaataacaacctcagaactatcaataccatcttcaatgaactctatctcaactaaaatacctgaaattttgtaaaccactaattttaactcaaattatcataagaaaataacttttcactaataacaacatcaaaaccagcttcaatgaattctattataactaaaaaatcctgaaattttgttcttggaaaccactaatattaactcaaattatcatcaaagtatgaaaacttttcacaaataacaacctcagaaaccatcttcaatgaattctatcatagctaaaatacccgaaatttgttcttggaaaccactaattttaactcaaatatcttcaaactatgaaaacatttctcaaataataaactcagaaggtccatcaaaaacagcttcaatgaactcttatcattaactaaaatacttgaaatttagctctaggaaatcactaattttaactcaaaattatcatcaaaatagaaaagcttttctcaaataataacctcagaaccatcaaaaccagcttaaatgaactctttcataactaaaatacctgaacttttgttcttggaaacaacaaattttaactcaaattatcatgaaaaaatttcacaaataacaacctgaaatactcaaattatcgtcaaaagaagtaaacttttcacaaataacaacctcaaaaccatcaaaaccagcttaaatgaactctatcataactaaaaaacctcaaattttgttcttagaaaccactaatattaactcaaattatcattaaaaaatgaaaactttcacaaataacaacctcagaactatcaataccagcttcaagaaactcatatcataactaaaatacctgaaatttcgttcttggaaaccacatctgactcgggcattttctcagtcacatcacgagcaccattatcaattttcaaatcaggggtggactgagtcgagttcttgtacttcatagctttagcaaaagcaagcttaactgggtcaacaggagccgttgactcaggctcagattttatgtcaggtgaaatgggttttggagattgagattcatttaaagaaaaggtgagtttgaatggcttaaaggtgtgaactttaatggtggaaattgtagtgttgaatgaagaaagatatgaagcttgaagggtacccatggatatggcatatggaagttgtttaggagttaatttgtgtggtggagatgaagcttagaagaagaagaagaagccattggaattttatcagagttcagaaatgtctggtttttcagttacatttgggtgtcgtttttaaagacaaagtgtcgtttgtacaaataatttgtgtttggaaaattataaatggggtaaatattactctcaatgcacccctaaagggatttcaccgatgcacccctatcggttatggcatcttagagaattttttagttcaatttttttattattgtttacgttgtagttatatttaacacattttagggtggcaaaatgtatcatcgtgttatgttcgtgccataatttatgtgacccgcttttatatttcgtgtcaggcgcgttgacctatttttttgactcgtgtctaattttctcaatcttaactcaacccgtaaaaaatcgtgttgtgttagtgttgttccattttaacctgttttgttattattgaagttgcagttgtagagaaaaataataactttaagttccattagaaaatttatatatatttatgtatttatagttttggctgcttctagaatacaccccttaaaaaggatgcactgatacaccttctatttgtttcggcattcagaaaaaaaaaaaattaatccaatttttttcatattcgtgtacgtgataattatttaagatattctacaaaattttaaaaaaatcgaaataatttacaatataaaaagtagtattcaaacaatctattttacatgtgtataaaataaatagtcatacgtacaacacactatttgaaccttgttttcaaggtgttaaatttttttaaatttcttaaaattttacaaaatgtcttaaataattagacaccaaaatagatagaagtgcatctatgtattccttttaagagagtgcattataaaattttctaataattttttacatatgtaataaattaaaattataaaaatatttttaacttcattttaaagaaaattaaattaaaaatattttaacttaacattaaataacttaatatatattttacatgccaaacgtgtcaaatttgtgctaaacgaaacatattggtgccgtttggtaacactttcgttttttaattttttaatcacaaannnnnnnnnnnnnnnnnnnnnntaaaaaatttatttttaaaaaacaaa

SEQ ID NO: 30274 - DNA, 3087 bp, Cannabis sativa
  modified_base (46)..(78): a, c, t, g, unknown or other
aaatagttttcatgtgtttccaaagcatattattattattattatnnnnnnnnnnnnnnnnnnnnnnnnnnnnnnnnntattattattattattattacgtagaggcatgtaataatattaattgtgtacataattattatttttattatatatataatatatgatcattattctataattttctacatataatttaacaaaaacatgtagcatgcaccaacatactcactcactccaataataatgatgatacaatactatattatctataagtagagtttgttcattcagctaatgaatattatacatcaacaaaatgatgtgatgagctaatattttatggggtgtgtgtggcagggacaacgatacggtctaagccagcaggtggtgaactttgagattaatttaagcgagttgagattaatgatgggtgcaacgaacctaacacagtatttggctaagtctatagccattgttgtggctggaagcaatgactacatcaacaattacttactacctggcagcctctacagctcctacactcctcacgactatgccaacctcttgctcaatcgctatgcccgacagatggtggcactccacagcgtgggactgcgtaagtttttgttggcgggcataggaccattggggtgcatccccaatcaaagagctactggtcgagcaccgcttggaaggtgcgtagactcagttaatcaaatgcttggtagcttcaatgaaggtctaaagtcacttgtagaccagttaaataccagataccagggtgccaccttcctgtatgctaacacttatgctgtttttggtgacattcttaacaatccttccttatatggtttcaaggtaatagacactggttgttgtggaatagggagaaatcaaggacaaataacttgtctaccattggcaatgccatgcgctaatcataatgactacctattttgggatgcattccatcctactgaggctgccaatgctgttttcgcttggcgcgcatatttaggtccacccaacgactgttaccccataaaccttcaaaagttggcatttctatagtttacttaattttgcttgattttttttctgttgttgttcttcttcctttgatatatttatataagtatgtttgtgttagattttatttaaaataaataaatctttgtatgtgtgttgaatttttgaagatagtaccaaatattgaggctaaatgcaaaaattaataatctcttaattcttttgaccttgtattttgataatttctcattgtacacttttctttgagtactattgcatttaagaaggctgaatttgtttttattaatttagttgcaattacttcaccaaatttatgatttctattagatttattattttgatggtatgaaaatttatttttaaggcctaaaatgggtactttttttaatattttcaattcacctcaatattagctagctccatgggggaatagtttcatctttaattgtttgcttctgctcaatccatcttgctcgatgagaattcgggggcactcgatctcatgatttcttgttcacttatttaatcttattcaagaaacgttataggtgcttgatgatagggtcgaaaactttggccgagtctgacctgatccgtgatcaattcgtctgaacatgacttgtaaatttagtctattgaagaaaacttgtatagaaggagctgcacattaggctaatcctattactaataaacaggcaggatatgggttagttctttaaaacatccacgagtcgggttagactctgacccacccgtaaactgttaatagatattattatatttttaattattattttttattttttaaaaaaagttaaaaaataaacttaaaatgtaaaaaaaaaaaaaccagaatattgatcattacctcactcatctctcgtgtaaagaccgcttaattttagtatgagaattagcagataatgtgggtttagtttggaattaaacttttagttatgatttatgaatttttggagatatatttgaattctaggtgtgttatttatattaaatatgaattttatgattttttatatttttatgtccggtaactgtggaacgcgatgtttggccaatagaatcacattttcttgtgatttagtattttagtaatagcgaggtaagctagatagacatcgagaatgttgagattattcacggtattaggtttgaccgaaatacccctaggtgactttatgctttttggtgtatgtaggggaaaaatggtcttttgccattttgttgtttttgtcctttagtgaaatatgatggaattagttaattctaatttttttttgagttagggattatgctagataatactaggtattattcctctttattcaaaatagaaaaaaaaaatcaagaaaatcactttctctctccctttgactctctctctctcgaaccctcaagaaaaaccagcaaattattgaagtttttcaactcaattcaggatcctctagcaggtctttagtgattgaatgcaagataaaaatctttagcctctctagttgtgatttcttaagcttcaagttagttatgtgcatgatatttgggaattaggattctgagttgttgaggggtgtttgattttgtattttgaagttaaattgaagttatttacgttgatttgagctaggtttgtgggctattatggtgtttgagcaaggtttgagtttaagaactcaagctttgctctttaatggtatttttggtttctgggttgtttattgtgatttattgcttggtttcagtttattatgatataaataggtgttttggagcttattggaagatttggggtagttttgattcgaatagttttatttttatgcattgaaaaacggcttaacgtttttcctggtgcagaatccaaaaaaacgaccagctatttttcaggcaggttccctgtttcgatgtttttctcgtgttttaacaatgcttaggactttttcttacttaagatcaatagggaaacctttagttttgagtttaaagtctcccgaaaatggtttagcgtataacttattaat

SEQ ID NO: 30275 - DNA, 1301 bp, Cannabis sativa
gtctttacaaaaataatgagtgcttagaattagaaaataatagtgatgataatattgtatcaataactgatgataatgatgatgacgacgatgatgaattgtaatagtaataatgttgtaatattaaataataattcacgaatattttattatataatatgttgtgaatatgacaatttatcttaaattttaaaatagttctctatgtatagtatgtctgtagtaggtagaagctctggtaaaaagaaaggggtatgaggtaaatataaggaaaaaaaaaaattgtgaaagaaatttctaaagggctggagcccaaacaacacattacacttcatgaggagacgggcactccatgcgggaaaaatagagaaaagttgaataacatgtgtaaatttcatgtctgccacactattcccatgaataagtttaattgagcacttgcgtccaaagctgaaattgattgagtgtgggatagacttgaggtatttattatattattctttaatttatacttaatgactaattttaatgtgtaactttttttgcagataaagtttgtgtgcccacgagataattgtatttttttagactatgctgggtacgcaatatcaaaatttttgcatgaaacgcatggcaattgtaagaagaggggattgaaaataaggagtcacttggagaggagaggatgaataacctctggtaggagtaacttaggaggtgcgaagtgattgcattgcttattggagtatagataaagaataagtatgtaacgaaattattagtcttaataatactttacgttatagccaacaataaataattactttcaaaagaaatatattaatttcaggcaaggtgagcaaaaaacaaagaaaaatagggtaagatgaaaattcaaggtagataggaattaaagacttgcttaaaaatgaaaaaaaaaatcatgacacttatttctacttaaatatagtttaatttcgagacaggagaactttcaagtgatgtggattgttttcgaaagctctaaagtttgtgcaatgagtacatgcaacaagcttatgtaagtttacattgatatttattaatttctgaacatttctttcaatttgtttggcattcaaattgattatttaatttttttaatctgtaggagaaaatggctgaactggttaaaaatcaaccagcactcacttgtgatcagcctccttaggatgatatagacctcacccaatatccactagacctacctatcatgatgtaagtattgggagagtggcctcgacatttgagaggttttggcc

SEQ ID NO: 30276 - DNA, 2696 bp, Cannabis sativa
tgtatcatcccccctcaagcgaaagggtgttggacacacttgaagcttgtgcttgagataatgaaatcgatcagttgacagtggcttcgtgaggatatctactgtttggtcacaggaaggcacatatcgaacttcaacttattttgctagtatttggtcacgaatgaagtgaaggtcgatttcaatgtgctttgatcgagcgtgaaagactggattggtagctagagaggctgtacctaagttgtcaacccagattattggtgctttaggcagaggaactttgagttcactgaggacagcgcagagccaccttacttctgctgctgtgtttgcaagggctctaaattcgctttccgtactcgatcttgcgacaacaggttgtttctttgcagaccaagacaccaggtttcctccaaagaaaattgcatatccacctgtggatcatctatcatctgggcaacttgcccaatcagcatcggagtatgcttgaagacaaaattgtggtgttggtctgatgaggagtccttcattaattgtccctttcaggtatctgaataaccgtttacatgcttcccaatggactgttgttggggcgtgaattaactgactcaacttgttgataatgaatgcaacgtccagcctagttaaattcaaatattgtaaggcccctaatgtgcttctgtagagtgtttggtccataaatggttctccctcggttagtgaaagcttgtgtgcagagcttgttggatttagagaaggcttagcaccatccatgtgaagtttcaccagcaaatcagagatatattttgtctgggataggtacatgccagtggtatttcaagcaatttcaacccccaaaaaatagtgtaatggcccaagattattgatggaaaacacttgattcaattcctttataagattgttgataactgtggtgtttggccctgtgatgattatatcatcaacatacaccagaagcacaaataaatcacttgcagagtctcggataaatagggatgagtcagatcgagaagcaggaaaacctttttggaataaggtttgtttcagtgtatcgttccaggcacggggtgcttgcttgagtccgtatagtgctttatgaagcttgcagacataagtgggcttctctgcatcaacaaaaccagggggctggggcatatacatggtttcttggagtgagccatttaaaaaagccttcgaaacatccagctggttgattggccatttgtttgttacagcaatagtgagaagcaatcgaattgttggtggtttgacaaccggattgaatgtgtctgtgaagtcaatccctggggtttatagatagctctttgctacaagtcttgacttgagtttgttgactgaaccatcagaattgagttttacccgatgcacccatttgttgtcaaccaatgtcattgaggaatcataaggaaccaaggtccatgttccatttttcttaagagctatgtattcatcatgcatggctttaaaccatttaggatcggctaaggcttgcttgagtgtttaaggttgagttatggtgagggattcaggtaaaggataattggtggctaggtatgctttcggtttagtgattccatttttggatcttgttgtcattgggtgataatttgtgggtggtggaggggctgataactctgtaggagtgggaagaatggtaggtgtggtgatgtgggagaatgaatttggtgcctgggagataggattggtggagggggcagctaaagcattgggcgcattgggttcatttatggttgcagctggggcattgggttcatttggctcatgaatggttgcggctggtgcaggtgcagtgggcagagtactgggagttcttgcagtaacaacaccaacagtaggtgcaacatcatcaggaacagttgagttagttacaatattttccagaggaggagtaacaaatgaagttgtaggaaataagatggagggtgattgttgtacctgtttgtgtgctgatgcatttttttctagaaattcatgctcattaaagattacattgcgagcaatatatgttctccctgtttgacttctgcacaaagtatcctttgtgttgcatagaatagcccacgaatgtacacctttctgatcgaatctcgagtttgtgagattgatatggtcttaagtgaggatagcaagaacatccgaaaggcttaagaaagctgtagtcaggctccttgtgaaatagacattcatatggtgagagatcatcaataacaggtgtaggaagcctgttgatgacacatacaaaatgttgaaaagctagccaccagtgtgttaagtcaagaccagattcagcaagcaaagtgagcccagtttctgtgatatgtcgatgctttctctcgaccctaccattttgctcatggtcatggggacaaggatgttgaaagaagatgccatgttgagtaagaaacttagcaaaaatcctatactcacctccccagtccgattggacagtttttatggggagttcaaactgtttttcaataagctttttaaactctaggaatagagaaaaggcctgagatttgactgttaagggaaagatccaggtaaacctactcaaatcatcaacaaagatgatgtaatacttgtattcttcaagagaagtaacatgagaggggccccaaagatcagtatgg

SEQ ID NO: 30277 - DNA, 2223 bp, Cannabis sativa
atattaaacattagctactaaaaaatattatgttcctatataattactaactattttgccaaacaagatattataaattcatatgcaattaccaccccatatccaaacacacattgtattttacaatatagtgtaattactaccctagtaattaccaacttccaaacacacccttattgaaaattgagctcaggtcatattgttttgttatttaacaaaataaatggtctaattaatcttttataaaatatagagttcaaaatagtactttccctatttttaatttgtaattgtatgaatactttaacttctttttatgtgattcaaaatgttagattacttttttctttttcttgtttagtatgtttggttggttactactactcatcaagacattcaaattttcaaggaagaggaagaaattgagttgaaatgtgaattagttttaattataacaaaaaaagtaaaaaataattattgttttattataaaaaaatatttaataaaaataattattttttctgtttagttttagaatttacatagtaaaagctcttcttaatatccaaacattctaccgaaacatctcttcaagagtgtactgtaaaattttgctatagtttcatagttattaatattttttttaatgttttttaatcaaaatattattttaatgaacatattataaattaaaatacatttttattaaattttttaaacgattttacattttgattatttttaactaaaaaatattgaagtgttaataaaacgttatgatttttttgttattcttgagtgttaatcttgcgagtgatagttggttttggaacaaggataatgctcctttgctcattcatgttggttccgatctccgttaggtgttggccattctacagcaaccaatttctttgactggtttttgaaagtgttggtagtaggcaatatggggttggttgaagaagttgtcatggttggttggacaatttggaaggcttgaaatgatatgctttggaacggtaaaagctgtagtgctgctgatgttgtttggctggctcgtaccactcttcgacaatggacgtgtgctcaatctaagcggcttgactcggtttccctggcttccaatcgcactgacacaagagaacgctggtccaaaccaactgttggacaattaaaaattaatgtggatggggtggtttttgaagacaccagtgagatcggtactggttttgtagcacgcggttgtgatgatcgaataattgaggcattttcaactatttctttggtcagttgccgacacaaaattgcagaaattttaagtgtcaaagaggcacttagttggataaagaggaataacaagtcaaatgtcattttagagacggattgtattttagttgttcaggctattcttagttcggtctctatgccttctatttttggtttatttgttgatcaagattgtcaatttatttaatcttctttaagtaatgtttctattggtcatgttaaacgatctgctaacaaagccgcgcactgtatggcacgtggtgcttgttattagtgaggtcgtcgttttactgagagcgatggtccccttgctcttcaatccattgttttagcggatgttgctgtctaataaatattattttcattcaaaaaaaaaatttttgttattaatttaattaactaatatccaaaggaaaaaatatatatattacagcaagaatttagaaaattaattctatatttttttggagtttttttatttttacactttaaataatttttttttttttgcatttttacgaaaattctacacaaaaactcctattgcaactagcgctgcaacttattgcaacaaaaaatcatatagaaactcctattgcaactagcgctacaaccactttaaaaatctaaaccgtaaatttgaaaaaaaaaaagttaaaaaaatagtatatgggataatttccttattttttttttatcttttttaaatataatgaattaaaaggcaaaaaagccaaagcactttcacaaggactcaagaaacatctagtaagctttgttagagatattatagagctttagaggctgtttggtttcataacttaacaactattttttgttttttaaaattaaaaacaatttttaaaaactaatagaggtcgtttggcaaaattttttaaaaatagttttttaaagttttaaaaaattaaaaaacag

SEQ ID NO: 30278 - DNA, 1821 bp, Cannabis sativa
  modified_base (94)..(96): a, c, t, g, unknown or other
  modified_base (620)..(620): a, c, t, g, unknown or other
  modified_base (1393)..(1393): a, c, t, g, unknown or other
aaaaactcaatgaaattcaacatgccattagagaccaaagctttgagctcaaagctcaaacttgcataaattcaacacaaagtggtaaaaccannnactaaaacctttaatcaacctaaattgaacataaaaaccgaatcctaggtattcctaatcctaacagccaccaaaacgcaaattcattacttcaaactaacttaaaccttgaaaatacacaaaatcaagggttctagggtttaccttagcttgatcttccttgaattcttggttgaaatcacaaacttcagcaagaactccttgattcctagctggttcaaagagagagagagaaatgaagagagagcttttcttcaatttttttggttaatctctgatttccttatttttccctaatagaataaacttaggaaattaattcctttgctaaaataataagaagccacatgtcatcaccctaggcagccactaaaccatcactaaaagaaatggcttaaatgccctccaagttataacttaggcattttccaaaactatgggtaaaatggtcaaattccataaccccgcttaatcccggtattatattttctccaaaatatttctcactaagaaataaggttctnaacttacccatgtgatcaaactagacatccatcgcattttttgttgtcgccgagtaaaaattacaaaaataacatatttcttatacaatctaaaaaacacccttatagcttaataaaatctcctgaattgagaaattataactctaatgcccatttctaaaagtggggcctataaataattaaattcatatttaattataaaaatatcataaattagtgctaattatctttactaatccaaattactaaagcggtcattacaacacttattttttctttgtttttctgttgtttccttttccaatttgcttcattcttcatcaaaaaatatagtcaccgccaccacaacctcccacaatcccatgaacacctccaactgtactcaaacacagccccacaatccatatccagattcaatcaaccaaacaaaccacaaaaatatctcatatctcaaattcgatcctgttatacctaaaatttgactgccatctcaatgaagaacacgtgtaaagataaagggaatgtaaatcaatgtcactacttttatggaataagtcattaattatgtaagtatcagagtgtatttgtaacccgctgactgtaaggtcttaggtgaggaatcaatgtacaaactggaacttaatatattagcgagaaaccatatgtcgctaaatgcgaatagcaaggaacctaagaaagcgacccatatcaatcataaagatgcttagtgtacaattaacaaactaagtgtaaaagtcagatcggctcaagancaagtaagcgaggtgaccatctcgctctgggaagacttcctatagcttcatccagctagcggtaacgaagcttacaacctagagagtcagaatggttctttgtaagtaagaactgcatcaacaccagacatacattgtcgagcttggaaagaagaatggccccagatcgctattgggatcactataaccaagtttctgtcgagacatctcgagatacgacagctaaagatgtgttaaatacacgattatttttacccagtaaaagcgggaaagtcatagttatacatttttcaaatcgtaaatcgcatttacactacgtgaaacgtaatcaaatctcacgattttcgggataatggctgtaaacatattccggtcaactttgtaattaattgcccactatgtaattataaatagtgacaaacaagacc

SEQ ID NO: 30279 - DNA, 2169 bp, Cannabis sativa
atatatatatatatattactttttattttgaaagggaatcattgaagtgaaccaaagaaagattacaacggaattggcaagtccaacaacataattggaggagcaactaagggcacaaactcccccattccctggagtagaagctttgttagccaaagctatctttgctagaatgtgagcaaggcgattactaactcttcccacaaaataaaaactatgaaattttactaagcctgatcttaacatcttcaatattttcatccgccgaagagcacccaacaagaggaccagagattgtacggacagccttcaaacaatcagattctaggtaaggtagatttagcctaataatgcctaccataataccttggttaatagccaaaagcactgcctagacaggatcaagaggaagatccatgaaattgatttttgagcaagcacttctcttataactaattatacatcaaaatgtacaatctaagtacaactgtcctaacttaatttttaaatgatgtagtgagtgttaccatactatcaagatgtacattcgaattaaataatcattaacttattacccttttaatggaaattaatctaaatcatttctgtagaacagagaaaagcaaagaagaacaaaggaaagaaatcaaaaaaagagctcactttattattatgaatataccagtatttatacagagagaaaataacaaaaaggaaaaacaatacaactgactagtaacgaccttaatagattaactaacacctaaccatagtaacagtaaactaactatgattagtgaacaatgttaacatcacccctcaaacgaaaaggggtggaagccattttcagtttgaatttgaggtacataaaacgatccttacacaaaggtttagtgagcatatcagccacttgatcatggctggaaacatatctgactgagagttgtttatccagaatttgatcacgaacaaagtgtaagtctatctcgatgtgctttgatcgggcatgaaaaactggattagctgccaatgcagaggcactctgattatccacccaaataacaggacaagcatgcaatgagacttgtaattcagtgagcaatgaaacaatccatttcaattctgctgcagtgttagctaaggcacggaactcactctctgtacttgaccgtgcaaccacattttgtttcttacctgaccaacttattagattgcctcccaaataaaccacttagccacaagttgacttacgatcatccacacagctagcccagtcagcatctgagtagctttcaagagtcatagttgctgctggtttgagaaataaaccatccgaaatggtgcctttcaggtatctcagcaaccttttgcaagcctcccagtgagatactataggagccttcaaaaattggcttaatttattaatgacaaaggctacatcaagccttgttaacgtgagatactgaagagcaccaatagtgctcctatacagagtagggtcatcaaacaactcaccatcatttaaggacagttttgttgtgttactgatgggattagaataggtcttagctccttccatatgtaattttaccaacagagcagtaatatacttagtttgagacaagaacattccctttgaatctctgaaaatctctaccccgagaaaatagtgaacatcaccaagatttttgagagagaattcagtattaagatcactgattaacttggagatgagttgttgatttggtccttttaccaagatatcatcaacatagacaagaaaaatgatgagatttgaacctgatccatgaacaaatagagatgtgtcagatttagaagctttgaatcccttctgaagtaaactgattcgcagtgtgtcattccaagctctaggatcttgtttgagaccataaagagccttgtgaagaaggcagacatgatccggtttatcttggtcaacgaacccttgtggttgattcataaaaacagtctcatttagcaatctattgaggaaggcattgctaacatctagttgagtcacaccccagtttgaagtcactgctaatgataacacagttcgaactgttactggcttgacaacaggagaaaaggtctcctcatagtcgattcctggagcttgcagatacccttttgcaactaatctggatt

SEQ ID NO: 30280 - DNA, 3454 bp, Cannabis sativa
cgccccgattgcatggaaggtagtttttaaaataatattgacaaaacttccattatccaccagaattctaggtacccttttacttttaatttgggcttcaatcactaatagattgttgtggggaaagtgcacgtatttagcgtcttcttctgtgaaagtgattggaagattcatcatttgtggacaatgagcaggtgtttgcacaagatgacatgtttcctcttggtccagctgactaagatatctcttctgagcatttcttgtacttttggcaatgtgttggcctccgaatctggtttccatgtggccatctaccacaggcagagaaattttaggcggatacaaatttcttggtccgggagcaacaatagattttggcacttaggcattaggtaccgcctgaggggcctatacacccaaagcttgaggataacctactccctgaggagaatttacggctcctttctgtctaggaaaaaagaattgtctgtgtgctactccttgttagggatatatgacaggtatccagacccaattggatagatgaccatttctaaccaatccctcaaattcatctttcaagtactcatattcattcgtggtatgcccaagatcaccatgatattcacattttttattctgatccctcttatgtcttccgcctttgaacattggcggaggctttttgtaatggaccatgttgcaagtggctttgtaaacattttcatgagtattaactaggatagtacactagaagcttcattttgacttggagcctaattagaactatccagtctaagctactccatagctaaagaaactcgtctgctcaaccacttgtccagagacaccaggtccgtacaattttggagttgtgagcatacttgtcaggaacaatagttagagtagatagttggagagtttgagttgtactattgacattggtggatggtgcctaaagtactccataagcatatacatatgctttttccaggtttatgaaaccttgggccttggctaagaaatcagacaaagtgtcaagacctctttctttctaataatacacacagaaaggatctgatagatatccctaagattaaggccactagtttcatatcatgattaaccttagtattggaggttgtatccatcattctctggatgtacttcttaagactttctcctaattgttgtttgatattcgtcagtgagctgacttccatatcataatccttcgcggctatgaattatttcttgaacatcacttgcagattcttccgattataaatagatccagaagatcatcttttccaccaatcttatgcagattttgtcaaagttttttaagaaaaaaacagagacatttggcatcgtcgcttgcctttttgcatcagccaaatgtatttggataggtgaaccctggggtccgtcctacctttatacaattctatttgtacttaagtattaggcctatctttctagacaactctgcctctcagatcagtaggatagtctttccatggagtattggctaccttcttttcccttaaaggttggctggcagtgttagttttttttttcttggagtagttggagcagtctttcttggaggatcccccatgacacatttttctttgtccttgttgggatcagaagttccaggatcttcagggttcactcctttcgtggtgttattatcctgaggaacaatttatcaagagccacattctctgatgaaagtctagcctccagtcaagtcaatgttgcttgctttcggtgggagaagtcttcttgtgctgccaatttcagctttgtctcagcgtgttccttggccatttgaatgacaacgggatctgactcataataataatcatcttcatctttttctttcccatcatcttcaagatcttcatcttctggatcttcctcttgaacctcattaatagaattttcatcaacatatttttctttacattgagacattttttttagattgactagttgcttcaattggatctctgttgactcctgttgtcgcttaagtggcaagatcaacatcatccatatgagtatctctattgtgaacactagttttgtttagggtgagtacgttgcagtatacaacctttgattgtatcaatgctttcttcagctctcaatgaaagcacctaaatatttaccgagtcttttagaaattaatttaacatatgtgaaagctaaagaaactgatccatgataacaaaaataacaacaaggatttttacggggtttgagcgttaacgagttttagtccacgagtcaatattattacttgaaagctagcaaaaccttaaggcttacaagaatgtctgaactctaaaccttgcctgggcaattgaggaatgattttataaccctttgcatgaaggattcttcgtatatttatagtgtttagggttcttgcttattaccctttgcccacttatggagtgattacaagtaacatattgacatgggcttatttggtaaaacccgactcatggggcacacgatgtaaattaatgtggatgccacatcatgttgacatgtgccaaaaactgtatcctatcttcgtggagaataaagacacattaatggcatgtttactaaactgtaatcaaaatcagaataacagaatgagtgaaatgaaaggaaataaagtattaaacaaacgaaattaatatattgttatgttacttactaaatttacttaaacgggaatcaaaatcattttattttgtttacaaaactagaaaaggtaatcagaatagtttagatggactaaattatccttcaaagaaaatatttatttattttttctttattttaaaattaaatcataaaaatataaaactaaattcataaataattagggggtatagatgtgttttaatttatttatataaaaagttaaaaatattaaaaaatatttttacccgtaatgccattgacaatttaggaggagaagttctcttttatttttctccttaatttaggtaggactcgccaagtttttccattactaaacgtgaaagtaaacaattcgatgggaaactctcttacacctcgtttcctttccaacaaagtaaacataccataaatacttgattgccaaattactatcttttcatatttaggaagatatgatattcgaacaagattatcgagagttaattcttaatatatatatattgatggatgtagtaattaataagtgggaaacggtactatacgtccgatgctcgctaattagttttctcgaacgctttgtctaatgtcttctagacgcatacatgttggataaatatcgcctggacgaatcgtctactcatcatctggaaggacaaactttgcttttaaactcacttaatatcttatttgggcctgctagtgggcttagaatagtaaaatatatttagtcatggaattccacagt

SEQ ID NO: 30281 - DNA, 3724 bp, Cannabis sativa
  modified_base (30)..(39): a, c, t, g, unknown or other
  modified_base (296)..(303): a, c, t, g, unknown or other
  modified_base (3151)..(3154): a, c, t, g, unknown or other
tacaaccaacttttagctttatccttcaannnnnnnnnnaaaaactttaagcgtgcatcatcattgatggttgctcgatcataaaaagtgttaaaaacttactcaaatccctaatatgcacatatagattttcattttttattccatgaatagttggcaaaagctgaataatatcgcgtttgacaccgagacttggcatattaggtggaaatataaagcatgatggtatggaagtttgggtggggtgaaggtaatcattaagtgttctctgttgtgtttcattattattattcatnnnnnnnngattaccgattatcgtgtgaatgggggaaggagtagtagatggattgaaagaagtttcaccagaagtagtttcacaggaagaagagttactcatccacttttgtttgcttttttttttttagaataattagtatttttttcccctgaacttttggcactacctaattttgccccctaaaatatacgacttgttaaaaattctttctaaaaatataacagttacataattatgccccttctattaggttctgtttcttttaccgttaaaaattagtatttttaccccctcaactttgatcaatacaaaaaattttctccttttattaacaaaaattaattttaaaaattataatattctattttttaaaataattataatattctattaattcaaaataaaattattaaaaaattaaataaaaataataaattaattaaaaaaatattaattttagttaaaaaaaattaaattatgactaaaaaatatttgcaaactttattttatttataaacacgtatcttaaaaaatcaaattaaaattattgagattctaataaataatttaattaaactaagattttttgaaaaaacaatcaaacttatttatatttataaatttataccttaataaataaaaaataataattaaaaattcaataaaaatataaaattattttgaaaaaaaattgtaaattaaactaaaaaaaatattatgtttacttaaacaaatctacattttttgataaaaacaaaatatactcaagtttattcctataaaatttagtttttacaaaaattaaattttaatatattttttcaatatctaaatgaaatttctattaatttcttttttatatctcttaattagttttaaaattttaatttatttattattttttttaaccattcaaaatggtttttttcttaagatctaaattaatattttaagatatactaaaaaaaaatattgaatctttttcatttttatttttaggggctacgatttgatagttatcaaagtttaggaggtaaagttgctaattgacaaagacacttcatcatttaaatagaataatgggatgaaacctaacataaggactaaatttctataaatgtaaaagttcagggggattcttaacaaaccgtataatttattggccaaaatcagtattgtcgaaagttcagggggtaaaatttctaattattctttttttcttaatataattttttttggttcaacttcccaggttactttggggtttttagaatggtccttcacaacttactagaactctctggggttaccaagaatgtgtgaggggtttaccaactttttcgaccaaaaacctttctaagaaggaatgagctgtttatttttgatagaaaaatattgtttttgttatagtaaagagaaaaaatgtaatattacaatgattaacacaaaaatattcccaggccaattggaaatgtccaaggtatcgcttcgtcccaatcttgcctagacagaaccgaagtttccaagtaaggtggaggatacactaacacaaaccttattttaaaactaatctttctagaaagaacaatcttggtttgtgtcttttacaatattacacacttgtaccaaatactcagcgtttattgaaagaaattttagaacctacttttttttttattgtattttatgatttttttagaggacttaaattctaagagtactaaggaaaagacaaataaaattttaataaagaaataaaataataactaaatgataatataaacaatcacactaaacaaaaattaaagtgaagaaaaaaaaaattaaagaaagtacacttttttttcaagaattttttttttgtatattttttttttcaagaaatcatttctaataaggaagatcggataaaactgcaatcttaaagcatactttgaattcttggtaatttttttctcttcacaaatatttacacaacatatgacaatattcacaaaaaaaaaatgtaacaaaaaaagttactaacctcttgattgtagatttcactaagctttcgaaaaaataattctccggcaacagtgccaaaatttatttaacgcccaaatgtgacttccactagcggtgatcgtggtatagatcggacggtcgattctatagggaggtgattatggacaaaaatattagtagaatatcaaaaacaaaaggttaataataagtgacaaaagtaactaaatgagtttgagatttttattttgaggatatatacaagaaagcaataaaatgtgtaatcaatattaaaagagagaaagactccaagaattatccatatacttgtttggctagttgtacctttgattcaaaaaattgacataaataatgtaacattaaagttcattatattttgagtatacaagttcttacaaataaaagaaatgatttaatcttatgtagaacctagaaataatgcaataaaagattaaacacggatctaaacatcaatattatttttactaaatagtaacacatagaaagagcgtgacaaatcctatatatttttagtaaaaacaatgacaaaaagatagagattaagatggtggtgatagtgaaagaaataaacattaatatcacttttattaatttttagacacatatggagagcatggctaaacttatatatcatttaacaaaaagtaataaaaatgaacataaaagataaagggattatttcacaaatacacaaaaacaacaaaaaaaaaaattacaaaattacggttttacgaacttttaaatatttttacgatttttttgattttatttgcagaaaatacggtctttttatgttgtactcttgtnnnnttgttgttaattttttgttatttatatgttattttttgttgttatttagatgttattttcatattacttttatatagttttcttgtagttttcgtgttatttctatgaaaaactgtaaaaatgtaaaaaaaaaaattctttaaacataaaaatgtaattctttacaaaaaattgtgccttatgtaattatcccaaagataaaagatagaaatgagcaatattataattactataatcactaaataaaatatatagaaagaacatgacaaagtctatatatatttagtatataatagcagtagaacctctatccaagaatacacttggaactaagcaaattatattctaattgagagaatataactaaatagacttacacttgaaaaaaaattgaaatatcaaaaaatatcaatgtaacaacaatgacattaaacaatccttaatattatattaatagaaatgtttttgagtaaatataatattttatacatgtattacaatttggaataaaattactaattctacataaataattttataaaatatatgtatatattttattaggatgta

SEQ ID NO: 30282 - DNA, 2029 bp, Cannabis sativa
aaaactaaggagacagttgagataactccgcgttggtcacatctcctgaagcgagaagcaccgaactttttccctatataaagggtcacccatgatctgggaaagggatctgcaattttgagcacttagagaaaaaaatactcttttattctttgcattcaagagcttgttcttaaattttgcagctctgattaataaaacacaaggggagtaagctattaccaacatttgagaccgaacctctttaaatatttagtgcctttccttacatttattgcaaattttggtatcattatttacatttattattaagattttggtttaaatctcatttattacgactctgcgtctgtgagctaaaaatcccgtcaatattttggtgctttcattgagagcttcaaccaaaatcttcaagttttttattggaaaaaattgtgctaaccaaaatatctcaagaacgacctcatggggaggagatggataatgcccaacaagttccatcaacgagcaattgagtcgaaaataatggagagcgacccccgcgtcctggtaacggtggtgcaactaccattaatgatgtttcccaaactactgatggtcgtaggaccactagccaaacttccacagctgggcagacaacggttgggcgtaccaccaatgccacaaccactggaggcaacgttactgacggcgccactagaaagggcaatactggaaactccgtcccacctaattattgcatgggccaaactcaaactggtcatggccttggtgtctttagaccacggaatgaaccccatgtggatatcgaaggaattgacccagagatggatcaattgcgagacatgatagaccaaatgcaaggacagttccaaactgtacaccaagagcaaactcaaactcgagcggccctaactgaaagtctccctaaccaaaggagagagttccaatcttggttggaagatcatgtcgagaaatgaggaggcgccaagatgacgatcgtcacactcaagaagctgtcgacttaattcaaagctatttcaaccaaaacactcacccaacaaatatctcaagaccactaaacctatccacgaaaagtccataccccgaataaccaatgagagagggtggtctacggacctgaagaacgcctaatgaaccaagagagggctaagagtcacccctccaacaaggttcgccacaacaacaatcgaccgctcccttagatgaacaagtcctacccgatcattatatgggacgagatgactcccataatgttcatctaagacatagcggtaggggaaactccagaaacaataatggtgaccgcggtagaaacgttgaaaggatagcccaacacagggagtggcagccccgcgaccaaccacgagggggaaatgatcacctgagaaacagtaggcttaggggagaagggaagaccccgaggtcaatagtgattatcgtcctaacaaccccgacaaccatggtgatgacgaagttgaaagtcagaccaatgatcaaccaaagcctgggctggggggttaccaagtcggagggccgtatgcccctaataggcaacattaaccaaaaaatccgctcctaaggggtagagatggccaaatacctccccccgtcaatggaagggctgacaatcaaaatgcaagaggaaggccaagatccaggtcagtctttgaacgtgtaggcccctaggggctggagaccttcgggatgccctcaataggaataaggacaaccgtggttcaaacatagcaaatccacccgagccagctcaaggaagcccagctgatacaggcattaatgttgtccaaccccaagcagccacagatctggcgatctaggctaggttggatgagttaacccttttggtcaaggatcaaactgccctgaaattcactgacttagaactacaaaggaggagggggtctgctttctcacaaacgatcaatgacctctccattccagcaaaattcaaaatgcctacttgcaagtacatggataatgaagaccc

SEQ ID NO: 30283 - DNA, 1665 bp, Cannabis sativa
  modified_base (1255)..(1257): a, c, t, g, unknown or other
tacatgtcaaagttcgggggaaaatcataattagccttaaatttaaacaacacaatcattagaatctacaatcaaaatatttagaaatatctcctcaattctcataagttattttttttttcaatttctctttaattatcttgaaattttaaggtataattggcagcacattactcattatccttttattctttaggcctatttgacacaacttttaaaaaactaaaagttatttttcaaacaataaaaaattgtgataaagatgtttttagtaaacagctgaaaaataacttatttaaaaatttacggagaagctacaggctacaactaaaagttaaagttggtagaacccaactttaagaaaaagttgttttgattaaaaaattctataataaattattgagtaatttgtggcataaatattttaactttcaattataaataaatacctaagcaggggcggagccacaaccaaaagaagggtggccatggccctcccaaacattttaaaattccattttatatataaatatttataaaataaaatacatttataaataaaaaaattaataataaatatatatagtttaaattaagtgtttaatttattaaaaataatatatattaaattttaataaaaataaaatagaaattgattattttttttggaagtgaattgattttttaaattaaatatatatgagtagaaggtaaataaaataagacaattgcttattattatttttttctttttttcttctactactttcaattttttttaccagtaagttagtgcaccaattatgtatatttatattttttttacacatttaactcaaaatcactcattttgataactttcatcactaaaatagaaattgagatttacaatatcctttagttaagtgttagattttgttaaaattattttattgatataaatttttttgttttataaaatatttacaaaatttaaaatttaatctgtcttaattagaattgtagtaatatttccaatttagataatatagaatagaaacttgaataatatagttatttaaattttattttgatattttattatagataattttcgatataagaaataactattttaaattttagtattattctataaatatatactataaaaaatttatttggtactaaattaaaatttggtcccctagcattcaagtcttggctctgcccttgtacctaagtttaatttttagcagtaataatacttaagttnnntttttggaactctgtaggtacctgaccgttaaatattttgtcattatctatgtgctattttcttattggtatatttaaattaatttttttaaaaaaaaaagataaaaatttaattatttggatcaattgagaatcgtcatgtggcaatttatttaacacttaacaatcaagtacctacaaaagttcctaaattataacttaagtattattatcgtcaaaaattaaatttaggtatttatttacaactgtgagtttaacttatgtatttatgccgcaaatatttaattatttattgtttattaaaaaaatactttttttaaggaaaaaaatatttaaaataaataatatttaattttttttagtttttttattttattttaaaaattattttatacatatatttttttt

SEQ ID NO: 30284 - DNA, 4150 bp, Cannabis sativa
  modified_base (4096)..(4109): a, c, t, g, unknown or other
tgggattctttccactttgtatgtaaactcgtggagcagttctctgacaattgttacataagcagccatcttttctccacgtgttttgtattctcgtgataccttgttgaccactaactgagaatcactgaagacttctacccttgcagcccctacagctttggcaaaccttagtcctgcaattagcgcttcatattcagcctcattgttggaagctagaaatgcgaactgtagggcggcctggaatcagagcccatctggtgatatcattgctatcccgacatcagatccactttcattcgatgccccatcgacatacactttccgcactggcattttcaaggctggtgtattggagttggcttctactttgttacattctgttatgaagtttgccagggcctatccttttataaagacgcgtgggatataatgtatattgaactggctcaattccatggcccatttaaggagtcttcatgaggcttcaagtttctacaagacttgccgaagcgggtgatttgtaagtaccttaatgggatgggcctggaagtagggtcttagtttccttgaaaccatcaggaggcaaaaaactaatttctcgattaagggataccgagtttcagctcctaacatgcgcttgctgacgtagtacactgggtgttggactttgttttcttcccagaccaaggtcgcactaacagcgttctcggagacagccaagtataatgacaagtcctctccatgaaccgattttgacagtaccagttgtttggccatatgttcgtttagttttttgaatgcgtcctcccactcttcagtccattcgaatttttgacactttttcaaaatattgaagaaagggatgcacttgtcggtcaatcgggagatgaatcgacttaaggtggccaccttcccggtgaagctttgtacatctttgtttttctttggggaaggcatgctcaacaaggcttgtattttttaaggatagcctctatcccacgttgactaacgataaatcccataaattttcctaattttacgctgaatgtacacttcttgggattaagtttcatcccataccttcggaccacttcgaagcactctgtgaggtcatctgcatggcccatgcatttttggatttaaccagtaggtcttctacgtatacctccatatttcttcccaggaggcctttaaacattcggctaaccattcgctgataagttgcactagcgttctttaatccaaaaggcatgaccaggtaacagtatacccccttgttcatcttgaagctagtacattcttgatccgcgacatgcattttaatctggttgtatccgaattaggcatccatgaaggatagcaacttaaattctgaggtggcgtccactatttgatcaattcgaggcaacgagaagtagtcttttgggaaggccttgttaagattagtgaaatctatgcaaacatgccacgtcccatttggtttatgtaccaacactgaatttgctagccattccgggtagtacacatcctagattaggccattggctaataacttatccacctctttctctaaggcgtctgcctttactggattaagagggagtcttttttgctgcaccagaggcatgttgggttaacattcaggacatgggtgatcacatgggggcttactccggtcatatccccgtggcaccacgcgaagacatccatggctacccttaagtttctatgatcttgcttctttcctccggctccatgttttttcctaggcaaatgattttagtggagtcaaggtcgtaatactcacttcctcgatatcctccataggttctatagctgtttcggatcccacacggggatccaactcgtcttgttctgtcataattggctcttcatccctgtgcaccaccaatactgacaagtatgctgcgacattgtaacattgtcttgcctctccttggtttcccctcaccgttcctactccagcttcacgggtggggaactttaggcataagtgtcgaatggaggtgatcgctctgaaattgaccaaagccagtgggccaaggatggcattttaggtagtgggacaatctactacaacgaaggtggagtatttgaaagtgctctgtggggtgtctgggcacagggtgacaggaagccttacattccccattgggataagtgttgtcccattgaatcctctgagctgggagctgctaggcgataggtccctgtccgtgagccctatggccatgaaggcttctttaagcaatagattcacggagctcccgttatctaccagtatccttgccatgaccttgtttgcgatgggagtttctataaccagatggaagcgcaccggttttgcatcgtcctccatgaaagtgatgggttggttcatgagcctggacctttgtgctgggagttgagtgacttcccatacttcatcgtgttttatgaccccagcgtaattcaactcttccggtggttcctccaatatgaggcccaccagagatcatggctactctcccattcagccgaggtggtaatccgggcacctgctgagggagtgcccctccgaggggtacctatccttcgggcataccccctgctcctccctgaggtaaggagcctgtagctgggaccgagtttaaatgtggtaacttatttttaatccattcatacaagtgacctaatcggattaggttcttgatttcatctttcaggttttgcactcgttggtggtgtagccaatgtcgttgtgatactcacacctcttgttgggatctctctaggagctatccctgtacaaaggggaaggcttccggtaatgcgtattctgccgagtggcaaagtacacacgcttatgtgtatctgtgagcttcgtatattgagtatattggggaatatattccctttgctatcatttgtcctcagtccgggtactgccttttgaggacctcttactctaggagctctgaggaggtcctgccaggctggtggtagatgcagattgggacggagtttggacactcatccccgagggattgctcacgtgtgccccaaagtgtgatgatgcgggagctaaagcgaggcgttgattatttcctgggatagcggagaactgtattctgctcatttgaggagtggcaggagatggggctctcagaagctacgctccaggtacatatcccgatactctggtcgggtagtatcctccgtaagccactatttgggcttcttccaagttgatgtattttgagacccttttctgaaagtcctggaggttagctgccccctcttactgtagttcattccagaaaggggtccccgtgcggattccagcttgaacaagggccagctgttgtccgtcatccacctttttggtctttgacgcctcctcttaatctttttatgaagttctttaggagttccgtaggcagcattttatgttagccagggtgctgacttcaagtttaatcttccttgccacgatgaactgccttcagaaactgacttgtaatttgtcccagcagtcctctaatcctggttccaacttcttgaaccatttctcagtagaaccgcccaacgttagtggaaagcataaacactttgcatcattgctgaccctcatgaccacccagttaaaccagaacaaatggtcactggggtctgaatctcccgtgtaagttgccattttgggcatcttaaaatttttggggagttttgcatccagtatgtgtcgggcgcatggttcccggtcctcgcaattagagtctgaatcatcccctttttttctccgggagaccctagcaatgtctttgcgtagtattgccagttcagccaagattccctcattcaacgtgcctttggagactggcaatgcgtgtttttttttttcaagatggttactcaaatcaccaagattttcattgattttctgtcttagatcagtcagagggtaccttcaacttttctttcctctttcctcgggttcttggtgcacggatacactctttcggtcctctcgatctagagggccaacactcgctcgagggagcttgtgttagaaatattttacaaggatctagannnnnnnnnnnnnntgtttcattaacatcctaacatgaattctaaaacaatgaaa

SEQ ID NO: 30285 - DNA, 1178 bp, Cannabis sativa
  modified_base (738)..(743): a, c, t, g, unknown or other
ccaagcattttcataccgaaaaatgaccactggtttactcatcacacaaggtgcaggttcaaggaaaataggattatgatcggaggatgaaaaatcaaaatttgacaaacaagcctcattaaaaatagttagccaagactgagtagcaaaagctttgtctaaccttatttcaatgtgattttgagtcccttttccacgcttccatgtgtatttgtgaccacgcaaatgaagttcgcacagtcgaaagtcatggagagctgcattgaagccattgattaatgattcaggataaagtcgccctcctttcttatcgtcatgagtggtgatgttgttgaagtctccgatgatgcaccatggcaagattgaagcatcggccagatcacacaggagctcccacgttagatggcgctgtgagcgatttggttcaccatagaacccagtaagaggccagtgaacaaagccaggaacatggacatccaggtcaatatggtgggccgaaaactttaataaatgggcatcagtagaaatcttccataaaaaagctagtccaccttttctaccttgggttggcacagtaaaactattttcaaagcccaaccgaaccttgagcctatccacaatgtcattgttgcataaagtttcacaaaggaatataaaattgagcttcttttgaacacagatatcaacaaggaattgaatggcccgtgggttcccaagcccacggcaattccaactaannnnnntcataatgattggtgggcctgaacaccaggacccacctgttccccattttttggaaacccaatagcatcaatactatgaaaactaattggctcagaagtacaaatcgcatcatcttccactattttagccggccctttagagagaatatcaactctttttctcttcaaatcatatagattcatatcatcctctgacataaatgatgattcattctcatgaatattcaaagttgcctcatcagtattttccaaatttaaatgacccgtatgcctagaatcaaggagagatttttggaaaattacatttgtgacggggaggtgattgagttgcctggttagactcacggtttcgccctgagattgaggcatagcattgaaggtggcagattgtggtggatttctactgccggtagtggcaggttcaggctttccggt

SEQ ID NO: 30286 - DNA, 2110 bp, Cannabis sativa
gggagactgttcgaacagtatcgagtgggggatgatagaagccttggcacgttggcttggtgttggcatcttgccacacatgctaccttggtcacgagtgacaaggtgagcgtcggtgctgggattcgccttatcatagtgggaacctatggacagtgtgagtatcttggctagagatcctcgatgcatggatgcactcatggatgcttgcgagcatgactcgtcgggagttgttcaagagatggaattgtgcacgaggcacacggtcgcgcaaaaatgagctcattgttactcggatggttggaaggctgaccttggcttacagaagtcaaggtgccgcacgggtgttccgctgcctaaaacggtgagcccgtgacactcagcatgggaataatatgttatcaattgggctggggtagtgagccaggtggtctcgagctggcctaatgcatcagacatagctaacaagtccgctatcaaaaatgttgacaagcttggcatccgatagtgtggagcgaggagataccaatatatctccttcccccatttgtaaaatccatgacatagtgggctcctcctcaagatgattaatcccgacctttgagggttgatcccttttgttcagaggctctttatcctcgttataagagcccaagggattaccttggaccacactacactccttagggcgcctctaagcagctctaggctcaatttgagactcagcctgattaacttctggcttctcctcatggtcagccataggctcctctgccaagacagcctcaggctattcaatctactcaacttggtaaacccttcctcttgccatgagctcggcaatatggagattcgttggaggtgcccttcgttacgttttcttagctctctacaaatttagatgttgctcagagtactaggcaacagtcacagcagccgctgctgcaggaagatctctagacacagaagacgtttgtccaacaggaaatgttttaggcacaccctgacggagaatgtaagtccaagacttgggtaagaactatctccacctctggttacgttcctagacgaatcttccttagatttcaccacctatttgctcaaaataatggtgatgttgaccctcaagttctggagaaccacttctcacttcaaagtcactcaaagagctgcccgaggagctctcaaaggaagaactagatgagtgatagtcttcgtacaaaagacagagtaaattctcattaatctggttgtcacctccccaatagtcgcatgggttcatctgtgtagaaagacaaagggaggtcaacaaccagagatcataaataagatacagataaaaacgtgggtcagtcggccaagacttttacatactagccaaatagcccttaatgtaaagccacgaaccggccattttctggaaggctcaccaagagtcggccagcctatagctggttcactaagaaccgaccaagatggatctagcccgaaaagaaccagacggagttcttcaaaaggattcaagtaccaggcaggggctttttggataggatgaagcaccaggcagtgtctctaatagacccaaagcatctgatagagtcttatacagattgaaaatcttatatttctaaattcaaacctatattcttcatgtactttgaaccccaaagatcaaaatctcaaaacaaagtgcaagatttaaatctttttcatcaaagagtcacacattatgcatcctaaagctattgaacggattattatgcataaaaactatcctaagacatgagaatcaagaagttcataaaagctcaaaaactcatcaatggtagaaatttaaaggacaaaaaagagagagagaaagatttgaacttacccactgagaagatgcaaggaggctcgagctagtccacacaacgagtgtgggtgttaaaaacttaagaatccagaaagaacttaggctcacaaggctttggctctatggagtcttggagagaattttcactcacgaaatgtaaaagtgaagtaaagaatgaaaaaagaagaatgaggcgtttatatagtttgtggaaaaaaaaatattccccaaaaaaaaaaacttatggggagttaa

SEQ ID NO: 30287 - DNA, 5170 bp, Cannabis sativa
  modified_base (2844)..(2860): a, c, t, g, unknown or other
tgattgaatcctaagaccggtcagacctcaaaaaagacccctagggtcggccaaggttagttttgaatccaaatgtatttttttttttaaacttgaatatgtgttcttcgtgttcttcatgacttaaagagtcaagaatcacaatgaaggccaaaatcgaatattttctatttggaaatcacacattatacattctaaaactgtcacgtagatcaacatacccaaaagattacaatctaacacgagaataaaaaagtttctagcaacttgaaacttatcaatggcaggttcaaagaagagatgtcaaagaagagaagatgaggcatgtatggagagagaagatcaaagatctaaaagcatgccattctaaatgccaacactcagctagacaaggctactcaactgaggctactacaagcaagacgagagttggaaagtccctatccgactagatgttcaaacagtgacttgaggggaaaatgttatcccaaattttgtccacctgatgtggcatgtctacgtaagcaaaaaccaagtacacatggaatacaactttgccaatagcaggacaaagtctccttactatagcaaaatcgtcaagcagcaagcaaaatgagttaagcgagccatcaaggagctgtaccaccatgtctgcccaaccaaggtgagtctataggctggccacgatgagcttatacggttggccaaggtttgagcacaagctggccgaccaaaggtgactttcaggccaagtaagggtccgttcgaccaagaaagcctgacctctaccaggaaaaagagtacaaaggcctacctccacctataaaggctggccatcaccaaggctggccattaccaaggttgtccatcacctactaaggttgaccaacacatgcaaggacctggccaactcctgacaaagctggcaggaacatgacctgccagacccctgtaggaatatgacctgccagaccctggtaggaacatggccggccagacctcaacctacaggcattgaatggctggccagcctacatcctgtagatgcatggccgaccagcctttagcctagcaagattttgatgtcgagctgtcatttgtggacaacaagttaaacaacaaactgaggcttaacaacccacaaaaatagaggcaaaatatctattttcaaggggcaatttagtcatttttgttttattaattaattatataaataatgtctttatttacctatttctaaggatattaggcatgtaagctctactatataaagagccttatcctatatttaaaaccctaagtcattaagcctctaagctccttaagctatcaactctaagtttgaaaaccctaatcctctctcctctctctctctgtttctcatgcctctaaggctccctctcattagagatttgcctactgattcatacattgtaattttaagaaagctactttagatcccatcactatagtgatctgagtaatattatctcttaatattaatataaccaaaatgagagtaggtcattacccgctaattaagggatcgaatctttataaaatcatgtgtcttatttactttattattcttattttgtaacacatggaaagtatcatcattaaatacaattccgctgtcggttggccaaattctgaggtcaacaagtacgacatggcatgatgctacaaattgacacgacatgacatgaaaaatatgcgcttaagcatgacacgacatgagaagcacgaaaggcacgacacgtaagtatatatagactagtctgaaaagcacgacaccctagaaaacgtaacatggtgtattaaaaaaccttataatttattattaataataataagatatgaatctattaattacaaataagttaaaataataataaaacttaaatataatactgaatatttataattttataattaaaactattaaaatatgaaaaattatatatattaatttatttatagggtgtaatataaaaatttgagtatttataagtatatatttaaattctaatgatgttaataatttttttatatgattatctgtaaaatagatcggctcttgaagtgctattctagggttccgcgactccgatcttcgaattagagctatggcaggtccagggcgcccacgaaaggcatcgcaggggttgggcaagtaagggaaagagatgaagatggttgttaagaaaccaaagaaaagacgtatgtgttctacagttgatatttagaaaacaaagtccatggatgaggtgttgaggatagaaccgattgcttttacaaatgaagaggaagatatgaaggaggacactactcttttacaggacatcttccaagaacctctctccccaaaatcttcgctgcacaccatctagaggcaagagaatattcgagtcgactttaccttcttccttaatgccaatcaacaatgttccaagaacatctcacaaggtaaatctgcttcccctccaatcttaagatcaggttctatagtgagaaatttggctaagtcctttaggatttcagaagaggatcaaaaagtaaagataacattggaagaagttgaattttggcaaccctcaattgtttgctatgtccttggtgctaatccaccactgtcaatattagagggtttcattataagagtttggaaagataaagttgacagggttggtatgctgtcatatgggatttatcttgtcaattttttaacaacagactagttattatgaaagtttgggaccccaacattaatttcaaaaaagaagatatcaaaactattctgatttggatacaacttaaagatttagacttgaaatattgggnnnnnnnnnnnnnnnnnttcaaaattgtagggcaattgggaaatccattgcaagtggatactgttacaaagcaaagacacaagctgaattatcccagaatacttatagaagttggcctcaatcaagctctccttaaattaatctggtttgaagataattcgggcgtgatacctctgttttggtctcatatgaatggaacctgtcatatgtggccatagcaaaggtatagggcaccctactgatgattgccaaaagagggaagcaaaacaacaatgagtaattaaaacaaatgggcggaaatgcaacatcaaataaaccaaaagaaccagttactgatgtagatggttttcaacaagtaagcaaggggagaaaaggaaaagataaaaatgttgtggaggagacttaaacaagtaactcctttcaggctttgtctcagttgccagggaaagatgaaggaaagaccagttacgcagtaggcacccaatagtttaaatttttgttcgcaaaaaatgtcaaattggtgcacctaacaatagcagaagactcaagattggcttccacaagtgataatacaagaggagagggagatactcctcttagcaatggatagagtgctaagttggaacgttcaagggatcaacgacaagcagaaacgaagtgttgtcaagaagttgatttatacacaaaaagttgggcctgttggtcttctcgagacgagagaaaagggtcggaagcttggggctttgtatgtaaatatgtttaatggatggtgtttcacctcgaacattgcttgctatattggagggagaataattgttgcatggaatcctcatatctttacagtgaacatcttgaagtgtactagccaacttgtacacttgtaggtgtcaactgtagatggtaaaaacaatttttttgctacatttgtgtatgctttgaatgacacagaggggagaaaggatctttggagggatcttcaacaaattcaaaccagagatgcatggatagtcttgggtgattttaatgagattttgttgaaagaagagagaattggcaagagaataaactatatatcagcaaatgagtttgtaggttgtattgagacatgccaacttgaagatgtcaaatatagtggaagctttttcacttgaagcaacaagcaacaaggaaatgataagagtttattcaaaaattgatagggttcttgccatccagcaatgtattttcaagtttactaatgctgaagtactattcttgtcagaagggttatacgatcacacacctgctgttcttacagtgcatcccaaaatacaaagtggtagaaaaccattcaagtatttttgtatgtggtcctctcatcctaggtactcagagttagtgagatcgactttgcaacaatcaataaatagaacgagaatgttccaaattgtgacaaaactgaagacacttaagggtgttctcaaagatctaaacaagcaaggattttccaacattcaaatagctgaggctcaagcaaaaacttatctatttgtgtgtcaggagaatcttcaaggagaccccctcaatcaagcattacatgccaaggagttggcaacaagaattaactataccgaattgcacaaagctctgatttctttcctgcaacaaaaagctaaactctattgggtgaaggatggagacgaaaacaagataattttttacaacatcattcgagcaagaagaaggcaaaacagagttgtatctattaaaagcagaaatagaacaagagtggatgaactagctcaagtacaagaaactttcctctcctattatcaaagtttacttggtcataaaatggtcaataagaaataagtattaaaaggagttatccagcaaggcccttttgtaacaccaaaacaagcagagaagttatttggggatttcacaaaggaagaagtgaagaaagtcttttatgaaatacctggagataaaggtccaggtcctgatggtttttcaagtaatttttttcaggataattgggagcttattgggcaagatattttttgatgttgttaattcttttctccaaacaggtcaaattcttaaggagattaacactactgtcacttattctaaaaatcaagtgtccaaacatagttagtgactttagacctattgcattctgtaatgtactttacagggcagccacaaagctgatttgctcaagacttaaacatgtcctgcctgttttggttgctccaagccaaggaggttttattaaaggaagattcatcgcacataatattatgatcttcctggtgttggattttgtgccctaaataaaacac

SEQ ID NO: 30288 - DNA, 2193 bp, Cannabis sativa
  modified_base (2062)..(2062): a, c, t, g, unknown or other
acaaaacaaaaaaaaacatgaaatgtctagtatatatagttataagaaaatttaatatataattacaatgattaacgaaacctaatgtataattaattaatgtatattagaagatttaaggattgaacataccaatgtggatggctttcttaaacagctcaaagaaattgacacacacttgattgttttgaggataattgacattatcgttggtcttttcactgggtgattcatctcttttatcatcatattcttctatcttccactcatgatcaacatatatgccttcataattaatttgaaaaatgaaaaccaaaacattgaagtagtttagaaatatataattatactaattaataatttgtacacacatatatatacactaaaatattacataatttagggctcgtttaccttataaagattgtgttttattaaataataagaaatactatgttttgataaaactttgtattatattaattattactactataaattttaatacaatataaatcgtattattaaattcataataaattatctgtattactaacttgtcttataatatttagaaagggtccagccgagagttggagaccgaccccagacatggaccttggacccagacctcgacttggactcggctccatacctgggtcccgggccaacacacggatcctggaccgggatcctgacctcagacgggacctggacccagacttgaccctaaatcaaacccaaaccacagaccagagctggaaccgaaccaagacccaaccccaaacatgggcttggacttggaccccgaatccaaatgaaaatgtggacgggaactcgaacaccaaacttcggcctcgaacctcggcgaccccaaacttgaacctagataggcccccggaccaagacacggactttgaacccaaaacccagacccaaccccacacctcagcagtagatacgagggctctaccccaaacaagaattttggacctagacgcgaatgcagtcgtggaccctgaacccaaacccggcctcggaccctggccctaaaccttgaccccagaccctcttgaacctcaaactcgacctaaactatgacatggaccctaaccttagcctagaaccctaacctcagacctagaccctaaagcccaaactcgaaccttggaccctgaaccttggcgtacgcgaacgtggaacctgaatctagacctagcctcagaccttagccttgaatccaaaccttggaccctagacctggaccctcggacctcaaagcctaacctagacttagacaccctaaccttgaccccaaaccccgagcctggacctagacctagacctcgaatcccagaccgaaccctagaccccagaccgaggtcgatccaaggtcgtggtttagggatggggtttgggccaaggtttgtgacctataagaccgatgatgggatctaggttcaaggtcggggtcggattagtaacgagtttttataataaagatagtataattttattcaacttactaatacaagtcaatattaaatataatattatattaaataataatggtgtattaaattactagtcctagagtgacatgacaatattttttcattatgattttggccttaaatatataaatatcattgagtacgtagtattctaatgcatatgttgtattatattaaattatatttaatgttatatttttacataatactcaaattttgatttatatcataaaaatattatatatttatatgcacctacaaatcaatatcaaatataatattatattaaaacaattaatatatatataacatctaatatacaatgtacatactaaatgaactttgtctataaggggtaatacttacagttgtagatgaatttttcccatcgtccaaaggtatgactacttttgaaagcagatgactttgtggccaatgtttggattgggagaattccgtgcgtgtccctactatttacaagtccctcatatcgccttattatgtcaagggccaaatctgtacagaattatatatataaatatatatanatatatatatatatcccaacaatagtaccatgcatataagttttcacatgaaaaagttattgtataaatatatagggagttttatgaatgtagagcaatctcataattaattgtagttatatatatgaaac

SEQ ID NO: 30289 - DNA, 1919 bp, Cannabis sativa
agagtaccgagtataggttgatataaaggtcaatagtactgtcgtacgaacgttgtagactcagtacgcatgggacgcgggatagggttatgattgggtgtatgggcacctagttgtaatttagtttaagtttatgttatgattatgcttttcttactgcgtctgtcgactcacagttattgtttacatgtgtaggtaagggcaaagctaagaccgagcagctgtgagatcgagcagatgaagattgtacatataggggcagttagacctggagcgtataatctttgggaaagtaggttgtattttgattagtcactaggcgacatcttttgtaactgatatttagtattatggctgtaactttttaaacatcgggatcccagtttatgcaaagtttatttattttaatttaaagtttaattatgtagtgttttaattaaacatattttccaacaaacccgttgattagaaacagattgcacagttagtataaaatcataacaacacaccgaaactagtagggtgttacaaacataaacttagacgctggctcacgatgatttgttttgattgaattgcgaggaatatgaagcataggcaggataaccatctatagataaagatgaagaacaattacaatgattatttataattatctcatgtgatgtaaatatgaaacgtggggaatgtccacgttcatgtccatgtttcatgaacgttttacaagtgataagatcccaagggaataactatcatcctagactcctataaataggacagaacccagggaacaaaggacggtcattttgggggaaagagagagtattatatctattattcattctgtaaaacaattaattgtattctatatactatttaccgacccagaataagttggattcatggactatgaagagaacttcaaaatcacgtaaaaagcttcttgtcatttattgatattattattaattattacttaattaattctagagatccattattacaaaaaaaaagttatttattagttaacaaaaatcttttttaacagtttgatgctttcattaagagccttggaataaaactcaaataacaccctccttgaaaacaaattcaaatcgtccattcatggtagacgatatttctcgaaatgaagaatatcatccaagagagacaactcaacgtcctagaaaagagcatcaaacttctcacaggaaaattaccactaaaactccacgtttaggaagaaatggtggagatttagagcaaactggaaatgaaatcccagaaaggcaaagcgatgatgcttacgatcccaccagatatgttccattagtggaacttgaaaataagcaattttaacagtgattggctaaattaaagaaatgtagagctaaagcacgaggcaacgattgtaagggctatgcaatatgaagcccctgcaaaccaacctgatacatctactaaatgacctcgggaaagacctagaggcttcagaaccaggagacatagggataaccccagggggaataaccctagaaatccctcaaacactcaagagggtcaacctgagaacaccgagggtatcccaatggatgaaaagatccccagaattcgggaaacactaaaagtcaagagacttgattcgggaacttcctgtggatatacaaactgtgggaatgtacagcctgagaatccagaatcatctcgcatgaatgaaaatgccaggaaaacacaatctataaatcaaggatttctcagcacaatgcgagaggtgcaggaaatcaggctggattaggttgaccaccaagactcctgcaaaggtcaaatcataacgacaaagattgtaacgccctaaataattaggcacgctacccaaaatacttataaagccctaatcccctaaccgggattactaatta

SEQ ID NO: 30290 - DNA, 4151 bp, Cannabis sativa
  modified_base (1159)..(1161): a, c, t, g, unknown or other
aaaaaaaacaaaaaaaaattattagagagagattcgatttagagattacaatataatccacgattacatgtacctatagttattcaatttgaatggtgaggggaataactgtttaaataggaaaaattgcactgtacatacgcgggtatagtattaatatacactaccccgatatatattgaatattttttattaatttattctatttagatgttaccatattatatttatagtttattttgtgagaatttcattaaatttatggttattgtcattaattttcttaatgttatgatatgtttaataaataaatacatatacatgattggattttgagtttgaaaagcatttagaatgttttttaatgcaagaatttaaaatgatgtttaattagattttatcaaaattaaattaaattaatagatttttttttttttttttagaaaattgcaactattaacggttagggttatgggtaaacatggttttcccctaataatctactgattaatacctgcactatcatcgataattactggggtggatatggttatataattaatttacggggataggaatgataatttaaaaaatttccttgacattgccatacattggaatgagaaacttgcttttttatttgagcaatatataatattactaaagagtaaattgtggtaaaattctcaaaattttcattttgcttgcacttaatccctaaaactcaaattttggtgacataaccccctaaaaactgctgtattgttagcaaaaatactcctccgtcctcttgaccccgttatttgcctacgtggcccacattatccaatgctaggtagactcatgcttgccatgtcattaataattggctaattaggttttttgactcatgaactttgacatatattaaattatgcccctaaacttttcaggtcgttaaaaatttcctctgaactattgagatttttaaatttaagaacttttgtctaatttcattcaattttactaatatggtgattgtccacatactaaatcgtgcccctcaaactttgatatttacaaaattatgcccctagactttaacatgtaccgaattgaccccataaattttcattcacgtcgaactttctttagtgaaattggacaaaagtccttaaannnaacaatctcaatagttcaagggaaatttttaacaactaaaagagtttagggggcatgatttggtatatatcaaagttcagggggtaaaaattaaaattcgtcttaataattaaatgacatagaaattaaaaaaaaaatgagttttttttttttaactaatagctaattaaaatgaaaaaaaaacaaaaggaaaaaaataaaaggaaaaaaacacatattaaaattaaaagacacattaaattaaaactgaaacggtataggacaatacacacaaaattaaaacatgaaaccatattaaaaccaaattataactgtaaatctaaacatagaaagatatagagaagtacttgagaaatcgaaggaaacccagaaaaaccaaactacaaattatcactattttcgtgagaaattgaagtaaactcagaaaaacaaaacccagccaacccaagaagagattcatcatccttgtggggggaaacgagaaacccagccaacccaagtagagattcatcatcctcgtgggaaatcaaaaggaaacccacaaaatttgtggaaggagaaggtttttgaaatggcgtatcttcgtcgaggtgaagaagatcctcctcccgactacagtaagtcctagatccatattttctagggtttctttagttttcaaaaaatgttggtgttgtttgggcaaatcttagtagaatgagttaatggggggttttatactaaattttctgtcggtagtagctttaatggtttgtgggatttgggttttgtggtccacattttgtacattggttggatatgatattaaagtggaagatttaaagttattggtaataacagattagtcaaagcctattgtgaatctttggttgttgttttcttcaataagaatttccacatgttttttttatattatttcttgtttgtttgttggcattgggacattaattgcaatcaggaattaattgttattgggggttaagtcaaaatgttggcgaagtttaattagttttgcctaggtcacctgtaagcttaactatgtgcttatacttatatattaactttgcaagtttgaatttggataatttcactgtgaaattattccatggtggtatcggttcacccgatgtggcaatagaaaatatgagaattgtcgaattgcctactttgatttatgtggtttcaactttcaatggattcagcaggctccatcttgaagaaatggcttaggaattgggatgcatattcccttttggttttttgtttaagccaaaagggaagcacctggatatgtgatttagggtttttaaggaaagtgaaattaatatgatgttggataatttgaggggtaaaaattacagggaggccaacatatatttggtattgccaaatctaatttttgcagttgaatagagactggatgaggaggcaataaggcatgtcccccaaccccaacatgctaaattggacaagtgcattctggaggagttgccatctaacagtgatttagtagcagatgttgttgttaatctgaaaggccatcatgatcgtaatgatgaattcttcgataagtttttttgcaatggggtgatttagcagcatagtagattgatgaagaggtagattctcgtgagtccagccccaaccaagtaatatcgtgtatgagattgattatttcatcctcttcatcatcaaaatttgaggaaatgatgatgctgctgctaatgataatggagatgatgatgttgccgctactgctgatgatgatggagaggataatgatgatgctgatgatgatggagatgatgaccatgatgatggagatggagatgaaagagatggagaagttgataatgatggagatccacctgatgatctatttatttattgtatacatgtggtcaaaacatctttttctctttctctcaccgtctctctttctcccccactctttatgtggctttttgatattccttctaaatgtgtcctcccattctttctcattatcatcgtaatcatcttcttcttaaataaaagttgatacccatatcttcttatttttgtttttttattctttggattctaatttcagaaaaattcaggaaaggagataatagatttggtataatagatgtattcatggtgtcatcacacagtgaagaccttctgttatcccaattctcatataggttctacgtggaagtagcaaaaagagtgccacatcagattgtatgggaatatcccagattcccctttgtttcaagataggattaaggaaggcatcgaagtatccatgagatcgcacccattgtgaaggaggaattgatccttgaagttgtaacctaatgcttccagtgtttgaaggcatacgcgaaacacgggtcttccagaggttcttaggacttggctattctaggaggtcccgagtagtacttcctggaagccccttgcgacctaacctatagatacactcgacggttatacctcgtctaacaccaagtcagatcttatcccctgtgtcaaaccatggatgtgcgcgtatgtacctctatagtgcttattgtccagtggctcgtctgggatattgtttttaaaagagaaacctttgaacaacacgtgtccatgtcctcacatgatagcctacgccaattaagcaccacacaatgaaagagctacctaccaaatcaacggttagatggtcttgtaatgttttacagcctcatttgcgtgctgagtaaggaaccctagtggggtaagaaagtatgccctcgcccacctagtggcctataaatacctctatttttatgaataggaggtacacaatttttacttacaaaaactctgctaaaattcctagagagctttcttcttagaaagaaacaaaatgaatacaaagattgtcattataaacacttgtaatactcaaacatttgccaaagaaggctaatactactgactcgtggactaaggatcattaacgcctgaaccac

SEQ ID NO: 30291 - DNA, 1854 bp, Cannabis sativa
  modified_base (247)..(247): a, c, t, g, unknown or other
ttagttattaggtgagattattattatgtgtatttaaatatattagtaaaagtaatgaaatccactccctcgcactaaattaaaataattcaataaattttgttaactaaaaaaataataagaattaatattaaaaatttgacaatgaaaaggccaacgattaaggggcagaaaagggtatataataataaattccgttgacatgtaatatatatttgcgagatttatatattattattattattantattattattattattatagtttgagttgtttagtgatttttatgtacctcgcttgttttatgaatttaagttgcgatttaagttattttattagtttatatatatatgaattgttatatgtaaaattctataaaaatataaaaaaaaataaaaatgtaaaaataaaaaaaaattatattttgttggaaatgtataaatatatttatatatacatatattaatttggttatgatatttgtgtgtatgtgcatcatcatcatcatctctagtattagtaggttcagaaacgtcacaacaagcaaattcaaaacgtattaccaccatacacctgacgtattgatgatcacaatcacaactaattcaaacaaacaaaaaaaattatacatctataaagtaattccaaatgaaatcgaatcatatcataatcgtattaattgtatttatatatatataagaggtcattttcatataactatagttttaatcactcatataaatttctatgtaaacatggttaacattatctctattcggacaaacaaattaatatccacttaattagttcgaaacataaaataaagataaatagataaatattagatagtcaatttaaaaaaaatgtggacggcttttgtcttgtttgaataatgatatatgggtttgattaaaatttcaaaggtgtgttgtgtgttgtcttggtctacaataatgttggactttacacgaattaaacggtcattattattatttaacttgtagcgcctcatttaagctctttatataaattatttttagatgccactaaaatataaaagatgaacgataaatttttgtgttgagtcacggattagatggttttcttcaaaacattcgcaatgctatctaaaaatgtgaattaagcaattaaaatttgtcggtcatccccgaaataaaatagctcaattatcgtaggctatatcgaatctccactcactacaaaaaattgtcgaatacaccgtcacaatataacacagtaaaaaattttctagtaaaaattatatttgtctttttcgatatgattgttgaacgtttttcataaaattgatacaactaagtatttagattcaaataaacacgttttacgaataaataaaataataaataaaaaataattattttattaaataaattttctgtaaaatataaagtgtcacaccaaccaactatttagattcaactaagtatttagattctttggacgtttttacacttatatagcatccaagttgacgtcagatatcaacttgggcgctagatgtcaacctgagtgctgtgacctgaactgtctttagtaaaataagcataactcactcaattttcaactgattgacgcaattcaacttacattttgaagctatttaagctctctatcaagtcatgtataacaccccagtcaaaaatctgaagttatcatcgtcaaattcattcttaagggagttacaaaataagctcttggtaactcgtagcgggaccagtcgagcaccaaaaattaactgttaccaccagaagctaatttttacctttagatcatcatcaacgatggaaaaatacttatttgtattttttt

SEQ ID NO: 30292 - DNA, 2948 bp, Cannabis sativa
  modified_base (50)..(77): a, c, t, g, unknown or other
gtgtttaatttcatcgttttagaaggttcatatttaggatgttaatcaannnnnnnnnnnnnnnnnnnnnnnnnnnngtaaaataatttccaacatatgtttcaaggcctggttggtcagaagaacaatgaccttgagttggaccgagcacatggatcccctttctcccaagagatcaatgtcttagagtttcctcacaagtttaagatgccgacctggatgatgtataatggaaaagagcatcccttatcacatcttaagtattttgaaatgcaaatggacctccaaggagtataaggagatgtatgttgaagagtttttcttgtcacgctctaagaagccgcccagcaagggtatttcaagttgacacccggaaggttcaactcttggaaggttttctcctcggaattcagtgcacaattctcttcttctcgccaactcccactgcatttagaggaccttgtcaaagtgaagcaaaggttaggagaacctctccacgcttacatcagcagatttatgacggagggaatgaaggttgcacggttgatcgaagaagggaaattgaccgcgatactagggggcatcgaagttctcggagaactttggaaggatatcaagagagacggaccggtagattctatgagtgacttccttgatcgtgcagatggcttcatcaagcttgaagaagccattcagcgagaaaaagttgagcttaaacctgggcagccaaaagctccctctgctagaacatccatccagcccccttagtacccaagcaattcaagctcgggcggtaaacgatctaataacaacgaaagacaaggcaatagtaaaaagggaaagtttgctggcaaaaccgaaaaggcccctagggaaaatcttgtcaagtttactactttttctatcttgacagaagatctagagacatgacaaagttttgtcgttttcatgaagattatggccatgaaaccaatgaatgcaacaatttgaagcgggaaattgaatttttgataagaaagtataacccgcacgtgtaaagatatgtcaaggttgatcaaaatcaaagggccgatgacaaccaagatttgctcccagcaccagtagatggacatttgcaagtcaatatctaaggcctgcacatagatggagattcaggcaaagcccgggagaggtatgcccgaacattacaacacgagcaaaaagagctggttttggccatcgaagagagaaagccaaaaataccacgggtaggggaacccattataacattcaatgatgaagatgctgtcaagatcaatttcccacacaacgacccgttggtcgtggaagtgcagatagccaacaaaatggtggcccaaactatgacagataatggagcctctgcaaatatcttgttcaaaacaccatatgaaaagatggggctccaactcaaagaattaagcccctgtctttaacccgtgtatggtttcactggacagagtgttgcaccactagggcgaatttgcctacccctcaccgttgggcaagctatgaagagcatgactgtaatggcataatttctgatattggatgtcccataagcctttaatgtcatgttaggccgaccaactttatatgacctagaggttgttacgttgatatttcattcatgccttaagtttgcaacaaagaatggggttgggtgcttgagaggaaatcaacatgttgctcgggattgttacaaccttgccctaaccaaggctaaaaaggaagtatcctgtagtcagagttcggacaaaggaaaaaaacattgccaaatagggagccacccaaggcggggatgtagatgtggatccatgacttagggaaccaaataccaatgtagtctagtagaagaattagaagaaatcagaatcgacctaaatgttctaaccaagaaactcaaaattggaaaaggtttgttgctcaaagtaaaatcaacattgataaaatttctgataccaaacctagacatttttgcatggtcagatgaggatatcgtcggaatcgatccttctataatttcacatgtcttgaatattgatcataatttctcgccatttcaacaaaaaagaagattgttggagaaggaccgggccctagcgctaaaagaagaggtagaaaagctgcgaagcaataatttcataattgaagctttatacccgacaagggttgctaatcccttactgaataagaaatggcaagtacgcattgatttcaccgacctcaacaaggcgtgcccaaaagactgttttccacttccaagaacgaatcaacttgtggacgcaactacagaacacgaaatattaagcttcatggatgcttattcggggtacaatcaaattaagatgcatccaccagaccaagaacatacaagtttttgaacagatttaggtctgtagttctataaggtcatgccatttggtctgaaaaataccgaagctacataccaaagattgataaacaagatgttcaaagactagattggcgaaccatggaagtgtacgtggatgacatgctcatcaaatccaggaaggctgggggccatatagatgacatggacaaatgcttcaaggtcctcaagaaatacaacatgaaactcaatcccctaaagtgctcctttgaagtcggctcgggtaagtttctaggctttatcgtcaatacctgaggaatcgaagccaatccagagaagattcaagccaacctggatatgaaatcgccaacaaaaaccaaggaagttcaaagtttgactagtcggattgccgcactcggcatatttgtttcgaagacaacagacaagtgtgtcccattcttcaacattatgtggggaaataagcagtttgaatggacggaggaatgcaaaaaagctttccaggagctaaaggcgcaactcgcaaaaccttctatgctctcaaaacctctggacggag

SEQ ID NO: 30293 - DNA, 1248 bp, Cannabis sativa
agagataagattttagttcaagtgaaaaaagtaagtgacgtttaattaacacataatgttagtaatctgactccaacttattgtcactttcaatttagttaacagtacacaacagaaaaatgtatgtatgtagaatcacttatcaaataagttttgacttacaagtcaaagaaaacaactggtatcatatgcatatgcattgtctacaaaaatagctttctatattcttctgcttcttgagccatctcctcaaagcttctgtcctttctttccttatctaggtccagcttttcttttagctccttatcatttttgtcaatctacaccaccaaatccaaataagacaatatttaaacataagaacccaaaatcaagcacagggagaatttgccatcttacagcatcgtatatctcatcattattctcaaaatctccaactttccttggtataatatgaatgtgaacatgaggtacagtttgtcctgcctggggtccatcctagaatttcaaaacagagatcaaagcagtcaattttctctaaaggattcccaccattttcatcattcccagtgctgattagcaacgaatgtagaaagggatggtatgaggagtagtttactatgaagtagcttccatcaagacataacagataaaaaaataaatgaatataattgaacaaacataaatgcaggttcttgctattctacattcatcatctgaaaatggaaaactccataagacaaacaatgtaaatttatattaaaatgagaaaaagattgaaagaaaaataatggaacacacttgtattgtgaatgtgagagatgacgctttatggtagctctcaagctggccaccaaccatttgtgctgtgatccatagatctgtagtctcatcagcagtgagatcgacaaaccgtttcacttcacgcctcggacagacaagcacgtgtacatattgtcaaggaaacaaagttgaaatgactcataagcaatgccaatgaagttcaacatagaggtttagagggcatttaatgtaaagcatgcaactttggtcaattggtttacatgttacgagagtttgtaataatttgatgttgtataccaaacatacacatgctataaggaaactgattactcttttaaaagctgctgtgtaattatttaaaacaacccaagcaataacaatcccaattagtaaatacatgaactcattatgctattacaaagttagcacaatttgtcctttttc

SEQ ID NO: 30294 - DNA, 2732 bp, Cannabis sativa
catagtaattgacataattttgatttttttttatcaatttattatgtgtaagtaattatgtatattttttttttctttcttttaattaatttgctagacaaaagaaattgggtatgagaagatgaaagcactacatccacactatctcaattttagtatatatttgatatcaataagttggtttgtgttaactcagatttttgttaacaataaataaagtcttgtaaataaaaattatgtggttttgtagttaaaatctacatacttcacgagtcaatattatttctgagtatttctttacaatgtttcttgattacaagagaatttctctggatattcactccacctcacaaagttttcccttcccaaaaaagaccgatcccttttgctataggttttgtccctacttatagggttttttggaatgacagttactctctttcggtctaaactaggtaaatatttatgaaacatggataatccccatgtttcatatttacaatatgtggataaaatgaaataacttttgataacttttttttgttcttattagaaaatagtttgtcattgtcgagatagcatactccaactttttctccctttcttcaacggtgtttaggaatagctggtcttattccgtgtgatgctagttaagatgtttatcctcactatgaccttttacgacaattcttggattagtctttaagaattctgagataagtcgcactttgcttatttctcttagtctttcaacatactcataagtatgtgggtcaatgggtagcaagctcttaaaaaactcgttatctacactttctacttaactcattgtttcatactattcatttgtctcgtctatctccatcaagttctaaggctttagcttatgatcttgttatcctcgtgaatcattgtatttatagcacaatgcgaggtcaacttatcttgacaattattttatttctcgtatttattattctcttcaatctctgagacctacatggacacgtatcatgtccatatttagtgctcaaaatatgggggtaacaatttcctcttaaaaagtatttctctttcattttttgaaaaagacattttaatcaccattgttactaattgtttgtgtaccgagtaagcttcttaaatattttttttaggtgatttttttttcttctcaataaagagctaatcatggctttaacaataaatacttgtcttttcaactgacccgtaagttaatcacccttgatttagttttgcttaatcaaacggtgcttaagattccgtttaaaagactagcattttccatttcttaccaccattttcactattactattttaagaaaagagaagaagttcaggacttgaaatacctctcttgtatgccctctttatctctttgttttttcttcaaatttctgcaactatttttttgaaacccacaaaatgcttcattcttgagccttggattcgtcgagctccaggataaatttcgttagattcatcgtcgaattctagtcatagtatgcttttcttaacatctaaatatgcctcctatgatatgctttgtttttcttttataattttaataaggttttttgaatctgatttaggctagttagggcttttagtgatttttagatctttgtaactctggattttggtattttcaaataatgtggagtttttttcaatgtatttttcttctttaaagagaagaaaaaataaatctatataactcaacacttgaaaactcataatttttagatcgtgcgattcactattcttttttcctaccctataagccaaacctaggaatccctaaaataaaacttgaggagaatgatatggaaatttgtgaccatattgaggaattaaataggctagacgtttctgcttgattaagtcaatttataaacaaattatcaagggtaaatgttctttcctacaagaagtcgccttgcccgagcccttttatcttacccctgttaatgtttctttttcgctaggtacttttgattttcatattatggctccaccaaaagctcgaaaacccgaattgccccaaaatcccactgtgcaattcaaggctaaatttttgagtcgaaagtaacctcaatggccctatatgctggccttttttttacaatcttgtagtattaaataaggtgatagctttgtatgccgattgcatagctaagaaacaagagaagagctatttcccacctagtcacctcaccagtaaatcagagtgtagtacaagtgattttgtaaaaatcaaggattggagcattgaacacaaacgtgctagggctatccttcccttgaacagctactttaaagagttttgtgattatgtagggattgcttcgttccaactaaatccaaatggttataggattttagcctctctaagatctttataccatatgctgtgatgggaaggtcttgagttgtacgaaatcacttgtatgtacactctcaaggcaagtccaacgaggaagaattgttctaggggttcttctacctcgaaatttatacgggggatcgcaatattatcgttgatcttcctaacaagaaggaattcaaggataaattcttctggataacaggggttcatccttgtactcacacgacttttcaaaaaccttgtaagtttcatgttatactcgaaattcgacgagcacatcagaggaagacacgtgtcgagctgggaagaataaagaactcaa

SEQ ID NO: 30295 - DNA, 3315 bp, Cannabis sativa
tgtaaagtataaaatttccctctaatctatccgtactccatcatctgaaccgatagtttttggccaaatcataaaacatcttgactttgcctagcaaattcctttttcttatattggtaggcggttacggtagatctccccatactatgactcttccctaacttggattattatattaaattttttaatatttaaggaaaatttacattaagaataaacctactcttccagatctgggattacatatacatatattaagcccaccaacaatgacaagcggtataatattttgtttgtttttaaatgagacatatattatttgttttacacaaataaaaaactaagacaaaggtgtgttgacgtaaattgagtgtgctcagtacacattatcattacttgcagttgcagtttaaatcaaagtattcacattcctatgagcagtgatgataaaagtgaacgtaaatacgacctcatctgttcaatctaaaaggcattatatagtttcaatcaaagtcattagaaggaagaatacatgcttacaaaatttaaatcaaaggcaccatatatatacaataatacaagatcagttagaaaaccaaaatttggggtttcctctgcagtaaatcctcaaccgaaaccagttattatacatatgggattgcattaataaattatactggagtttatgtgtaccataagaaaaacaaacgaaattagtgatgaaaaggaaataacagacctaatcggcgctagtttgtatatcaaaattataaatacataaagaaaaaaaaaaactcgacagacctaaacgtaaagaaaaatgaaaatagtatagagaactcaccaatggcagctcctgataagaattgggcaataccgtaatagagaagagaaaaaagagaaaattgagttttttttttttgagataataatttttttttttttttttttttttctaaacaaagataagaaatttgagagagttgaatagtcaagtttcagagaaaaaagatttcaaattttataatttttcttttaaactattttaatataattttattattatttttcaatttttttatgccaaaatatagaattttatgttgagataagtttggtggtgagtgtgcaatgtgcatgatcagatatcgtaacttggtcgaggagcatgggtgttatattgcccatgtacaaaaaatccacttcagtgatataccgtaactttatcaaccattggaaaagaaaaaaccaaccaacaaacaaatcattgagttagtgtactcattcgggtgttgttaggaagccgctattagaggttgtatccaccacaaaattggactatagttagtgaatgttcaaggaagatggtttctcagtccatttcagtactttttggactttactttgcaacttcattggggggaaaggaaatttctcataccttgttcaaatagaaactaacaaggacctgtctttcgagtgtgcctattgcctatttatataaaaaaggcccaaatatttcaatcatcggccaatgactctcatgaaacaattgtttctagtatgcctattgcctattaaaaagtaacactattatagccgggtcccatatatgattatggtaattatgataggtaaagtaatcttaattatcatgagaacaactaaaataaaacaggggaagaggcaatagattattattcaatatgaatgaaacaggggacttgtaaatacatagaaaatgctaaatggtacttgtttggtggtggaatacaagtacgaagttaatgaactgtaattagtaaggtatcacttcatggcgattgaagaacaagccagttggaccagcattaggcagcaaggctaacctcactacactctgagcaccttcttcaatagtcaagtccccagtgttgcaatttatatctgtcttgacatgaccaggacttacacaattgatgcaaaagttgggatactttttggccacaattcttgtgtaagcattcaagcaagcctttgtgattatatacgaagaaacagaagccggccagcctttgctctctagagaatcttctctatagtcttttagaaactcactcaaaagttgatcaatttgatcctcatcgaggctttcagcatcactaagcacccctttggcccatccaccaggtataaactgaaaacacatccagggatcattttaatatttatcccatttatcatttattggttcatttattttattttatggaaataaaggggacatttcaaacatgttttaagaatgaggattaacttgaaatttgtgttccaataaatattgttttcttaccgataactttccaaggtaggaagaaacattcacaatcctgggtgaatcagaaagctggaggagaggaaggaaagcttctgtcactgctttggctccatagaaattcactttgacacattccgaagttaattcataagtttctgtcataaattcacttgccctttttagctgtatccctttctgcattaaacattaaaacttgttctctttgaatcaaagaaagaagaaattgtataaatgttattgctctgaatgtggtttcagtaagtgaagaaatggccctgaatcacaggtttgcaatacacttatgagatagaatacagtgacatagacattaaaccatgttatatttgaagtgattatggagttgttaaaccatgttgtgttttatcactgaatttttttgccacttgagttagcctcaaatggattgtattacaatccattgatttcattccttctgaaaacattaaacctctcagaagaaatatctcattaattttaacctctacattaaattaatattatacctagaaatgaatcacatattgaacaccagacatataccttttcaagagcagcagctttgaaagtttcaggatttagtttgcctccaggtaaccctgcattgtttacctgcaaaagtttcatttttctcatcataacgtgaagaaagttgcaattatcataatactaaaaaggccaaccagagattgttacaacacttgtttaacatttttattggcattttgcatgtcaaactgtattagaatcaaatccaaaagttttgataaacctgactagttttacacgcttgtgttctttttgtagtcttagacaacatttatctaatgttgaattgcataaaccggaataagcataattttaaataaattttaatcaaaattggctctcaaatattataccaagatatcaagtttcccaaattttgttttgacaaaatcagtaagagcagaaatgga

SEQ ID NO: 30296 - DNA, 3113 bp, Cannabis sativa
ccttaattaataatgatagttcaaatcttgaaaattgttgacccttttgatttctttggttgaagctgtattgaagacgtctatgatgccttagcaaaacgtcttgttccaacagctgcagttacagctgaccccaatttcaagtaagctttagcttcttataacttcaaaaatcatttcccttgtccatttggagtatacttgacttaatccaatataaaggaatcattgccattcatcattgtaatttgtatctccacagtgtgttcattcatatttctatgagggtacttgtgagagttcaataacatgattgcctttgtccttgtcatcattcctgatctctatattctctactctagattaagaattatcatgtaatgtaaattatctttcatttgtcttcctggtgtcatcttccaaccaagaatacaacttctgcttcaagaacaattgattggcactgcctgctgttttaatcagtttcggccatagccatgtaacaaagaatattttcatcgagacttagaatgatggcattgcgcgctgtttgtatcagttcacgctaagatctaggttcttttcccaataatagcatcttgaattatgtgctgcagtgtacgtaagccaaagtcatttctgcttgttaacttctgttgatcaaactttgcattctctatttctcatatttgtaaaccttaaaagtaacacaaaagattagatgaagtaacacaaaagattcacataaaaattttacgcggttcagctaaggtgctctacgctcatggaaatcctcgagtaggcttaatccatcatgaagaatgtctcatgtgcacattagatcttcctcacagctctatgaacttacactcttttaatatctgtagtccgagaatagttattgtgtatgtgagacatggcgccttaattaacaatggtcaagtcacttgtacatggacttggtagaaaatataaacaaagtccaagttctaatagattaaaggcaacagttcaacactattaatggctctactgttttatatattgcttatcgctgattaaacctgtttgaaactgcgatgcagatatattgttggtctggctggtcctcctggtgctggaaagactactctagcatcagaagtggtgaaacgggtaaacaaattatggccacagaaagcttcttcgttggattctcaagttaaccctccagatgttgctgctgttcttcccatggacggtttccatctctatcgctcccagctggatgcaatggaggtttgtttttcttctcattcatttgttatgttttccccaaccagaattatattgcaatttgcagactgccaatttaactaacccctgaaatagattctaaataacaggcaaagatgaatgtgttaatattttgatccagatattcaaatactatatgggccactgtaaattttggagaattattgcctaaattcctaagtgaaataaatttgtatcttcctgtgatatattgggccaaatggtgggggagtcagtatgccttataccattaaatactactttctatatctgtgataagttttggtcatctttaatcattgctcttgttgttgtatctagaatccaaaggaagctcatgcaagaaggggaggtgaaatttctatactcattatttgatggattaagacattgtagctaccaaaagtttaatatttccagttggtgattacagctccatggacatttaaccccgagttacttcttacatgtctcaagactctgaaaactcaggtgattggttgatgttaacaattcataataattttataaatcccaattcagaagtattgcttgctctgcctagagagttgcaagctcggggttcactaatattcgtcaaacaaaaggttttttcagggatcagtttctgtaccgtcatttgaccatggcgttggagatccagtagaagatgatatttttgtgacccttgagtaagtaatatgtgcctttctcatattatagactttggctgtagctcttaattcttgtatatgaatgttttagcaaattaaattacgtttttcaggcacaaagtggtgatagtagaaggaaattatatattcttggaagatggttcatggaaggaaatatcatcgatcttcgatgagaaatggtaagcgtttggaatcttgtattctatctatcacccgtgtcgtgtcgtgtcgtgtctgtttgaatgaattgtttaccaccatttgtgtttctttctatgtttgaaggttcattgacattgacattgacaaagctatgcaaagagtattaaagagacatatctcaacaggtaatctacttgtgctgagtaatctgattctgaggttaaagaccactaaattacaataccaatgtatgttttttttcttcttctgggatttcaggaaaacctcccgatgtagctaaatggagggtgagttagctacgtacctacattacattacatgttaatttaataggataaatttcctaaattgaaaataaatataataattgcagatacagtacaacgaccgcccaaatgcagagctgataataaagtcaaagaggaatgcagatttgataatccactcagttgatttccaaaattgaaattgagaattttttgttaacctttttatgaaattttcaatataaataaataaaacaaactacaaaaaagtcagcttaattacaatataaacataataggataattataattagtttattgtttaggtaaaattagttatactttcatatttagttatatgataaaataatctcttagattgggcactaatctaatttcaagttgatttttttttatctatttgggaatatggttcttttcatataaatattataaaagctgaaataatatgaatataataattgcagattggaggaatgcagatttgataatccatttagttgacttactaaactgaaattgcttataataaaaactaagctgtggatttaatcgatggtaaattttattatattttcagttcatggttgaagaatgattggcttcaacttttctcatctcatgttttggttttgaatctttcgatcgagac

SEQ ID NO: 30297 - DNA, 4422 bp, Cannabis sativa
agcagtaagcaaacaacaacgcaagtttcaaggttcaaagtcagtatcaacaatcatcctcaacatggtgtgatgcttattgtatacaaacgctcaaacaagcatatgaattttccatacctgtgcctcttggattttaatagaatttccagtagctttggcttcagacaattttcctttccaggccttattaagtcctttgtactcgtatcttctatctcgaaagcttcaaataatatggaatgtcatataaattagcaagaagacaatgatttttgtaatgtatgtaaaataaaaacacatagagactacaaagatagaaagacaaaagaatttcaccccaccagataagtcaacctcaaatcaaaattactcaatttttataaatttaatagtgaaagttttttaaaataataataataaattagttgataagtgtttttcgcaattgcattccaaaagaaagaagaaaacttttatgaaagaaaatccatgctcacctgcgaacagtgtcaacgtagaatgcattctccctcatgcatatccccgcttcccgaacttcagtaactgtcttatccagtacccgtttatatgcctacgagaagcatacaaaattagttttaggcatcatttacaagaaaaattgaactttaatagggaaaatataccttctgacaatatttctttagacgatctttcagtctcaattgttgttctgtcttaggtaggtcaagaaaagattttgctaactggctatcagatccatcaacaaactctgactcaatttgcttcttcatatggtagtagtcactgtcattcaaaatgataaaaaaaaaacaatcatgaattaccttattactgacagacttaaactaaagtatttgctttaaggagttcaagagctttagttttgtgattttttgaggatttgaaaattagtagactagtcaggcttactgtgttttgcattgatggcttgattttctataggcttttctttctagcagtgttgcttctttttaaaattaaaacttaaataaataaaaacaagttttgttgaaggtgcatgtagaaaaataatgagtcccccaaaaagagaccttttctttgccatgaagacttctccacgccaaacccattcaagtttccgaagacaagtctttcctgggcgattgaaatcacaagcagtgcaaatctcgtctgtaactattgatgatggctgaaatagacacaaaacaatataatagaggatcaagaatttctccctcttttaaattgataagtgaagaacaagttttgttcatgaaaaggattaaagacaacaactgtaataggtaaatcagacgatgtgcaaaacatattaaggtaaacaccaagttttgttttgtaattgcattgcaaatctatattgtagaccacacaaataatatgaaatgaatagaaatcaattaatcagcttacctgaagcctgtttgtcaaaataatatttgggtacattgcagctacatctagatgataaataagggggcattcatctcgtatggggtcatctcgtaaactttcaagctgcaaagtaaggaagaaagataataaaagagattaaagtgtacagaaaaaaatggaaaataaatatataatttctatgttgctacctcaaaccacatgaaccttaaaacaattgttagagtatgaaattaagcaagctaacaccccctttactgagttgagcatcattcactacaggcaaatgaggtttgaacataatgaacattggaaattcaaaggcaactgttaaattccaggaaagtgagtgattttagacccattagtttggtagctactctgtcaaaaaaattataagaaacaaactattgaattcataaaattcttattacattcatggcatgtttacctaaggtgtcacactagacagcgcctaaaaaaacaaggcccataatcagaaacataattaaataccccatcacattaggtctgcgtcaaaggatttcaagaattaaaggagttctgtaatgtttatttcatgtctactttatgaggacaccttatcatctttccctatttacctgtttccgataattaaagaatttctcttaccaacaaaaatataataataatctcaggaccaaaccagaacattatccaaggctaactggctaatgaaagaagcaataccttttctaagatagaactcctcacttcagcataattagaaacagaatccaagtccatcttaccctcaactcttatggcatattgcagatcacgatcaaggttgtcaatcagttgctggaaatcaaagtttgcaatgtttttgtgtcaaattacatgtactattaaaaaatagatagtgaaacacccaaaattaaaataaaaactggaccgaggtaacattcactatgtccatggaaaatggaaaaagaccagcataattaatcaagggtatagagaaaggggtcaattcatgtcaaaccataatgacctattattaaaccagagcaattaattgtgagcaagatgacatgcctgatatccagatggatcgagcttaaaactagttaaaagatcggatctaaaaactccactttcaaggcattccacgtgaccacctatatatgtctcactttcaagaagacggttattatgaaacttctctgattcagcttggtgcttgttggggcaaataacatttgccttgtatgcctggaataaaagaaaagttgccttgaatgagtacacgcttatgaagtgaaaacatatgaaagaatgcaccacacaaggaaactcaaagatctagtgttgtagcatgaatggaaaaacacacctggaccattagaagcatttcacagagggtcccactacccttgcgcaagacctcatctggtgacatcggaataattgtcgcaagagagaaaatgaatggatgaacataggtcatatacaagtaataagttgaaacagcatcggaaacagaatatgaggccatcatctgtaagaagttaagttgcatatacattagaaatatttctcatataatgtacaaaaacaaatttgagtaactaaacggaaacacagatgatatgatatcacctgagatattccaggaaagagcagccttaggattctaaggctgtcgatttatctgtaggtttagacagtatatctcagactaaatttttttaatttaaatttcttctctaattttgtcataatttgtaagactgattttattttctgttgagcctatcgatattttcccctagttttattctgttgaaaaagttctgataaagcaaaaacacaagtgctctgctctcttttcttttccacttccagctttcatgaacataaccaagaaggttacgaaaaactaggcaccatcctttgcaacataccactaagtggtaaagaccttttattgagcaactactcacacagaaacttgcctttgatgggatatggagaatttttttccaaaataaataccaaaggctcaaatctaggtaagcaaattcatcactttttgtctgagagaacatttgtaagaaaatgcctcaaaaatccagactaaaatctcttttttaagacaaatggattgaaagcaaacgaatgacaaaaagtaccaataatcactaaagattgtgcaatggaactgcacagaaaacaaaatactaaactcttacctgtggcttttccattgcataacgaaccatatcctcaggattcacttccaggggatcatatcccaactttgcctttgttacagcctgaaacaataccactaattataaactttctagtagtgagaacattaatagtagcttgattttaaaatagaaggaaatgaacaatgtcaatcttttttcttttcaggaaacaagaagttcattaagtataagctattgtaatatataattttttttcccagttcattaacaataagagataattacatgaaacatactacacacataacaaacacaactgaaaagcaaaagtggcagaagcacccgcaagagagcaaaacaaaaaacacataatcatatggaagatattgtttgatgtcttgtaaagcataatggtataatgataagcaaataagcaagttatattagatcttaaaccttaaggccctggcttccctgagggagataactatcacgcttgacccaagcaaagcaatcaagatggcaagcaaatttagcacgacattctccttgaatcttgtcacattgaaatccaacctcctgataataatagcaaccaaaactgttagaaaataggcagaaaaaaatatttaaacaaacagatatgctgaaaaccaatccagaagcaaatataaagcaacagctaactctagtaccatccaaagtatttttgtgctagtcaagagttcataaagta

SEQ ID NO: 30298 - DNA, 1901 bp, Cannabis sativa
gtctacctattagtaacctgctattacaggtcaaaaaaaatgtaatcatatagttacaataaaaatgtaaccattgactagtcacctatattatgaaatgtcataaatttcacatttattagtgtcttgattaataaatagttagcaaattagtcataaaattgtgagagaatttggactttgtgatttttgaattcagtatttcctccttagtatgtgttttcagtgactaaatagaataggttatttaggattttattttcccaaactatgatttatgcattattgtgccttttgaatttttcaatctatgaaaaatggtctccaaacattcacagtactataaagtgatccttatgtgaagttttatgacacgtggcaaacgaaattatgatgatgtaattgtttagactattaccacgtcatcgccaattgtgtaattaatttgaagaaaaaaaataatttaaatgtccttaattgagttttactttaattttttttattaatcattaattgattttagtttaatcactttttatattttttattttaaattacagtacacatatgacaatagtctaaacagtcacgctaatttacaatattgtgaatagtttgagaactatgtttaacaggctaaaaatttaggaagtacaataatacataaactataattaaggaggaaaatcctaaatagccaataaaatatgagtaaatgttattacttttagtgagattgtacacatatataattaaatggttttagtattacaattttacacaaaaattcagttagtatactttattgtattatattatatagtattgaattaggttgtatttatttattacaatactatatttggtattgacgtgtattaataagttgtgtaaaattatattatatttatcatatatataccaaactccaaccccaactccagacctagagcccagtttcggccacgggcaacaaacaccaacccaaatccggacacggccctgacccctaccccagacctcggatccaacccgaccccagacctaaaatcggaccctggctccggaccatggcctcatacctctaacccagcccaggcttagagctaaccccagacccagacccaactccagacctcggcccccaaacgctttttaataaatattataatacaagttaatacaggtcatttgttatgtattaaataatatgattcaaatcatattatagtttatggtaatattagttaatacaatataaaatcttattcacacatagtgttcattattatttaatacaatatgattcttatatagcctaacaaaagagtctttagtaatttaatgagtgaatggacttgcatatgatctattaatgagaaatgttaaggcactagttaatggtgtctagtaccttaattgttatattatttataataatataatatatatatagattaaatatgtgtaataaactaataatatgtaacatataacaatatatatattagttgtcatcattttataatatttgggggagttacttgttgctactatgagtaaccccactagtatcaccaatattaagagtttaattaaaaagatgttacacatcttaatttgaaatttttaatgctaaaggagttatggtgtgtgcatgagttatatttgagtccataacattcatgggaggttatgagtttgaatttcaaatggtgatatcctaaacactatataaagaagcctaaggtgctcatattgagagagaagttttctatcaaaaaaacacattgctagaaaactctaaggcttcataattgctaaagttatttcaatgagagtccctttaatactaagagatggggaaataagcttttggacaaaggtgtaataccttgttc

SEQ ID NO: 30299 - DNA, 1415 bp, Cannabis sativa
gtcatgtcactaggtttcgttgtgcacatgttcagtgtaatattttttttattgtaaaacactaaattgttatattacttattattaaaatataatatagattaaaatatgaaatatgtgatatatatttactgtttgagtttgttttcgatcggtacattaaatttttttgaatctcttaaaattttataagttgtcttaaataactataatgtaaacaatcataaaaagaattggactaaaaaattctctcaaatactgaaacatagataaatagtgcatcagtggactcattttaagggatacatcctagaaatatcttatattatatataaattacatattatataatgtaatatgacaaaacataagagtaggagttaaaaactagtaataaccaaatgttcagactacatcgttgaagagacagtaaaattatgttcagactacttgtcagatgttgcaagtgtttggtcgtgtcttcctcaaattgataatgaaataagtaaagggggaaggggtgtttctgtttccaacataacactacaaaaaaataaaaaaaaaaacctatttttattcacaagataacttttttgtgaccatatatgtaacttttagtcacaataaaaaaattacttgtgaataaagcatacaagttgtcactaatttagtttaagtcacaacaagtattgtgactaaaaacacatttagtcacgataagttgtgatttttgtgactaatacctttagccacaaactttttagtcgcaatataagaatgatgatatttataatcagtcataacttttttttactttctttcacaaattttgtgaagactaaaagtaagattttttatagttggtaagtcgagctaatcgagatgaagcacatcaactcgttttgcaaaatgttgatgaggttcaactgtacattgagtaagtttaaattacattttaagactcgattaaaaatgaaattgtaatgtactaataagaataatatataatacatcttgaaggaaatatttcgattggatcaagatcacttatcctagtaagtcgaggaactaaaaataagttcaagatgaacattatcgaaattttagtacatggataaaaaaaaaggtattatgtcttcgttgtttttgcaaagtggtaattttttcagtatcactttaagtactaattaattttattatactatgtaattgtagatatgagggactcccaaagcaatatctatctcacacactaattatcacatttttctttgtttagttattacgaaaattcttatttttgtgactattaattgtaaattattattttatgttgtgactaaaaagtctgtggctaaaaatattagtcacaaaaattataatttgttgttattaaatgtatttttagtcacaat

SEQ ID NO: 30300 - DNA, 1925 bp, Cannabis sativa
aatgattgcagacaacaggggctaagagctcatctcttttagccttcttcaaggcctgatctttaaaatccctgagctccttcacctcaacggtcaattaatctgtcgtctgcaagctcgcctgatgcagctcctccataaacctcagcctagcagtcagatccttgactgcctccttggcctccctcagcttgcgcctcgccttggcctcaacctcgtcccgggtcttcaactcctctgccttggcctataacgcctcctgatgcctcctctccgcttgtgcctccctctgttgggcttcctcccagaatgttttccgctcaactgccaggtccctcagacttctcatgacctcgtctatgcccccaaactcggacatgacatacccatgatctattaaagtctttgagaggcgaccggtctctgcagcgatctggcagaacaaaaaaaaagaatggtaaagtacgagagatcggatgccatagggtaaagcacaaacgaaaaaaaaaaccatcaataaagacttaccgcggtcatggcagcgctgatatcctaaacttgatagatggaatttgtggaagcgtaggctgcgtatcttttagccaggagttgggttaggttggaaacgaattggctcgtcagttcagaggtgaagaaagcaagggcagggccgacaaagcggttgaaccaatccgttagaggatccatgttcagatcccaggcgttcctgaaggcctcctcgcgcaaggaattttgtcgagcctcctgtaagacctttttcagggcttccacctcggcaaggtacagtgtattcctctgcctcaggcgaaaagagtccgagctgacggccaaagtgtccttcctcctagactttttagaagactcagcctccaccatcttgcccttgtgcttctggtccagcgaggccgtgatctcaccttcctcctcctcctcctcgacctctccttcctcgtcgatcaagacgattttgcctaaggggacacttgaagatgacctccccggggtcaccgtctgggtgggcgccagaggaagagaagggtctgggctgtaggtttcggcaagagtcgccaagaggtcttccattggcctggctgcttcaaaaagaaataaacaaagtgttagaatggccataagaaagtatgcacatgaaaacaaaacggtaaagctagtcctaccctgactatctaactcagccctagcaaagtcttgagctacaatactggcttcatcatccccaagaaagctgtgtgaggggagaaaccagctggaagatagataagctgagtgatctagagggatgggtgcgggaggtacgaaacccatccgggaccggcctaaaaaatgacctaagtggagaaagtcttagcatgctggaggaacagctgggtaggagcggtacagagaagaggaggaatcctaacccactccgtgagaagctccaacggtccacggcttggaagctggaagagaagaagaagcgatcggtattcctttacattcttttgaaaatgaaaagggatcgggccctcattagaaggatgggcccggagagtgaaaaactcgtctttaaacttgtccccctttttggggacagatacaagttcacaaaaatataaaatttcagccgggctaggtgaaacccagcctttggctacataaaaaataaataagcccaagagcaggcgataagcttgtggaattagttggtaaggcgcgaggccgacaaaaaaaagaaagttaataaaataatcttgaagggggagcatggccccggacatgagatgggtctggctccaggccccaaaccccctgtagttgtgattaggcgtctcctaatcccgaggtaggcggtgaaagaccccagacacggatggcttaataccagccacggtcacaatcttctc

SEQ ID NO: 30301 - DNA, 1302 bp, Cannabis sativa
gtaaacttaagaatttttaattttgggctttgttgggaaagcaaggttggaggcttcttacaaaacctgatacacttgtttcaggaatctttaaggcaaggtattatccacggggttcttttttcacagccgatattggtaataaccccagttatgtctggcgtagtgttcttgaagctcgtcaattagtgcttaaaggagtttgttggactgttggagacgacacttctatctcagttttgagtgaaccttggctacccgatacacagaattcgtttgtttcatcttcacatccagctcttgttggtgccaaagtttgcaatttgttggctatggatgggtcgggatgggatgaagacgtggtggctgacttgtttgaacagcgagatcaaagccttattcttggaattcttgggcaacatgatcacggtcgagacaaactcacttggattggtgagatattcgatttttatacggtgaaaagtgcatataaaatggctcaagagatgaatgggtggaacactcaagacacatcagtacttgaagctttttggaagaaattttaggcattgaaacttcctctgaaaatgaaaaatctggtgtggagggcatgtcaaggttgtcttccaactatgattcaactaagaacaaaacgtgtagatgtggcaacaatctgccctatttgtaacaaccatgaggaatcaatttaccattttcttgttgattgtccagctgcaaaactctattggaacagagtgggaataggcatggtgctgcaacaaaatgccgctttcttggactggtgtgtttcgaactttatggtgttggattcggatcagaaaaagagtttggttgctctttgttggtcaatatagaatgcaagaaatgacaaggtatgtaacaataagttgtcaagtgcagaaagtatagtgtttttggctaaaacttaccttaatcaatggctagctgctcatagttccaatgtttttacccgagtcttggttttattctaggcgacggggctgagcagtggcagccaccacacggagatagtattaaggttaatattgacgacgctatatttgccgaaacaaatcagtttggggttggttttgtggttcgaaatgcataagggatgttcattgaaggagttaccaagctatttaatggctcgactacaccagattttgtggaagcttgggtgttaaggaagctttaagctggatcaagagaaatcaaccttgccaagctatccttgaaatcgattgcttagtggttattcaagccttgcgtagttcaatt

SEQ ID NO: 30302 - DNA, 2902 bp, Cannabis sativa
  modified_base (2650)..(2651): a, c, t, g, unknown or other
cttgccactaatgatataggcttattgcacgaaaccaagagatttctatcgaagtattttgagatgaaagattttggtgacgcctcttttattttaagaatttaaatacattgagatcgttcttggagtattcttggattatcacaaaagagttatatcgataaagtactcaaaatatttgacatgcaagattgtagatcaaatgataccattgtcattaaaggagacaaatttagtcttaagcaatgtcctaaagcaagccttgagtttaagaaatgcaaaagattccatacatttcagctgtatgtatgataagtttatacgcgtccagatataatattaattaatcactataaagcaaccaaaaaggttatgagatatttgaagagaacaataaattatatgctcaaatataggaggtcagatcactttgagatcatacctctatacaatcgattcaatagactcccgtacactttcgctaatctttgagtatttattgtttgattctcatgaatgcattaggactaaattcagattacaatatttctatcaaagaatacctagttcattatgatacacaaagttgttattcaggactaacatcaaggagaaaaaattatagaataaagatttaacttgaagtctaatatctcgagcacattttaatcctaccaataacgtaaatgtttccacttgaaaatctgataaatttcctgtaggaataaagttcaatccgcacaatccaattcaatttggattcaatctgcaaataggacagttgctatttaaagatagattacttatgagtaaaccactacaagtctacaagtaagcaagatctcatcaaaacctcaaaatgtaatattttgtttttgtatcttgccagcccaaaaagaaagattagaaatctcttttaaccttaaatctttgtaagaatttcatatagactaatttgtcattgactgacccactaaagataataaaaacattatagatttcaaataaataaaaaatcaaatgataataaaatatttttactaactattaaaattaattattaaaaacataaattatataaataccttaaaaatacacacagaatgtgttctagtcctcttatattcatggtagtgctgttgcttctgtctctcttatcattaatattttgtacacttctgtgaaagtgtacttggttggtcgtgttgagttggagtttgtaaataaatttgagatttcattcattttaataattctctattagtataattgatgtatctcaataatgtaactactaatttgtacaaacctaaaaattattccaaattataatcaactttaattagtcactgacttttcaaatacacctaatataacaaacaagataaataaaataaattaaaaaatttctacaattatcgatacacctttatctatttcgatattagaaaaattttttagtccaatttttttgtatgattgttcattttatagttatttagaacattttgtaaaattttaagaaatttaaaaaaatttaacacgtcgaaaatagagtttaaacagtttattttatacacgtatataataaaagagtttgtttaaaccatatttttggtgtgttaaatttttctgaatctctcaaaattttagagagtgttttaaataactacaacatcgacgactataaaaaacaataaactaaaaaattctctcaaatatcgaaacagataagaaatacatttgtgcactccttttaattgtaaaagcttccaataaattatatgagtggatgaatgataataaattattcaattttgcaacctaatttttttttttttttttgtttaatttaaaacttttgcaaacaaagtagtttctctagttttggtacaatttaagaatatttaactcaataaaaaaatgaaacagaaatcaaaataagtggcagaaatagtaaataataaaaaaagaaaagtattaagcaaaataaagaaatgattggtttgaacctcaacaaaaggcaactcccctctataacccaaattataaattactaataaaacttagaataatttatacatttcctaattcaaaaaaagaataatttataattttcaaatcttttcttttggtgcaaatgaagaaattagaaattactctttatagaccaaatacatataaaagtaatcactctggtcaaacataccttcaattagacttttcttcagttatatcttttagtcaaagaaattgtaatgtaattatcattctcaacaaaatcttaagttgtgtttggcacacactaattgtggaggcatatatgatataatatggtacaaaagaaaaactagtaaagaagtgaaaaaccccttttgcatgctaaaacatttttttttacaaataaaccaatttcataaataaaaacaaaacctcttttcatagtatttaaatatcataaaaaagagagtaggtaaattattctaacttaaaaaaaattaaatattaaaaagaattattctaacttttagttgttaatttttgacaataataataaataagttatatttctaaaatttatgtagatacgtaactattaattgtcaagtgatcattcacatattactttttttattggtatatttaaatnnatttttaaataaaaataaaatttaatgacttgaaccagtcaatgattgctacatggcaatttacttacacttaaccgtcagatacatacaaaaattcaagaattataatttaagtattattaccataaaaaattaaacttattatttataccgcaaattactcgtattaataaaataattttttattttttatcttatcattctcatatgaactttttataatcctagaagcttaaaaaagctaagccaaa

SEQ ID NO: 30303 - DNA, 1187 bp, Cannabis sativa
  modified_base (261)..(270): a, c, t, g, unknown or other
ttcacggggacaaaaacaacaatatcatcatgtatttttagggcatctaacaatgttgcccatgttttagttaaatggggtttagataatgaatgtaaaggttttttaagctttttgggagaggtgtcattatcttttgtaattagtgaagtgattttaagtgacgatcagtttgagataataaaatagaatggaatagaaattagaaaaaaaatttgttttattctattcttttctttggttttattttaaaatattaannnnnnnnnnttattttaattttattttcattttttctaaccgaacgctacttaataaagtgtttgttatgtgagtgcaaattggagacaaacgatccacataaaggcaagcgagacagttgctcccttaaaataaaaaattgaaaaaaaatataaatatgtatttttagttttttttataggatgaaattttattaatcaataaaaatatatttatcaacaaaatgtaattttctttttaatagtagtttgtatcaatttttaattgattttttttagcatattatattatattttacaccactctctcttacaaaagaaaaaaatgttcctcctcaatttaaatcttgagcataaatatatatatataattaattaatagtcttggtctccaccttagtaaaaggcaaaaggtagtaccaagaagaacatgtgatgttttggcagcattttttgtagtattataatattgtaataaaacatgaaacttttgactgagtgacatgcgttctcataacaaaactccaaagaaacaaacaattcccctcaattatattggactggactctttctaaacataaattaaatacttaatttgctagattactagttatagattagtggtctaccatattctattaattgtaacaaaataaagacacatatatataatatgctttgttaattagcataaacattaatactaatgtatcactttttatttcaacttatattaatttttattagttttattaaaatataagttgatttaataattcttaagcacatattatttgtgatcaatagtttacgagcttaaaatttgtgtgtataaaatttagttgaagtagaagtataattttttttagttaattcaactagagttattgttgttaggttccctttctaattctataaatacatatt

SEQ ID NO: 30304 - DNA, 964 bp, Cannabis sativa
cgagaattgagtttatggtcaaaaagtcagccaatgttacattacaattagatttgttaaaaaggattaagattgctcagcaaaatgatctagaatagattgattgtagggagaagttcgtggttggtacaacgaaagatttttcagtgtcacttagtggactactaaggtataaagatagggtttatgttccaacagatgagcagattagacaagagatacttgatgagtttcatactattccgtattcactatacctgggagcaacgaagatgtaccacgatgttaaggtactgtactagtggtcaggaatgaaaagtgatgtggttgagtatgtatcaaagtgtctaacctcccagcaaataaaagcagaacattagaggccaacgagattacttcagcctttgaaggttcccgaatggaaataggaggacataaccatgaattttgtggtgggtttgctgaagactatagaaatgtacgactctatttaggtagtagtggataggtttactaagtcagcacactttttgctagtacggacaacatataatatagatcaatatgttgatttttacatgaaagaaatagtttgaattcacggtgctccaaaatcaatcttttcagatcgtgatccaaagttcacttctaaattccaggaaagtttttagagagccatgggaaaaaaattgaaatttagtacgacattttatcctcatatagatggacagtctgagaggactattcagatatggaagacatgctgcgagcatgtgtggtagattttgaaagttcctagaacaagtttttacccctaatcgagctctcatacaataacaactattagagtaccatcgatatggcacccaacgagatgttgtatggaagaaagtgtcggtcacctattcactgagatgaagcatgtgaaagaagatatctaagctcgtatgctcgcctcacagag

SEQ ID NO: 30305 - DNA, 1021 bp, Cannabis sativa
ggtcgattttatacagttataatttctaaacagtcaattacggtttttgtaaaataaaaaccgcaaccgaccagtcaattataaaattgtaaaaaccgatcctaactgactgattttcacccttaataacaatgagtgtacatagaatagaaatatgtacatgtacatgtacaattggagtgacgtgtgaatagaaaataaaaaagtgggaagtagtgaggactgaggagtggtctgtggtgtagtgatttgaatttgatcacacccatctttctctctcccaattattctcgtccccacccacctatatgcctttttaccgcccacacctacattattcttaagttttcctatttgggttaaaaacaaaaacaaagaatcgcgggcacaatttatatttaacctctcccactatctttttttgatttataattataatatatgttttatatatttttaaaaatttagaataatttgttgtatggaaataaaacttaaaatagttagttaccatgataaaaaaaaaaaaattaaaaattggttgaaattagtacatgttacaacactggtatacatttaattggagctaatattgttatacatcttttataatcgtcagatcaattattgggttgagatgaatcggctgttacttgatataaatgtataaaaaatgacattaaattttattcaaaagtcatgacagtataaaacgatatgcattatgtttttacaagaaggaaacaaattaaattcattgtgcctactttttaatagctcacaataattaatgggtaaatattattttagattttatattttgtaaaaattattaattggactctcttttttgttaaataataaaataaatcatatattttttaaaacggtaaatatagaacctgaacttaattttaataattttttttttttttgatgaatcaaaagtttcattgcacaaacctctttttttttttacagtctaagcactcctataaaaggatgcaaaatatctatacaa

SEQ ID NO: 30306 - DNA, 3853 bp, Cannabis sativa
  modified_base (3796)..(3807): a, c, t, g, unknown or other
taacttttaacatccaatctaattttaattaaatatctaattttttttttaaaatatctaattttttataatttaattagattgaatcgattcagttcaattaaattagattgaatattactcagtcctacctcaactcaacttgtacgataaggtttttttttttgtcctcataatatgtgtttattttattttacgctttcaactttgtggtctcttctcttttgacaagaaaagaaaaggctgccttcgagaatcgagaccatactaaattttatttatgttattttttaaaatgtttattttattcttctctgcatggataaattaatgaaagtaatattattataatttttattaaaaattaatttatttttcacttataaatttaataagctacgcggtattctgtcatgtcccacgtgtgagcgcctactgtcaccgtccacgtggcatgcatgcagaatcagatagatgtgtattgacaaagcattggacccaccacagtcttatggttcacacctaattaattaattatgactctttctcgataattacccacgaaatttgacacgtccttttcttagctaataaagtcgtgccacgtggtcaaatgaggggtggaactgtcattggacctctttgattgtttcaaatagtacgtacttgaccacaacaatacaatataatacttcataaaaaaaaaaaaaaacacactaaactttcaataatataaaagttagattccatttattcatatatttcttaaataatccctcaataaacaaatatatatttcttaaattagttataatcttattttgatgtgttaataggattacgtacatacatacactttttctcttcaagaaattgtattgacattatagtttttgtataagattaccaaccatgatatgaatgtatatatatcataatcatacgtacctccatggtagtattaattaaagttaaatatttctacataatgctaccaatgttgtttttgtcaattgtttttttttatgatatttgcaaaataattaggtagagatgtcaacgaggtcgaagaataaaaaataagagtatagttattattagagcacttgcaattattagggtgttaacaagatgtgattaagattttcttctctttttcaatttttgagataataattacaatattttattacaatttcttaatcgacatctatactcgaaattacattgtattcgttattattacaatatcatttcagtaaatttttgaaattttttgaataatttactatatcaaaaatagagttcttgatatttcagttcaccacgcgcattcaaaaaacttcaaatgtatttttgacactttaaactattcgaaaaactttaaaaatttacaggaatgatgttataagtataacgaataccgtcataaaaaaattttaaaaaaaatatttcaacgtatattttataaaatacgaaaattgactaaaaaattgtaatagaaaattgacagtaacatttttgttatggactttctttttctattttattcaattgcatcgttatccagtttttgctatattttttcttcttaatgttgtttggtagagaaataaaactgggggtaccaagctaacaagcaacttgcgagtcattgtggcgatatttagtagtgaataattttcaataataaatatacgtacacatttatatatatagttttcggcaaaaatagtgcatttaatcaatccaattcaatgagaactgaccaattcaattacaaccgaccgcaacattagatatctaattgtgatcggatcggatttgatgttatttttaaatatccaactagatcggatcggatggtggatgtgatgcctaaaaatccaatacatctaacatccaatcgaactaattggtatttttatttaacctggatgagtaattagattttatattattatacagtcaaatttatatgttttttttttttgaaagaactacttgttcattaattaaggaagtggacgggaatcacaaggcgaataccctccccttgatacaaaacagccgaatcactagcaactctagcatttttggctacaccatccgcaaaggcgtttagagcacggttaataaaatgaaaattacatactacaaactttttagaaacattgacaatagagaaaaaaaaaacattagacatcctccaatcaggactcacttctgcagatattaaagcttgaacagccactttcgaatcagataaaatgagaacctctttccaaccttactcaactgcccagttcagtgcaagaagtatggctcttaattcaccctccaaagctgaaaccacctgaagcttttgtgaattgacaaaccagcagccagatgatgtattgacactgatagcagctatacctgcttctcccctcacccaagatgcatccgtgaaaagaacatggcatacttgcttgattgcaggaaccagaatcacaccattcctcatgctgtcgttagtatgattatacccttcatgatccttcctaaaaggtacaatctggagttcaaggaaatctttttcagcttttgccaaagccaaggagggatttacagggacgttgttgatgcagaaagcatttctctagttccaaatagcagcaaggaaacaacctatgtagttaagaagatgacatctactaacacccgaagctgaggatgaaaacgtagacaccaactcttccactatactaatcaagttgtctcctgtataattatcagctctgattggcatacttcccccaaaccatattgctcttgcaaagctacaattaaaaaacaaatgcagggggctttcctcttcgacttcacacaaattacaggttttttcatttaaaaaatgcagtctgttcttggtgggaatggcgtcgttcagaatcctccacaacaagatcgagattctagggtgaattcccacctcccatatccatttccaaatgttttttactggtgcaaatctccaacattgctcaacacaatatgcagccttgacagaaaacgtatcttttggagaactcttccaatacatccgaccttggtaaggagagggaatcctgggaatggctaagatttggtttcccatttcactcccaaaaatttgcaaaaccatctcttcattccaattgttgcctatcgatatgtctgccagagttttgattgtataccctctattccttaaaccaatattcattagttccacaaattcttggtactctaaccaaggaatccatggttgatgccaaaagtcaattgaatttcccaaggcagcaactgatatcgaacctcggagaattgttgatcttgtatccaaaatacacttccattgataagagtcactactcttactgctcacattaaggaaacaatcatacctgaagtatttattaagcagacatgagacccatggtttctgttcttttgttgccaaactccatgccaactttgtgaataaagctttattcatgtcttcacatcttcttacacctaatccaccagaagcttttggttgacaaatccgatcccaagcctttagagccagaaatctgttcttctcaacatttcctaaccaccaatattttctcataagggcgttaagttcacggcagctagccaacagaatctttgcagtggacattgcataaattggcattgaagaagtgactgacttgattaaagtgagacgcccagcatatgaaattagtttcattaaaattatatgtatatatgaaaattaacnnnnnnnnnnnnctctttttttcttggattggatggatccagtctaatccaatacata

SEQ ID NO: 30307 - DNA, 7349 bp, Cannabis sativa
  modified_base (6183)..(6184): a, c, t, g, unknown or other
aaaaaagaaaaaaaaaactagttcttttattatattctattatatataaaaaatttataattttttttattagaaaactaaatttatttctttctttacaattctagttgcactaaaaattacaaaacggatcaaatatagataacacaaattttagaattaacctattttgtgaaatttgagaattatgactaggaataccgacacttggtcagaatcacttgtggctcgaaatatctacacatacattaaaaatcaagtaagacaatgaactaagcacatagactacagcatgctaacgcaattatatgatattcgattgttattatgaaatcgtgacctaagattatcaccttaagtacgtattcttatatctcaagctgaataatttaagaaactacaagaatttcagtacaagtctcaatatcttaaaagcatctttacacatttatccatactttcgaaaaaaacttgagaacaataaaattttctcattttaatgaaaaaacttaacataaattaaagaatttgaacaccaaattcttttaacccttaatgaagatttaggttaaagtaagagagggaataatatttgcaacttagcttaaatttttcatgccttaataaaataatatttgtagcattgaagagtaaagtgacgattcttatgttcaagaagttttttctttcttgtgttgttaatagaatctaagttcaacaagttattctccccttagatttgtctcacatagttgactttgaattcttattttttcacaagttatttgatgcaaaataaatttgtggtgtcagttagatataaccattaaatacgactgtattaatactatattggtttcaaaaatttactgtcacgtgtaaacaaatatacataataattatccaattaatatttaacaataatattaaactagcgtctcaaattttttttttaaaaaaaactaaaagaaattttaccaataaaaaaattaaataaataaaatgttaccttttagaataaaataagtaacatgaagtaatggtaagtaccataataccccatacaaaactacaaatgctcaacatcttacacaaaacaaacatatcttaaaaattattgataggattctacagcaacaagcaagcatatatatataatatatacataccattaattttttcaaaacacctgatacatatatgtattgattagtgtcaaaatataattagtactacccaggaataggaaattcaaaccacaccaactatgccctaatggttgattttgtagatgactattttacaccaattgtcactaaaaactaatattatactaaacaatttctttcaaacaaacatacaagacaatgactatctaatcctaatcctaatcctaatcaaccactaatctagtgtcatataatcgataatgtcgacttccccatatatcagatttatccaaataataagatttcaggcagcattgcaaccatggtggatttctagcaataccatcttccacttgctttccatcatcattcgtcgccactccgagcaatgcatttcgcttccttgtcagtacatcgatggcaggttgatcgccaaaaagcttaatctgtcataagttgaaaataatacaatacagtcaattaaagataacaatggtaatgcagatgacattttggcaaaatagtaattggaaaaatcaaaatcattttgctaagttatatttttctaacaaaacactttttttgcgaaaataaaaagcagaagaaagtataaatgctacaacagcaatggttcaattaggggtggcaaaatgggttttttgcgggacctagaatatccaggttactatctgggtctttgccccggcctggcccgacaaaaccataaatatgactatcgagattttaaatacaagcacaacaaaaccataacatatcgaatcaaataaacatgaacaagaacttacaccgtctttcccatacaaataagcatgaattcgagcagttgcatcttctaaggtcaggcgaactctgtaaattccattaaaggaaaaatctttagcctgccatggatacattgctacaacccgtacaacacataagaacctagctgtaacctgtcagttatgagattaaacaagcataaattagctaagattgataatttgatgcaacaaaaatgcatttgacaaagccaatggagtttcatttcaacaaaagaaaatgactaagattgatacgtaaatttgataaccttaacaaatttttaacaaatttttagtttagtcgatgataaagcctctgatcagtgtaactatgttcgacatatgaaaccatattatccttaaatgtcctagaattatgttgataactctagaatgtcttagaattagatttatttggatggttaatgagaataaattcggaatagaaagacggtacgagaagaagtatacatatgagtaatcgaatagaataacaaaatatgatacctctggatatgtaagaatatccattaaagtaacaaccggtaaatctttgtagttcacctctgcatgacaataaaacacataaacataccatcacttcactcgagaataattttcaaatgacgaacggtataaacaaatatacacacaaattaacaaactcgcaattaaaacctgttataggagaagtttgtggaaagctccagtatggatttcgcccgaatttcagaccttctcgctcattgtataacctgaaataattgttatacaaaacttaattaatggaattgtgtggaacaatcaaatgatacatgtcaagagtaacagtcttagtgaaagcgtgtaacctttggcgctctaatacaagacggtccttgtcatgagtatatctaaactttgttgaagacgtaaatacaccacgccagaatcctccatttacatcacaatatacattgataaacttcatccacttcccaatgtgtagcaagtggaggccatgctccttggtaccttggtcaaacaccaccctcaagacagttccgagagtaggaaaagtacttaagatacctcttgacaaatgcaattgttcaggttgtaggggaagaggattgttcttttcatcttctagcctgggattttattatttagttaaatcattaatgattattgacataagtgaaacaataagactaagtaattcatctaatctaaggtacacaccaaaccactcaagctagcctcaaatggcattggtaaccaataaacaataattggatatcattttcaaggaaacatccttcaaaacattcattcagatatactcaaatcaaaatactcaggcacatttcgaaaattgagcaagtgtactctgtagaaatttcttgaagatgagaaatgagaatatatcatactatcttttctgtaaattttgcaattttcttcttttttatttttcgctcatctaatttgcttctccttttttataaactcatttttacgatgttctcagagagtggagagaaaagtggggatacattattaattaataatatatatttttttcttcttttttttttcttaacgagtctttctcttatatattactattattttttatatatataataaatgaagaaaaacaacggttcaacacacacatgataatacaaccaactatgacccgaatttaaaagcaacaatagaagttaagtaactctcactaacctcgaagaaatactactcggatgggcatcagttccatcccagaggaagcccatcaattcgcctttaaactcttggacatgaattaccttgagagagaatatgaaaggtgaaagttgatcaaaaacatagttacatacaaatttgacaataataagttaaagcaaaaagtattaagtaaaatacaattttaaacagagtaaagcaaattaccttgcaagccaaatcaacaaatctaccttcctcgagttctcttatcaatgaaaacttatttgaatctatcatgtatgcggcgcatttatgaatatcgcagttttaaatatctattatataattagaaaaatcacataaagcagacaagtgcaaaaatttaaaatacatagttttagatacctctagatacctacactatttttcttttcttctattttcatatcgtcccataatttttgttatacttttgttagcaaaactaagcttgaacatctactaataaaaaaggtagctaatacgaaggttcttcgatgtcgtattcgtataagaactttactttaaatgtaaacatattcagatacctcttgcacgccctcgggaatctagtagactacatgacttatgtacgagcatgcatggtttgtttaagagattcaaccacacatttgccccttctacataactaaaagaaaaatgccaagttagcaagtttacctcgaatccatgtttctcctttaatgcaaattttaaagaaagctcctaaaggaagccaactccctcaagttctttttctactaacttctataatgttacaagtttagaattcagtttcaactattaatgtgtctctatcatgaatttttcaaaataaagttaaataatttagatactaaaatataaagatggctaattttatagttgtataccacaaaattgagctaccttcatcaaagtgaagatcaataaaccattttctcaagcgtgttatgagcttcttgtctacgtctctctggataaatattgggtaagtttgataaggaagaagcccttcattgtcatttccattgtatacagcaaaggtagagaacttcttattaaaaacagcatacactgctccaccatgagttttcatctgtaagaacatagctcatgttcaaatacaccacactttaaacaaaacaatttattcattatcaataaagttaaagtttttatcctatggatgaatgtcttccctcaacttctgtttcttttgttccactaagtcaaatagacatgcagttaaatgcatcataattactcttatggaaatttaattatttaaaacataggaatccttttgaaatggtgttacaccaaactatcttgaaaagtttggaactttgtaatttctctttgatatcaatataatacctattttctaattgtttcaagtattggattagatcaatagtgtatcaaatagtacaacaaatgcatattttaaaccagcctgttgaaaaacacaatctaatatctataaaatatgctcttcactcttctttttcacattttttaccagaaattcaagcactttagtggttataagctacacgcatttatgataataagcaaaaacaaaataattactactacaaacaaagtcataccataacattggaaagctgaattatatctccaaatgaggctacatgaggaagcatttcgaaatgcttagcaaacatattaacagaaagcccgggtttctgatacgattcatcaactatctttattgtacagaaataatctgcaaagtcatcacacagcacaaatccaacaaacatacatacattacaaaagaaattcacaaattattatcacacatttaaacactgtcagacccaacaaaagcaaaacaaaagagcaacccacatattaaaatgaataaataggaatcttcccccttgaattttgtcacttaataaaatcatactcctcaatattaaatgctctctcaactataaaagttagtaagttatgagttttctcgcatctgggtttcaacccccttttgacatccgccttctcagctcaaaattctaagagaaacctcgttatctacggatattaggaccacaaaactagggtttgcgaatcgttgtttctttttccgtgaatctgggcctctctagaatctccaaaggaattaacgaaaagggtctaccatttcagtctcaaaacgattaatttctggtccaaattgggcgaaagaaagggaaataaaataaaagttggtgttgtcaagaaagtgtttgaatgtgggtcaatgagattatggtatgcttttttcgtaagaagatgaaaaaataaaataagaaattggtcaaacgagggattggaggaaagcaatgatgggaaaatatgaccagcacaccttctcagaaatggagaaagaagaagatgaatcagatacagagagagagagagagagnnagagagagagagagagaattgaatagagaagtgggtgatacatatctcatttttcaatccaaatacttatatgattgcattcatgaatacagcgaagatatgaaaaatcgaaacttttctgagttaaaggacctcattttactgttacaaaaaacaaagcatctaaatgcagagagagagagagagtaccagttcctttagttgtcttagggaaaccgcactggatgataacgccaatcaagctaacttttttatctatacaagtgatggcgtcctttatgtcaagaagcctgtactcatctttctcccccatttgctttctttctttctttcttctagggttttgcagaaacaaaaaagggtatttttctgtatttggaggaaacaaacagaagcagatttataaaaaatgaaactttttgtatttatttactagtgcttttacttttagatatttatcataatcattattaaattaaaatctataggattgaaaatattgattgggtttattggtttcactaataatcactatgttgtagtactacatattcacttgtccaaagttaattgaggaggagatctgggcacttcctcctgcctttatcttgttttcatttatttgattatcatcacaatggagtaattggtttagtactaatgatatgaatatgatgcttaatctaattggtttggaaattggcagatatgtggctgaattactcaaggtttattgatttgagatcattaatgtttcttgtgttgtattatatcttgtgtaaacaaaaatctctttgcattatatagttatactaaacactaaacactaaacacatgttcctgcatttttcggtaaacttactgttgttaaaagcctaacttcatactattaagtatttattttattattaaataatacaaattatttgttaatttaattcattaggtattcactataagagagaggtggtaaaatgtatttttatattccctgtcgtatacatgcatgtcgaaaaaagaatttattaaacttgtaaaaagttatcttgtgtttgtgttgatgtattttttgacctgttttgtgatttttaggggaactagagttgtaaagaaaggaattaatttagttttctaacttataaaatttatgtatatatatttacat

SEQ ID NO: 30308 - DNA, 4441 bp, Cannabis sativa
tactgggacttcgacccggaccggtgggacttcgacccggaccgggacctgtgagacccggaccgggacctgtgacttccggaccgggacctgtgacttgggaccgggacctgtgacttgggacctaaaccaagaccaggacctggacccataccgggtcttcgaccctaacctagacctagaccaaaaaactgggaccacaccagggaactaacaaccagacttagacatgggaccaaaaaatcaaacccacactgggactgggacccgaagtcggactcgaacctgaacccgaaccaagactgggaacgaaacttggacccgaacccgaacctgaattaggacccgaactcgaaccaagactcgggacccaaacctgaacctggaccaagaccaagacctaggaaccagacatagataggggacctagaccagggacctaggccccagaacccagacccaaatcggaatttgggacatgaacccgaactaggacttgacctggactctagaatctaaagtcagacccaaacccagacccgaaacctaccccaaacccaaactaggataggaacctggacacgaaccaagattaaaccaaaacccagatccaaacccaaaatcagacccttactcgggacctgaactcagacacagacctagaatcagacccaaagctaaacctaaacccggacctgaactcgaacccagactaggatcggaacccagtacttagatccagaaatgaacgcaaactcagatcgagaatggaacttgggacttaggcccagacccggacctggacccaaacccacacccggagcttgattcggacgtacaccgaaatccgaacccgaacccaaactcagaccaagactcgaaccccgacatgaacttgaatctaaactcaaactcagaattgcaactagaactggaaccgaactaggactaggactaggacctaaacccaaacccgacccagataaaatcaagacaaagacccaaactcgaatcgagataaggactcaaacccgaacctaaactgggacccaatcccagaccaaaattgggacatggccccaaaattaagatcgggacctgggcaacagaactaggaccgaaacctagtacccgaccccagattctgggtcacgggtactaggttctggtacgggtctgggttctcctccaggtcttgggtcacgggtctagggttccaggttctgggtcgcaggtcctggcgcaagtgtcggttcgggttcgggtttgggtcttggtatcgatcctagtttgggtccgggttcatgtttcggttctgcatctagatctaattttaggtctaggtccaattccagttccaaggtcctcattccgattcttgttctgatttcgggtcccgagtccgagtctagatttaggtcctggtctagaaatggttccaggtttgggtcttggtacgattccaagatcgagaaactgactacgggttaggtccaagccccgggtcgtgtcagtcccaatcttgggtcctggtctcgatccgattcggatattgggtcctagtctgtgtctgtgttcgtgtctgggtccatgtccgtgtccaggtccgggtccgggttcgagtccggtcgaggactaaaactggggtcaggtcttgggtcccaataccactcttgggtccctattttggttctaattttaagtttgcttccccaatctagctctaggacttgggtccaagtctgagtctccaatcccggttcgggctgtgcgtctgggtttgggtccaagttcgtgtctaggttcgggttcttgtcttgagtcccgatctgagttttaattcggcttcgtgtctcggtccgggtctgggtcttggtcctagtcagattctagttccgggaaggagactgggtcccactccctcggtcttgttcccgggtcccggtacgcttacatttctgcatccagtttcgggtcacggggtacgggttcaggtcggagtccgtgcctgggttcaggtttaggtctgagtctgggtctgggtccaggtttaggtccaagtctgggtctaggttttagtccgggtatgggtcccagatccatacatcgactatgggttagatttaagccccgggtcctaggtcttggtcctagtccgggtttaggatctgggtccagggtcaggtcctaagtctcggtgctagtttctaaagcccgggtctcggatccagatccccatcctggtccggttcctaggtcccagtccgagtctaggaccctgttggggttcaagtcgtaatccgagttcgggttcgagtttctgatcccggtatgggtctagatctaggttcgagtcctgggtttgagtcttgattcagatccaggtttgtgttctgaggcccgggtaaaggtcccccatccaagtctgggtcctaggtcctagtccgggtccatgtttgggttaatttcctagtccaagttctgatttcgattccgtgttcgggttcgggtttggttctgggtctccgtcgaggtcggggtttgagtcctagttcgagtccagggttgggtcttggtccaagtccagatcccggtctggatcagggtttgggtccaggtctgagtccaagtcttgggtaccggtccaggtttaggtcttggtctcggtctgaatctaattcccaagtttcaatcccagtgggtatgggtctaggtctgggttcaagtctatgtttgtatccaggtccatgtctaagtccgagtttcggcctgggatcgggtcgcaggttcaaggctgacatgatcccggacccgaaattggaatcagactaggactgggactagaacctagatattggaccgaaacaagcccaaaacctaaacccaaactcagaccagaacccataccgggacttggacccagaccgcgacctgtgacctgggacctaaaccaagaccggggcctagatacagaccaaaaccatgacccaaaaacatgggccgaacccaggacccaagaacttgactcagacctaggacccgaaacccggagtagactgggactgggactcaaacttggacccgaacctaaacaaagatttggactcggactggacccgtacccaaacccgaaaacgaacttggacccggactgggacctaggaaccgaacatagatgggggacccagacctgctaattgggccaccaaactaggaccagaacttgggcctcagaacttcgatagggatctgcgacccgaccccagaccaaaacctgaacctagggccaacctcgagacctgggattcggaactcgatgcttggacctgaccagtagtcggagtctagatctaggacttagaccagaacctgaacccaaactcgaactcaaaccacgacccagacacatacaagacccagacccacactcgggaaccaaaacaaaatcttgaactagaactagaccgggaacttggaatgggaccgggacctggacctagacctgaacccggaactggacccaccttcggatcctaaccgagatcgaaactcgaacatcaaccatgccctagacccaaatcaggacgcaaacccagactcggaccaaaactcaaccccaacccgtaccctgtgacttgaaattggaattaaaactagaatcgaatggggacccaagaactggaccaggactaagacctggacccagacccaaaactgtaaccggaccaggacccaaactcggacacagacccaccctaggattgggtccgaaacctgaatccaaacccaaaccgggacttgggacccgaacccagacctgaactcagacccaaacattgaacatgactgggacctagaactgtgatcgtgacccagaactggaccctagtcttggtcctagatctagacccaaacccgaaccgggacctaggacatgaatcaaaactagactcgaacccgtggttgggatccagattttgtccaaaaatccaagaaccggggcttggacaagacccatagtagatgtcttgatttgggactcggacaaggacccgaagctggaccaagccctagacctgggactcaaaactgaaacttgaaccagaaagtgaccaggaccctagaataggaccgggaccgtgacgaggacctagacctggaccgggacccagaactcgaccaaaagccagccccgaaactcaggctcgaacctagtcccgaacccagtcctggacccagactaggactatatttggttgtctacaacaatcaaataatattctctaatattagcttcttggactatatttctgctacgttcttaaagatttgaacttaaaacttattgtcatgaattatttgttataatttggtttctagtctttttgggaaatccatgtgttatattagatttttggatcttaagaaatgggactaatta

SEQ ID NO: 30309 - DNA, 5637 bp, Cannabis sativa
  modified_base (60)..(66): a, c, t, g, unknown or other
tgttttcgtgttattttttggaaaaccgtaaaaatgtaaaaaaatattctttgaacgtannnnnnnaaatattttacaaaaaatggtgcattattatgtaattattcctaaaatctaataaatatgtaatttgcactaatttttttattgtaaatgatttatttattgacttttttaaattaacttgcaccaagtgtgttgctgcaaaaaaaaaacaaaaaaaaaaaaaaccaattgtgttggatcacaaagaaaatggttttacttgctgagtttatgtgctaaatttaatattttctttttcatatcatccaatagagatggtttaatctttcacactaaatttagtataatttttagtatatgtatcaaatttaaaagcattactctttaaaatattgttggagcaatggtttttctattattatttttactcactcactcattcctcacttattatttcctctaagtgacggactctctctatcaatccttctagggttaataatgtaccatttacttttgtgtggtttaataaaaaataaattatttaaaatttatattgaaacactatgttagttacttcacctagttttaaaaatgtattttatagaatagtgaagttaaagaaagaccccttgaaatggatgtgggacaatatattttattttctgtcacaaaatatataccaaaccattacttgcaaattttataaacttaattcaaattatataaaaactacttaaagaagtctattcgctcactataaataaatattattcggaataaaatttcaatattttcataaaataactaacaaggggaatatataaaaatatatattagtactgttttggaaattagtaatgtttagttttaagatatatactcataaattatgtatatacataatcagtgttaaccgttgagttgttcgttgttatatccaagacaaatatacaagtgatgacatttccatatgcagctctttgtaattgttaggaagaaaataagtaattttttgtaatttttttttctttttgaaaaggaatttgtaaaacttttatttatttatttatttatttattaaaaaagtgtttttagataaatagaaagcgattagatctcacagttattacaaaatagattttcaggaataaaagataacagaatacaatcaaatctctggtgggtaaacgcccactttgccacattatggactacaaaattacaagttctactaatattagagaaaatgcaactaacaaacaagggacatgatctattacaaaatgagatatagttctcaagcgctcaataaaactccttcccatgcattaagagcattgataactaccctcgagtcactctccccaataataaacttggaaccgtagtccttagctacatccagagccgagcagcaggccattgcttccccgcatcagaaaaatctaaccgagttatttgaacccaaaccaccgtgccgagatgatttcttgcttactacagtatacatgttttctaaccccactttaatatcacaattcagcttgagccaatactgaagaggaggatgccagacatccaccaagctcggagcaagacaaggaaaaatagaagcatgttgatctgcaaaagatatacgagtagagtcaatacacttcttcacatcaactagactattattgtatactttgtcaatacactaaacttttaagtttagtgttttagctcctcacaatatttgatggtgttaaatttaggagcaaatctagtagatgttcaaaagaatcaaaactttaaattctgttacataagtcaacacggctattcataataaagtgtgctataaggaatggttgagcaaatagaagatgttcaattaatgcagtgagaaaaccaaaaatggtaaaagaaaaccatattggctaaagctttagcatttgattttgagttgatgaggcagtacatacatacaataattaattgctctatataatattttgtagtggtattgattgggcactacagatgtgttttaaattttatcaatggtctagttggggagtatattaattttcaattgcattatttcaaattccaatttcccagattaaactactatatattgctagttccgttaatccaagtgctatttatatttataaataatttacttattgttgttgtgaggtggaaagaatgggtgtgttgacttaaaaaacttaatactaatggttttgttattaaatcttggaatagataggatagggtattagggtgtgtagtagtcaatagtcatggtcaattgtacatgtagtgaatggttagttgtaattaattttgaatgtggaagtggaaaggggggccgttgagatagttgagaaacttataccaatctcaatagtcaaccaaccaacataacattatatatgcttcattcaatctatcttattacttattatgtcaacttcaacttgatcttatatttttgaaatataataaatttcgtcttcaaaattatttatacattaaacaataattttaatttggaacaattatctaaactttcttgagtgctaacataaccattatcaatttaagaaactaatattattacttatagttataattaagataaattataacaaataccagtatttaggttagcaaattaacctttaaatttcctttgttaatattttgttacgccattagtctctaaccgttaactttttttttttttttttttcatgaataagcaattatttaattgctcaatactcatgaccaatgagttcaatggggacttatttgatcaaaccgatttctatctataatacttgttttctcattttaaaaagagaaaaccttacacaaattcttttttaatattttgtacaagagtatgaatagtgtaaacttgttgatttcacaagatgttatttcttacctcacaaatattatatacaaggctattgataatagcaatatagatttctctttgaaatttagagtgattgctcatcttgatcttctttatacaagattccaactccatttggtggatctgcaaccctgcccaattgtacaaatgaagagcaatagaagaaatacacctgcaaccgaagaacaaatgctggtgagtttcgacatgttgattacaaaacagacacattgtctatgcaatacaaccaaacttcaacaatctttctctcgttttaagcctctacaaacacgcaagcaaagtgataaacttgtgcttgggaatgctctgcctattccagactaaagataaccaaattttcctatcgttggacctcgaccacagctgaatacaaacattagaaatgttgaatttcttaagaaactcattttctgtcaaggaagttcttaacatgtttttaaccatgacgattgttttccagtaccaactggagttctgtagagcatcatagctccaccagtttttctcttttgtgtagacagaatgtatccaagcacccacaagttgtcttcttagaaatatcccgaacatacctacttaaggcaccaatgttccattgttctatatttcaaaaacccaaacctccctcaactattgacttacaaattgagctccagcccactaaacacagaccggtgaaatctaaactgctttgccaaaggaagactctaactgttaacaataattattgagtcggctcatatgtatcaattttgtattgattcagttaacataatatctaaaattaagttaaaagtccaagtgaagaatgttaagaaaactctctattgcactctctttcacactcctgatatgtggatattataaaaaaaaaatatatatatatatataaattattagtgctaagaaacctccaagtcatttacattctctttaataaatgaaactattatttaattattttagatcttaaaatattataaatcattaatacagtaataaagtatttttttttttttttttgataacgtaataaagttggatttaacattttaaatccatcttaattaaagctaaaagggataaaacgacacaacgattacgtaaaacatgagcaacaacgtgtcgtttactttcaatcctgaagaatagtaactgcaccccaccgcgcacacagtgcagtccggagctgtcccactaataaactagaacagccttaggaaatagcagagaacattacaatttaaactaagcctagatatacaaaataaaaataccataagataagatggacaaaagtaaataatagtttacaagactgaagtgcggtcaatagactcaatacaaaaatgattctaaggcttccataatttcattgtgcagtcctcaccatatgtggccaccaaatttctatgggggtgatgagtaataccaattacatctttctcatggacctgcccaaacaacatattatatttcagaagatcatacttcttacaatgaaaatcaagtgcttatcaacccgcatattgtttttgcatggtaacaggttcccaacttaccacgactcggaggaaaactgattcacacggtgttaaaacttaaaagaaaagaagttgctgtttttatgctatgtctaaataaccaattttcgagttttctgatttagttaagacagaaaaaataccttcatcaggtgctctagtttaccagattggtagctgaagcagtatatattcctgcatggaggtaacagcttatattaaagaaattgattaaatataaaagtgaaaattagaagcatataataaaatcataagtgatgctcaggctgaagataacaagatctgtagcaatgtcagaatatgaaacaacaatttcaaatcagaatctgaactttgcagcagaatactctcttgacattcacgcaagacagaaaaaattggacaatgcattcaactcaagatattgtaaaatacaacagagtgaatttaacaagcagttataatactagctatcttctccaaatatccatcttcccaattcaacgtaaatacatatcaataggttgaaacgttgaatattggaatgtataacgttgtgaaactatcgagtactgagtgggagaacattagtataatatatagtttaaactttgaattacctgtcttcaccaacacaataaatccattcacctttaggtgaaacacaagctgccacaaaatctccaccttctcttttacctgatgaaaagctcttcacaacctacaccgtagtacagaaacaaactcaataaaattaattacttcataacaaagtaaaataaaaatctcataactcctaaaaccaataaggtaagaacattaaaagttgggttaaatttagatacatgacaatacattcttgttctaatttatgctgataatagatacctgtccttgaagagtcatgatgtatatagatgaggtcttgttgcatacaatgatgtgttcggtactttttgggaaaagatgaacagaattcacagacgcatcgccaccctataagccagaaaggaaaacaacaattaggaagaagaaaaaattctaatctataaattacagtatctcacactcacaagcatgcacacacaacaacgcatgtgcatgcacacacaacaacgcatg

SEQ ID NO: 30310 - DNA, 1972 bp, Cannabis sativa
tctgcttttcatgctattttaaattatgtcaactatcttatatcctctttctcacgagcacagatcacccatgttaagcgatctgctaatacttatgtccatgttttgcctaagtttgctcttacggtggatactgattgtacttggttggaggaatttccaccttcacttatgactgttatgtaattcttaacaattaatataatggtctttttctcaaaaaaaaaaaaaattatgaagaatgatatttgtaatgatttttataattcataaaaaaaattgcaagaaataaaaattcatggtgcaaaactctataagatgatgtaatatataagttctagttggttgagttgttttaaaatactttgttggtcgggtaattaatgaattttaatttttagctttctttaataaaattcaactttagtagtttttttttttaaaaaaaaaaattgaaacattaaagaataattagttattttttttctgaattttttacactatcaaattgtgactcctatgatatattgcttgtcaaattttgatatattgcttgtcaaattttgagtagacataatttttaactcaatcaataatgtttaattaagtgcggagaatattatttattgaactaaaaatattttattattattatttaactttttatatatgtgtgttatactattatatttttattttataaaacaaatgatatatattatcattataatatttaaataatgtaaaaaaaaaataaagaaattaatgtaggtataatgtaaaaaaattaagtagaatatataaagtgaggttttagtaaaatatttaaagaataaagtagacaagttaatgtgagtactgttaaagcatctccaataaaaaatattttatagaatagtacttaatgacatgaatctatttttagcatcttttaatagatgtttatcattagagtgaaaaaaaaaaaatcaaagaagaatgcctaacagtatcatcttttatatcctctatttcttttttttttatatataataaattaattttttataatttgcccaaattaagacttaattttttttttataataaattaaaaattattcttaaatagagtttttactgtatagatttcttaactgatgttttacatccctatctgtttcaaatattatattacacacgttatcatataaaaccttatgtaaagaaggtgtaccataacataaagtacggtgtgatactatgttattgttgttggaggaaaattgacaacaccaaaaacgtgcgagtatttaatacacgcacgtactgagttgcgaatattcacttagaatggcgaatacttaaatatagactgtgagtaaacgaaaacaataacattataaataagacatgagattatagtggtccagtcagagttcgatttatttagtccacttttggtaatagtttcaacttagtttatttaatttggatactcctttatatagaaagaaagtatctatttggatttacataactagtcagacaggaccgttattacattaatatgcaaattaatgacaaaaaaaaatatttaagaaataaatggaaaaacagttttaaccgttcttgattaattgtctaaacttatgcaacttgataagtcacacattgactattcatattccgagcacacgagctcgtaggctctttggtatcttactcgcatgttggccttcgagcctataatcgcaattaaataattgaatgcatgccatgccattaccttgatcgcgtatttgggcattcatgtgttgacaacttagaacttgcaagttcctaataggttgtacgtcttaagacattagtcttggactaaacatatgtaaaggtgtgatctttatgtattgctggagaggtatatgttgcccttgattttgcccaatatacgtggaccaaccacacaaggacacgtggatcaagcaacttat

SEQ ID NO: 30311 - DNA, 3609 bp, Cannabis sativa
caatttcaatttgtggcataacaggctaggccatccagctaaatccattgttatgtccgtaatggaaatatgtaatattttctaatatcaataaaactgtttatgatctatgcactgcttgttgccttggaaaataccacaaactcccttatcctaactcaaaaatagtctacacaactccatttcaagtgttacacactattctatggggtccttccccaatagactcttgcaatggcattagatattgcataagctttatatatgcttactctaggtatacttgaatttatcttctaagaactaaggaaggggcccttcctacttttataaagttcaaaacaaaaattgaactttaactaaatctaaagaaaaaagagatacaatctgactggggtagggagttcagatcctttaccaatctcgtgaaaagtaatggaataattcatagtctcttgtcctaattcccatgagcaaaataggattgtggaaaggaaacatatacacattgtggaaactggtttgactttattagcacactctatagtttacctttaaaattttgggatgagacatatagagtttttgtttatctaatgaataaactacctactcgagtgctacacaacattactcctcatgaaaaactattttacacaaaaaccagattactctaccttaaaaacatttggctgcttatgtttacctaaccttagaccctattacaaaaacaagatatgtttcagatccacgccaagcactttcttaggatatagtctcacatagaatggctacaagtgcctttcccctgatggtagagtatacatgtccagagatgttctttttaatgaacatgactttccttacaaaaagccagcaaattcatcttgtacaacatcatctcctccttccaattttccaatagcaactccacatgttgtgtcatctcccatagtctcacaacaacctcttgagtcatctttagtatcaccctcattctcctcatccaattctttttctcttatttcacactctgaaacagtgtctaaatcctcttcttcctaaacagtttctcttccctctcctatctcttctttaccttcttcttcctcttcatctccaccttctccccttcctataacaaatcagcctcccatgcaaaccagagcaaaatctggcattcacaaaccaaaagtcttcatagcttatcttctccctattactgcgaagaaagctcttgaagatccaaaatggaatgcaaccatgaattcagaaaacaatgctctttatagtgaggagtggttaatgaggtttgatggggccaatataaaagtgttagattggtcagagtccgatcaaagactgtcggtgcttaacatctcgattaggaactcaaaggcgaaatgcggtaatactaaatgcaaaagtagattccactttgaagaggcatggggggaggaggaggaatgtctccaatcagttcacagtcattcgggaagagagatttggtacgctcggggagtcatttcaaacaaaaaaatgaaggatgtagggtctggtttacaaatttggaataagaaaaaaaaggaagttaaatgaggatgttgctaaaataaaaaaataaaaaaataatgagagagctatctgctacgccagaactgggggcttgggtagactttaagtaagtggagacgagattaaactttctcttggaaaagaatgtgaaatattggcggcaaaggagtcgtgcactttagttaaaatggggagaccaaaacactaaatattttcatcataaggcctcggctcgtcgaaaataaatgagatcatgggtttaatggatagtttaggggttcagcaagatgatatttcaattgtgaggcagattataggagaatattatggttctcttttcacatcttctaatgcgtatcttcaaagaatgactgaggttgtataggctatcgagcctagggtgacagacccaatgaatgtagagcttatggagttgtaaactgaaaaagatgtggaaaaggttgtacatgatatgaatcctagcaaagctcctagagaagatggcctacctgccctcttttaccaaaattttgggataatacaagaccaagtgtgatcgaggtgtgtttgaatatccaaaataataatgcagatgtcggggccttaaatgagacaatcattgctttagtacctaaggttgagaaaccaaaatgggtggaggaattccagcctattagtctatgcaatatcatttataagattatttcaaaatgcttagctgaattgcttagctaataggttgtgattttctcttaataaaatcatatctgaatcccagagtgctttcgtaaaagagaagttgatccatgataactttattattgcttatgaggggctccattgtttgcagaagaataggttttaaaatggtaccaaagtggctctaaagctagacatggctaaggcttatgaccgggtgagtgggaatttgaaaagaggtcatgttgaggttggggtactgtgaagagtgggttcaaaaagtgatttgttactgtacttcggttcagttctctttcttcaatggagaggtgcaaaggaaagtttgtcctcaacagggcctacatcaaggggatcccttatccctattcttatttctattttgtgctgaggcattttcaagtttgatctaacatagggaatgaatggagaggctaaatggcttatgttttggccgacggggtttgacaatttcacatcttttctttgcaaatgatagtttagcctttttagaagccaaggaagatgagtgtcttaatttccaagaggtgttggccaagtacacataggctttgggtcaaatgatcaattttcataagtccaaaatgtgttttgggaggggtgttccataaggagtgaggcggcggctgggtgaggtttttgaggtgaaggtagtggaaaattacggtaagtaccttagacttccatctttggtggggagaaaaaagaaacagctttttgatgttatcaaaagctgggtgtggagtaaggtgagaggatggaaaagttccatgattttgggagcgggtaaggaagtgattataaaggctattttacgagaaattcccacttatatactatgagtgttttttgacttctgaagagcactattaaaagctttcataatatggcaacatggttttggtagagttcatcggaaaagaacaagaagactcattggtgcaagtggtcttaattatgcaaaccaaaggacaaagacagactgggatttcaagacttaggccttttcaatcaagttttacttgcaaaacaaatttggcgatgtatttgaaacccatatgtgttgtgtagtagagtgctaaaggcaagttatttcctaaataaaggggttttcgaagcaaaatgtggaccccatgcgtccttttgtgttgaggagtttggtttggggaagaaaattatcctcagagggtaccgatggaggatcagggatggaaattcactctgtgccttgaaagatccatggttaccatgccccgttagctttcacatctttgataaacttgaactgccagaaca

SEQ ID NO: 30312 - DNA, 2421 bp, Cannabis sativa
  modified_base (2263)..(2263): a, c, t, g, unknown or other
ttccataattaaacatgattaactactaatttccaaattaaactaagcggtctttacaagaaatgttttgaagagctaggggtagtgccaaaaaggcccttaccttcagttgagaagctaccagagcttgaattgaaagtacttcctgaccatctgagatatgaatttctaggcaagaacaagacacttccatagtgccaacttcactttctaatgtggagataaataagttattaaaagttattagagcacacatgaaggccattgggtggacattggctgacatcaaggggatcaacccctcaatagttatgcattggatgttaataaagagtggagccaaatcgaccgttaatgcacaaagaagactcaatctgccaatgaaggaggtggtgagaaaggaagtggtaaagtgattagatgcaggggtggcttatccaatttcagacagtaaatgggtagtccaatccaagttgtgccaaagaaagggggatgacgatagtaaagaatgagctgattctgataagaaatgtaactagttggaagatttgcattgattactgcaaacttaacaaggcaacaaggaaataccactttcctcttccattcattgatttgatgttaggcaaattgaagggtcaagagtattactattttctagatggttactttgggtacaccaaatagctattacacctgaagatcaagagtagaaaacgtttacatgtccatatggcacttttattttccgaaggatgccatttgggttgtgtaatgcaccaataacatcccaacaatatattatggctatttttttttttctgatttgattgagaactgtatatagatttttgtggatgatttcttggtgtttggcttgtcgtttaaccattgtttgaggattggagatggttttggaaagatgtgaaggagtctaatttagtactcaattgagagaagtgtcaatttatggtgaaagaggggattgttttgggacacaagatctcaaaagaaggcattgaggtagataaggccaaggtgtctacaattgagaattttccccctctagtgtcagtgaaagggattcaaagtttttgggtcatgctggtttttatcgaagggtttatcaaagacttctccaagatctttaagtcattgtccaacttgcttgttaacggagtaccttttgagtttggaaatgaatgattaaaagcctttcaaactctcaaggggaaactgatttcgacacctataatcattgcaccaaattgggagctgccatttgagttgatatgtgatgcaattggagttgttttgggtcaacaagttgacaaggttttttataccatctactatgctagtaggaccttgaatgatgctcagttgaactatgcaactaattagaaggagatgttggccattgtgtttgcttgtgacaagttttggccgtatctaattgggaacaaggctatagtatatactgatcattcaacgataaaataccttatgaccaagaaagattctaagccaagattaatctgatgggtctttcttcttcaagagttcaatttggaaataaaagataagaagagaagtgagaacctagttgcagatcatatgtcaagaatggaattagaggagagccaaaatatgaagaaaatgcaaataaatgatgggttgcccgatgagccgctctttgctttgagggaaagcttaatggtactatagtttgcagactatgtaaatttttcgactaccaacattacacctccaaatttgactaggaaacaactaaagaagttcttttctgaagtgaagtattattattgggaagagccaattctctacaagtattgtgttgatcagatcattagaagatgtgttcctgaaaaggagatggttctatcctaaatcactaccatgatttgcaatgcggatgatattttagcgaaacaagaacagctgcaaaggttttgcaaagtggtttttattagctaacttttttcaaggatgctaatgaacttgtcaaggcgtgtgatcgttgtcaaagaactggcaatatttcaagaagaaatgagaggcctttgaatggtattttagaggttgaactttttgatactatcacaaatacaacaaaacttgagcagcacctatcaaaaatactataaggcttaaaaataaatatgaaaaaaaaaattaagtttcaacaatacaataattagtggcctttaggctgactcttcacatattggacctaaataantataaaaatttgtatttttataatatgcaatgcagtgaaatttgaaccgcatattaacaattcaaaatcgcaaacactgcgcgatttaagaaaaattcaaaccgcaatcgcaccgcaaaaaaatttaaatcgtatttttttttacagtgcaaaaaatt

SEQ ID NO: 30313 - DNA, 1546 bp, Cannabis sativa
tggggcttcatccttatgaagttctagtagcgacgatctttgcgagggaatcggcctataaaatccctcgaagacacacaaggcaggaaatccaatccgaacctcgacttcctccttaaactcacctgtcaactctccaccttaagatcgaaggcaaatcttttgtaaacacattactgtaatcctaatattcaaaatattcctactaagttttctcttcttcaagaggaacacggtagatcggagtaaagtccattctttttgtatttgtatcaacattcatcggccaaagaacttaataaaatagactcgtgaactcaagataattaacgtctgaaccacgtaaaaaatctattatctatattcttaccatttttgtttttattactttcttaaacacaataattattcggttgccgaaaactcgataaacattattattattgctttcaatatatttttctaacatttgtgtttactctatacttcatataaatgaacacaataatttaatttaaatatactttccaaatattactatacaaaaaacactatttatctttgtttcataacctactatatatagggttgaatattaattagatagagtgttgttctgtaccataaatagtaatttggctttggaccaaattataattattcattcaaatggaccacttgccttgtccatatatatcttttcatgatgagagaccacatgaagttattagttattaatttgaatgagatatttcaccaaataaatctctaactgtattttataatagctatagtggtggtgtggtgtgggggtacataaaattttatttttattaatttatattcttactaaaatatatatatatatatatatccttacatatatatatgttttttttattcctataaaaatatattttttatcccaccatttctttagtttctgattaaataaagtaaattctcattaaatatatattttttgagctaagactttagcaacatttagctatggtcctgcttttaaaaaagataaatgttaaaaaaggacatttatagacttataatgcttagaatttcgtgaagtgtaatatcgctattagtacaacttaatatcgaatctcgtttattttactttaataaatattataaaaaaaataaaagcacaatgctcctagctagatctaagaaactcgtattccatataaaagaataataattagtgtagaatttagtgttacagtaatagaaaaaaaaagtgataaattataactttttggtgttataagttcaacactaaatttaagcatataattttagattattttattatatattaatgttatatatgtaggattgttctgaaatagcgtgtaaccattcatcgatctaagaatacttattaatactgtcaacaaattttacttttagtcacagtaaaatttgtagttaaaagtgaaaaaattgtagctaattatcaatcattattcctatgttgtgactaaaaagtccgtaactaaaagtgttagtcacaaaaattacaatt

SEQ ID NO: 30314 - DNA, 1633 bp, Cannabis sativa
  modified_base (1315)..(1320): a, c, t, g, unknown or other
  modified_base (1532)..(1532): a, c, t, g, unknown or other
gctttggacccggccctagtcccgaatccagccccagtcgtagacccaacctcagtcttgaatctggccctggccccagacctgacctgctcctgtatttaaacccgaccctagacccaacgctagccctaaacccaaccccagaaccagccccggccccggacccagcctcggctacgacccttgcctcaaacccagacccggccctggacgcagacacgaatgcgagcccaaccccaaccccagccctagacgcggactcgggttcgaccctagacccaaactcggcttcgaacttgaacccgaacccggccttggcccaggccacagccccggacccaaacctagacccagctataaaccaggacccagccaggtctcgacctcagacctggactcggaccacaaccccgaacccaatttaaataaaatcaacatataaaaatgaaaataaaatttagagaacacacttttattttttatttttaaaattgaaaaacaaaagttattatagaacactattttatttttcaaaaatatttttttttttgatcaagaaggaacaaacttcattaatcacaagcaattacaaatctgtacaagcctaaaaaggcaacaaacaagaattacataaaaattctctctatgtatctcttctcatggtctttcatatttctttttttagctacatgtaatctataaaacactgtatctttgatatcttgtgtgatttttgaagttgtactcgaaaatttgttgaagagacaattgttcctattgctccaaatgtggtatatcatagctgccaatagagacacatgaattcgatgcattttatcccctctgttcagaatcagccattgtttccaactttggaatccaatcggccaactcttagtccccagccacctgctcaagctcttcacaacctgctgagaaaaccagcagtcaaaaaataaataggagttgcttatgttgcatcctcacagaccggacattggatgctgtcaagagtaatgtgaaattgctcaaatttgtcacgagttaggagttgagaattgattgcttgccatagtatgaacctgtgcttcggtaagttaaaagagcaccaaataaacctgctgaactcaaagggagtttgagaaatgctgctgttatacaacagggcagctttgaatcgcgtaccagtccccactttagcaatgtcttcactagtgaacttgtcccttagaaaacacaatttcctccaataccaattagtgtcactcttgagttcatagtcccaccttaattttaaaaataaaaattttacttnnnnnnttgtgattaaaaaatttaaaaacaatagtgttacccaataccaccttaatttatattacaaagtcatataaaatacatatttaaaataataagatagcacatataaataataataatataaaaaatagaatgcctaggcaacatgacctaattttataggtcaatttgcattctggcgtactatcaaaattatttaggtgtcgtttggtaanacttttgttttctaatttttttaatcacaaaataaaagtaaaatttttgtttttaaaatttttatttctgaaaaaacaaaaatgcgttctgtaactacttt

SEQ ID NO: 30315 - DNA, 1212 bp, Cannabis sativa
  modified_base (1182)..(1186): a, c, t, g, unknown or other
tttacgttcattaatcagcatttactccatttattgattagcgtgaatagtattagtgtggtttttatttgttattttttttaagagtattgttattaggcactaccagtggtgcctagcaccttctcgaaatgtcgcgttgcgatactccctaaaaactattatattaaattatatggaactcgatatttagttggaccaatagcgatattgacacgtaggagggtgctaggcaccagtagtgccctttagcatttcttttttttttaagtaataaattaattttattaaccattaaattctgctaccaacaatagtaataaatcagttaacacagacgccaaattaaaagtataattagaataaagtaaagaagttctagcaaaactataaactatatatcttattcgctcatcactttacaaaatagacacaaacatctttaagctccgaaaataaaactttacaatcatttattacattactaaataacaaaatcatagcaacaacactctgtaaagcttgaataacacaaaggtatgtagtccgtttccacactaatcctccgccagctttggtctttgatccaactaagagcttttaaaacgtccatcgcttcagctacttctatgaaagaagaaatgctattgggtatagaattttaaatttttcggagagtatcattaataaattgtaagataatatttttaaaaagtgttaaataccattagtatttaataccaatactaaaaaaagaatatgctaagtacattattcatttaaataaatttagaaaaaaaaattaatatagaattttgtacagaaaaatatataaataaaacttttattattgtagaagacttttttagaatatatattttcataaataacaaaaaaattcaaaaatataaatttacagtttttttaatggattcaattttttgtttaaattttttttatttttacacttcaaaataattttatttgcaaatatacggaattttatattgaaacttttattgcaactaacggagtaacttaaattgtaactaaaaaaatcatataacgacccacatagaaactactagagaaaccattttagaaatctaaaccgtaaatttgaaagaaaaatttaaaaaattatatataggatatttttttttatatatatctattctatannnnntgtgcctatataactgaaattcttgg

SEQ ID NO: 30316 - DNA, 1435 bp, Cannabis sativa
agggcatggtaggtgtgacagtggtgattgcgacggcctactcgaatgccaagtcaatggacgagcccctaacactttagccgagttcaacctacgacaaaacttcttcaacatctcactggttgagggcttcaacgtacccatggagtttagtcccacatctgagcagtgctaccaagggatcaagtgtgctgcagatatcaacaagcaatgtccgatggaattaagagaccttggagggtgtaataatccttgtacagtgttcaataatgatcagttttgttgcaaatctagcaactgcgggtcaacaagttattctcagttttttaagagtttatgccctgatgcttatacttatcctttagatgatgattcaactagcacatttagttgccctggtagaactaactacaaggttgtcttctgtccttgattattatagaattttttgtacaagaattaactttaccaccccaaattcataattctgtagcgggattattaaattaattagaaaagttgtaacaagaattcaagacataaatattcattgaattttggctatttaataaaatttacactttcttggtacacaaaaagaaagaaataattaaaacttgtatcttgactaaatagtaatataagaaagtacttgttaattattcagcactgcttgttttggaaattccatttgtaactacaagaattatgagtacattggacgacgacatctcctttatatgagttatacggaatgattttgtagtaatataattgttaattcaaaatttcgttaaagtaaatgagctttcataattaacgccaaaagtaatataagtaataaataataaaccgaatgtaataaagtattaaatagagatagaaattttttacgaaatttatataaaccacgagtcacttttatttctatgagtattttgagtataaacttttgtagtggttatttggtcgtccccttcaattttattttactaatatttatagaaataggataacaattgtttaatcttatttaatgtgcagtaacataatcgtggggtttcccatgttttacacgtttcactaataggaaggtgttgccctagttttctcccaatatacatgcattttagaggaggacacgtgtcaacttgagaaaatacgaatcaataaatacaatgtcaattatattacacgatactaaaatagaataattcattaaatacttaactggtagagtatatctataacttgctgaccgtaaaatcttaggcgagacacagatgtacaaactattaattcacatattaacgagaaaatcatttcgtctatgaagatatgatcatgttagtactgttagttaaaagatgtacaagctgtagttagttaatagctctaactgaattgtcagttagttagttaggattgttttctc

SEQ ID NO: 30317 - DNA, 1954 bp, Cannabis sativa
gtccattggggatatatatgtctgcccttttgtttagatcctgtataactaaagtatctcccactgattgttgtccagttatttgataagctcactgaattaacacgattgcctgcctagagcgattatcaatccctacttgttgggctctaatgatctccatttgttgatccatccatttttggaattgatatttttgctgctcaaaggccaaattcacaactgcttgggtatcttgttgatcatggtgaagagttttggtatgctcttgcatcttcgctaaagcaacttgtaaacttttaattttggtatcatcaacaatcaccactggaggatttccaataaatggatttttcagtactctgaccagtgtgctcagcttgagtattagtgattctagattcatgcgtgcccaaaatgaacccaaccagaggtgttgtcactccttgtcctactgattggggacctcttggaggctgaggaatggttggactgggatccatccacactagatctccccaatttgctggagtttacacattaggatccgtagccattagatcaattatttcaatgggattacctctccatgtggttacaaccatctgcatgcgtgttgaagagattcaaaacaatgatctaatgaaagcactaaaatgttgatctcgcttttagtcaacaactctgagtctttgaagcgatttgaaataatagaatttgaataatgattaagcgaaacaagaacacatatttattatagaggtttgaccccatgatggttgtaatagcctactcccattttacttgtattacttgtgagaagagaagcaaaaagttcttgatctttctcaaaagcttatatagattttaacataccctcttcaaaattagatttttgatccttaaatagtgaaatgccttcgctatttatagggaataattacattcattaggtttcccaaaagaaatgaagaataaaaaggaaaactaattaatttccttaattacattattcatgtgtggaaatcccatgaaaatagggatataattgataaataaaggaggaaagtatctttaaggctctctgttgcatttaccctggcaggcatatgcgaagtggttgtgaaatcgacgcttgtcagatggtaccatttaccttgcacgacactcttaccataagtagtatctaatgagtaattcaatctaggcagcatactaatgtggtagacccagtccaggcccaaaatgatccacgtgtcgcctagagaaacgtcatgtcactctgtgcagatttgggtataacaaattctaatattttacaatatgttcccaaccactcatgttattaagctctcaaaatagaagttgtgaaaatcatcttctctgagaaactttaatgattgaatcaaagaactcaatgaacacaaataggagttcatgtatacttaggattcaaactaatctactaatgatcattgttgtgatacacataactcttaaatgataaatgacatgttgatgaaagatattattttatatcggtctagtcatgtataataaaattatacacaatacctttgccacatatctacatatgtgatccaaatcaaaatcacgcgcactagtatagtgcatagcaaactgtacttggtaactctatattaaagattttgtactttagtacactaccaacttattttattcatattgtatgatcttaattctcttgtactaacatacaagatcataccttctctatatcaatatgcaatttttagatatttattaattatacttctataattaacatattcatttatcttatgattatttttatatattctaaaatatattatgcattaaatactggattttagggcataaaccctaacaaatatatcatgacatctgtttacaccaagagtagccctaatgacatggacatcaatgtttg

SEQ ID NO: 30318 - DNA, 2246 bp, Cannabis sativa
aagcatacttgcttgcttagaatttaagacaataaaggcacaacacaaacatcttctaaaaaggatttcaaaataggatgtttataaaatccaaggcaaacttagagcataatatacacaagaagacaaacataaagtcttccaaactaaaaaagaaaacaaaaaaaaacatctttcgaccatttacaagtatatttagaagatcgtgatagaataatcttggagcagaaatatttgatatttcccaaaataaacaccagtaatgaattcctgaagtgatctttattctgaaaagcagtcacaaagttacaatatgggagctttcgagaggctcgtctctccaaatccccaatatttcaagaggattgttctctctacaaagagtctactattttctaattccaagctagttgaaatgaatacacccctacatttatagggttcagtcatagtacaaaaagacaactcagccccctaacttaaaacaaccacagaaccactaatacaaaaatagggaaaaattactaaaagaccagaatacaaaataactccctgccaaagccattccgtcggtctcctagagtaaacaaattgtattggggcttatcagatcatcttaccaacattaaaatccaatgcattcaaattcatttggctaaaaaccagcaacttcagtccatcaattataatattattttactcatttactggtcacttgcagtatgtcatagaaattaatgggtatccctctcttctaatttgaatttaaaaagcacaaagaataattgatatccctctctttaacctcaactctgaatctgagggccacagagggcaatgggaatccttctccatatattggcatttctgtctttaacttcaattttcaggtcagggccatatagaaccacatttacagatcaaatctactgtataaataacctaaataagaaagaagagaacgacaatttaaagttatccatcccttacttctgtgctagtatttcaatactcattatatgaaatcagctaaaactcactcaccactttgagccatcattgacattagaaatactgaaagaatccaaagacttgttccccaagtcagaaaaatcatactcaagctgattccccaaataattaaccggaagtagcacaaaaattccaacaacagccgcaaacgtaaacactttcaaactgcattttcagaaaaacaaaaatcccgatcggtttcatttcaaacaaaaactgaattgaagaagacaagacaagacaagacactaacctgaatacaaaaatacgagtaaaaacgacagcatccaatcccaaagtggagatgagttgttgatcggaaggctcccatgcatttctgacccaaccagcagtaggtaagagcctgtcgaagttgaaatcacgagtttgttgagattgaccttgagaaaccaatctaggagcgtagacggcgacattccatggttgctttcgaagaatagagtagagagtgaagaagagaaagcagagacctagattgattccgacggaggttagcagagcagagagaatcataatgaattgaagatcaaagaagaagaagaagattaataaatggaagtggtttggttgggttttggttatgatttgatgaaatcgagtgcggtgtggtgagtcagtgtcgtacttttttgggattggtgtgacgataatacccttgaatagattcacgctggccaaccacgtggcggtggtgcaatcgggtattatcattttgggaaaggaagacaaaatactttcctaatatatatacacacatcataatcatatttgtttgttcctcaattttgacaacttttaatattttgagattttctttttttgttggacaaaatcttcttaatctactgaaaaaatagaataatttgcggcggagcgtggctgatagtgtcgactgagtaaatttaaatatttataccataaattaatttaaaaaattacaaaaacataatttcttgtaaaacataatatatttacgagctagttaagcttatactgttttttaacttttttgtttttttttttaaataactttttcaacttttttattacaaactcgtgccttaaaaatcataaagaaaaagtaaagtataaattaggactgtacatcggtcggtttagtcggtttatactatatattttccaacccaacataaagatcgggttataaaattctgcatgcaaactgcccaatt

SEQ ID NO: 30319 - DNA, 3350 bp, Cannabis sativa
  modified_base (31)..(63): a, c, t, g, unknown or other
  modified_base (116)..(135): a, c, t, g, unknown or other
tatgttctagacttaactgattttgtgcatnnnnnnnnnnnnnnnnnnnnnnnnnnnnnnnnnaaaatacatgttaacataatcacttcagaactcttaaattgataactaatcannnnnnnnnnnnnnnnnnnnagggcacaaaacccaacagtgagcaggtgagaacctcaaggaagagaaggagattgtggccgcgaaaaataccctagtggacgagcagtgctacagagttaccacctccatcacagtcaaaggtaaaggtgtgacacgaaggaaggaggtcctatcgtcaccaaggcatgcttcaccaccaccaccgcgagatcttagtacctcacgacattgtcccggaaaggagaaatgggctaactctatgagcccaaaatccaaaactcaccactaggaaaacgaaataaaaaaatctctgctagaagagccaaaagctagaaactacggtggccagcatggaaaaagtactgagcgccattctcgaaagcaaaactcaaacttcacactttctatacaaaggtcaccggtaagagtgcataatctcaactacacacaatggcgagaagagctccatgccatcaatgggtggcaccccaaagggtgagggaggaaggggcatatcgcaaaatgagaacccaagaggtcgcctagagcaacatgaatttatctgctgaggtaagaccgtaatgggagaaacatcatatagtcttaagaaggggcttcagccaaagaatctcatgcaaggggacactgcattggcaccctctctcaagagcaaagcgaccagaagttatctcccctcaaccatgatggagagcagcacgatgatgggatgagaggaatactacccgcgggctccatgcaaactgctgggaaaatccaagttccgttcaccaactctcgagaaagagtgaaaaagagaatgagagagctagaagcagagatgcaggatctacgtcgaaggatggctaggacatcaaaggaagattcgaaggatgatgaactcgatgaggagtccacgaattcaaatggaaccacttccacccaatttcaaggagcctcgcatgatgcatatgatggtacaactgacctaaaataccatctaggagcttttagtgcgctaatgaagatgaagagggtgtcttgcaaggcaaagtgctaatgccttgtggttacacttgaagggatcgcatacaagtggttcaagaggtatgaacctggaacaattacatcgtgggaacaatttttaaaggaattccttcaacaacataaagtggtgagtaattacattatgcctataatgagtatcaccgatgtaaagtaaggggagaaagaaggcttaagggggtacatccaatgctttaatgctgaagtcgccaaagtaggaagaatgtccaacaaagaatataagttctccatagatgctggaatatgccgtgggagtagattatgggggatatgttgaaaagagaattggatgacgttgaagacttctacgagagagcaaaaagatatacctgcatcgaggaaggcgacagagtcttggaaataaacacaagcaaatgtacttcgggaagctttctggactcctatagggtctactaggtaataaccccgatgctcatacatccaaggaaagcctacgctatacaacccataaaaataaatatccaagatatccccttaagcaaagttcccctacacaagaagaagttcataagtgtgctgcaataaatcaaagaagccactcaggtgggcctccgagtcaagatggatgatgttggacacttggaggcaccaaaaaaaagagaaagggggatatttttcaaattgataaggactagctacccttggtcaatgagagaaatgatcctacttctcccaacaaaagttacttagccgcaagaggtcttgaaagacactcatggcataatgctgaaatgagagggacgcctctcatgagtaagcaaaaaattttctcaagagggtagtatggtcaagtgttataaagctccctaccatccaagcaaaaggatggatttacaataagagggagacttctcaaagagccaaaactcccaccaaagtatatgcttgtctaccacaatgaaaaatggcttggccaaagagtgacccctagagttgctcgaccaacgctggttacaaagatggattggccaaagagtggcccctagagttgctcagccaatgccggttacgaaggtggcttggtcagagagtgagcctagagtcgcttgaccaatgccagttgacttggccagagagtgaacacaaggtcacttggccaacgccagttacgaatatcgcttggccagagagtgaacctagggtcactctaccaacaccggttacaaagatggcttggccagagagtgtcccaaaagtcgctcggccaacgccagttacaaagatggcttggccagagagggaccctagagtcgcttggccaacgccgattagaaagggtttggccatagaatggtccctagagtcactcagccaacaccacttacgaaagttattgggccaaaaagacatcctcaaagtcgtacagccaaggccaagtaaaattgttgcttcacatattggcgcgaagtaaagttcaaccaagggaagccccccatacaaagggagcaccgtctcagagaaaactaagagggtcccacgccttggcaaggcagatcccccaacttattcagtctacaagaacacttgaaagaattcttatagactggggccaagttttaaccccaaaaatcgacagagttaattttgagattagtcaacaatcacccccagtagtcgagagacatcaacaacaagagtcgctcaaagaatgattgagtcaatgcagatggcctaaaaatcattaatcttggaaacccatgcttacaagtcttggggtatatttgtgcaacttggaggtcaaccccgcaacaactcatgagtagagttagtaagatcaacttactaggttacaattgttgaaggatttttgtagtgatatgttttgttcagaattggatcttgccacaaacaaaatatttaaagatctctttcttatctttccaacacgtctttaatcgtctaattttgttgtttatcgagaaagttatggccaaaatactaagactgtcgaattgtgacaacttggtatgcaagctgatgactcccatgcaagctggcaggctgttgagctactccctatctattttgcaaccccatggggggttgtgcgagcccatgggccattagggaatcgggggcattttgtgactcgtggaaccttcatgcaagtggtggagcatctgttcgac

SEQ ID NO: 30320 - DNA, 2680 bp, Cannabis sativa
  modified_base (630)..(632): a, c, t, g, unknown or other
agatgattcttacaacttctattgggagcaataacaatgaagtggttgagaacatgttatacaataatggaatacaagctttccaaaataatcgaatattagttcccttatagtgttaatcctggtagtgctaacagttggatacaaatctataattatattatagattaactattcacattgaactaatggtacataagaaattaagagataattagaaaggtaaaacgctaattttgacccaactttaattatgaaaataattagagggcgagctacttatattataatggactacaagtaaaaattctataaatataattctatattgtcaaagagtgcaattccaaatttatagtggagtaataatagaattaataaactaaattattctattgatgagttcaataataatcttgtgtttattggagcttcaaaatataggtccatgatccccaagtcacctctatacaacactgtacaggggaaagtttaatttgatgaagaaattttgagtgagaattaatttctatgagaaataatttgttaagggcaaaatagtaattttgtgaaaattatgtaattagtatttaactattttgttttatttgataaaactatattaattannnaaatataatattattcttaaataatattaaagagagaaaatattattttcaaaaatctctcgagtttgctttgttagggcttgactttcagcatcctattgtggctatggcaagccgagatcgaccgcagaagagtaacctctgcagaattaacatgagcgcatggaagaagaagaagaagaaacggggacctacttcctcggaacagcctcttaaggttaaattgatggacaaaattttgggggtggaagctattgacttctcaaaactagaattggaaacaaatattgggggtatggaggaggttgatgagattgttctctcccctaaatcatctttgaaataaatataaaggatggatgatattaatcaggatttcaatcgatgaaatggatcaataaatggaagtagatattttatatgaatggactctgattctttgtactcattatcaaggaataagtcatgtggcattagaatgcaagaagaaggcaattcaaaaataaaaatgggtagtcaagaagaccttcttggagaaagagaagaacaagataaatgaggtggatcaagatggctttcagaaggtgaaaagtgggaaaaagactatggtacaacaagaccctctaggaatcacagagattaacaatgcttgttaagctttaggggaacatgaagataattatgcaactatggaacacatgaaagagtttgaagatgaggcagttggactaacaactaatggggggtgaacctcctcaaactcatggatagaattatgagttggaatgttagggggatcaacaagcaaaataagtaggtggaggtcaagaaattgattacttcattaaaaattggcttggttggtgtccttgaaacaagaacaaaggctttgaaactaggggttgcgtatattactatgttcaatgggtggtgtttctctacgaacttggcttggcacccagggggagaatcattattagttgaattcctagcatgtttgatgtcaatattcttggcatgtatgctggacggaactgagggctgtcttccagtctgggcctatccagtacctaacaggcttccagtttgggcttgtcaaacatcttctttaagctcaataaagccttatgcccgatcaaggaagtcagtcatgttttgagttgagtgtctgcggatatctctccatagttcactcaagggtagtatgccactcatgatgatcgtgtacctgccttcttctgttaaattcttaaatttggtagcctaagtcataaatctttagaggtcatcttttagaggttccttgggcctctgttttacttccaccaagtcttctagcctgtacggtgtttgcctagaagatgagaattacgtgtagaaatctcttatgaaagagttccacgaattgaacctctcagcagctagtttgaaaaaccactatcgtacgattttagacaaggttgcaggaaaaatcctgcaatgggtatcaacctccacattttgtaaatctatctggatttcaaaatatttgatgtgagccaagggatcttttttccctatgtacatcttccaagtaggcatcttgagcttggttggcaagggcagcggattgatgcacacagagaaaggtgaccttcgggtcctgtcaagttctaagtcgaataactttgggtcgaacatgccttgtatcatgttcttgatttgatctagctgtgcttgcaccacaggatcaacttcagctagcctttgtcctctcaataaaagcaccaaaatattgattgtgaatttagccaactgacgtcgagtctaactatgatcaaattttgcttatatctgtcacgtgagtaatgataaataatgtaaaaggacaaaaagatttatagaggttcgactcctttgatcaggtaatggcctattctcattttagttgtattcattcttgagataatatcatgcagattacaggctaaaaccttgtaatttctaactatggctctctttagtattacaatgatgacaatgtgtgttgcatgtgagaagtatatgaa

SEQ ID NO: 30321 - DNA, 1751 bp, Cannabis sativa
  modified_base (1720)..(1723): a, c, t, g, unknown or other
aaattagttacataatataaccaactagaaaatcgaaacaaagacagaacacctaaacaatcaaaaggtatattgaaatagaaaaattagttatttaaaaaaaaagacatattacaaatgaatttttaacaaaatgacttacgaaattaaattacagaaaccagttacataaaataactaaataaaaatctaacaaaaacaaactaggtgcgcaaaataatcaaattataaactaacacaagaaaatcaactacttagaataactcaatcaaaaattaacacttagaaatcaataaagtaaaacaacaaaatcaacatttaaacgcaaatacaaattacataataaaaccaactgaaatactaaaacaaggacataataagatagccaaacaataaaaagataactaaaacaaacatatcacataagaattcttaactagtggtttacaaaatcaaatcagacaaatatttaaaaatttgacacagataaactgattatgtaatacaaataaattaaaaattaacacaaagaaactaattacatgcagcaaccaaataaaaaattaacacttaaaacccatacatgtaaaagaacaaaataaaaaattaaacattaaattagttacctaataatcatataagaaaactaccatatgatgacctattctaattagaagtaagaatcacaaacaaatttaatttatctatcaactatacaaataaaaaataaatcttttgtgtaaagtaccttattatggaagtaattatctcacaatttttctcctattcaaacctaataacgtccttgaaaaatatgaaaaatttccttaaataccaaagtgactaataaagattaatatttatatttgactataattacgcaacaagtattatcataagttcataatatatatcctaacaattatagtgaaaatgccttaaatgacaatctctatgtgttatccatttttttttttttttttgagaaatgcaagtaaatgaccttatttttaactttattgatagttaatgtcctttttttaaaataataaagcaaatatcattttttactttttaatacctaaaatacctttcattatataaaatatattatatgttttatttctttaatagaaattataaaaaacgatgcagagcttgatcaaaatctctctactaaatttttgtcaactattttttcattatataaaaggtattatatgctttattcctttagagtttgctgctattattgttgtctaatatgttatttaagcatataattagttttttattaatatattgtatgatatacaacaaaatataccttaaaccaatatatatatatcacaaacttaaactaatatactattaaatgaactgttttctacagtagcatacaaaaactatataccacagtcataagcagatataccatagtcaaaaattaatataccaccagcatagtgaaaaaaaaattatacaaaagacttaatttaatattctacaagttttttttcttgttctttcattcatgaaataccaatgaacataaaattaatatacctcagtcaaatataactatacctcataattaaactaatatttcatatttttttccctatttcgttcattatataccatagcacattaaaacgatatattacaatattaaattaatatattttctttcaattttttttcttagtatattattacnnnnaaaaacaatatatcatagtgcaaaataa

SEQ ID NO: 30322 - DNA, 1691 bp, Cannabis sativa
  modified_base (1060)..(1065): a, c, t, g, unknown or other
atattttcttagcacaaatagggacaccaaggtatctaaaaggagtgaactgccttgaaaaacctgatacatccagcactcggcatacctcatgttcatccatgttgctgcaaaaaattacagatttggaattgtttggctacaaacctaaagtagccgagaagagcttcaagccttgaagcataagaacaatgcttctataatcccctctgcaaaaaagcaatacatcatctacaaagctcaggtgattgagttttagatcttcacatctttcatggaaagtaaaaccctccttgctgccaactttcttcacaattcttgtcaaatactccataccaatgacaaagagaagaggggataagggatctccctgacgtgatcccctcattgatcaaagaatccatggagagatccaatgaaaaaaggagagaattttggggttctgacacaattcattacaagcgtaataaattgttcaggaaagagcaggccccttagaacctcttctaggaagtcccatttaatagtatcataggctttttgcaagtcaagcttgatcatgcaattagccttagttgatttcgtcccatagggcctgacaaaaacaaatattatagcagaaaagaatattataggaaatttagttctgatacataagaattaacctttgtaattccaatttcaagatcacacttaaagaaacaaaagttaaatcaaaacaaacaaatcaagaacaaaaaaccagcaaacacattaaactagaaaaatataacataaatgaatctaaatggctatcagacacactaatacaagagatttatattggtcccgatcctaagttcaatgtgaacttggtcatactccagttttaaagcattgccaccaatctttattaataatgagaaatagagatatcaatctcaagagctacaaggaaataattacagcaagtcatccgtagtgtaatcccttaatacccattaacttactaacccaagccaacataatcaacaatgtttctctatacaatttcctaatcccaactctctctctctctctnnnnnnctctctctctctctcaaatatctctccatttctcacaataaattctctctctactgtattatgcctctctacttcttgcccgttttcttgtgttttttctcttttataatgattctctctttgaaatgagaggagtagttctctttatataggccaagggactcaatatacttgctgtcataatttgatagttaagttagttagtctaaccgaatgattttttggggtttaaggaataataccagaaattctaccttatttcatcaacccccaacaagcaaagcatatctttccaatggaggtggtaatgctttcatgtgtaactacttagtaactaaggttgagtaagtccaagcaatgcttgaacttactaacaggtaacaccttagtgccaatatcaccagggttctcttctgacatcactttctccaacttgattacttcttcttctatcttctctcttatccaaaacaaccgaatatcaatgtgttttgtcttcttgtgataaactagattcttacacaaatgaatcaagggttgtttgttagactatacctttgcctttcaaactagaagattcaactccttcaaaattccttgtagtcatattgcttctttgaatgcct

SEQ ID NO: 30323 - DNA, 3014 bp, Cannabis sativa
  modified_base (31)..(56): a, c, t, g, unknown or other
ttttagaatttatattaggatgttaatgaannnnnnnnnnnnnnnnnnnnnnnnnntggtaaaatatttccaacaatgggcccctagatacaagtcaatattatatgatatattatatgcttttcttactgagtctgttgactcatagttctacttttatgtgtaggtaaaagaaaggtgaatgctgaacaggagtgagcttggagctagggtgatgttgtacatgtcattgcagcgcgatctagattgtttggtctcaagacatctagggtttacattttctagtcgctttgcaaccagactattgtatattggaatagttttttaaaaagtttaacaacaggattgtgacttttgtaaatatatataatgtttataaagtttcataattaattctaaagttttaatttgacacgattttcaagaaaatttctttgattagcaaagatagcactagaattgataaagcactgtagtgtgccttagtattagggcattacaattttggtatcagagtcgccaagtttgtctaccaaagattgccaagacatgtacaatcgtcatcagagaaaaaatcagctcacggttcggtaagccagtacttgtttagtgttgtatgtgattattaaagcatgctggcaagcatattactatatagttatttatttaatgtgttgccttaaaatccataagagcggtattatgatttatgatcattgtctgatctgcttgacttatgggttctcaggctaagtcctactaaatggacgcctagcaaaatacaaggagttagggtaataaggttgagaccggaggcggtcagggaaatcaaattccccagaatccctgtggtcgcagcagaggccgtggaaggttttagggtggtcaacatctaaacgaacctcaagctcctgtgggttgggagccaagatttgcagaaatgaaagattgtatcccccagtaagatgaagaaattctgagattgaggcagtagggtcctcctgcagtgcctccaccacaagctcgggccattttagttccttcggtgccagtagaacaacctgttgctggcaaccgtatggaaccactttctgagaggcttcacaagctggcacctccagtttttttgggaggtccggatgtattgaaggctgagcaatggctcatagtgatagaaagaattctaaatttcatgggggccattggaaatgattgggtgaactgtgctactttttcagttccaggaagacgcactcgtgtggtgggagttagtgtcgctcacctgagacataactattatgacctgggaagagttccaagatttattcaacgccaagtattataactaggtagttcggtgtgctaagcagaaagaattttccaaactggtgtagagtgagggtatgttagtaactgaatacatgacaaagtttgatcgtctggccaagctggctttgggtattgtgcctacagacttcagcaaaaaggagaaatatctggcaggtctaaatgtgaaaattagacatgacctggtgattactacgaataaggcaacatcatatgcagagatggttgagaaggctctacgagccgaaggtgtgtttaagtttctgcaagagcctcgagtgactccaagtgttggtaggacccccactcttccaaatcctgtttatggtagggatagtggtgattccaccactgattagaaaagaaaggctaacctgtcatctggtgtttcgagacagagcaagagatttcgtgggaatcaaggcagagcttgacgctagggttatagttaccttgagtgccacgttgtaagaaacatcatccaggagagtgcaatcgtaagacatgctttcagtgtggtatggtgggtcattttcaaaaagattgctctcaggaaaagaaagaagagcataagtgacaggtcagcttcttgtcaacaactcctgttttactgtgttatttgactctggagatacacactcatatgtggcaacacaggtaattaatctattcggtaggccttgtgatttaatcaaaagatgatttggaaccctaatgcctagcggagagttggttatctccaataggcgaattaggtctatgccagttaggatcgaagatagggagttgagtgctgacctagtagagttggaattaatagaatttgatatcatacttggattggatttcctgtccaattattcggctagtgttgattgtaagcaaaaaatggtaacttttcagccagagggtgaagatccatttgtctatgttggctctgttcaggggtctcagatcccgattatttcagttttaagggctagagatttactacacagtggatgtgtaggatttttagtagttgttattaactctaacagaccttaaacatttgggcctgaagtagtcaaggttgttaaagaatttctcgatgtatttcccaagtagttgctaggattaccgccacaacgagaaatagattttgtgattgacttggcacctggagttgaacctgtttcgaaagcaccatataggatgactccagcggagctcaaggagctaaaaatatagctttaggggatgcttgatttagggtttatctgacccagtgtatcgccctggggacctctagttgtgtttgtcaaaaagaaatatggatccctcagaatgtgtattgattatcagaattaaataagctgatgatcaagaacaagtatccgttgcccaaaatttatgatttgtttcatcatcttcagggaaagattgtgttttcaaagattgacctacgatctggttatcatcagctcagaattcgggaagaagatataccaaagactgcattttgaactagatatgggaactatgagtttttggtaatgtcatttggattaacaaatgctccaaaggccttgatggatcttatgaacagagtattcaaggatttattcgataactgtgttatagtgtttatcgatgacattctcgtatactctcagtcagaagaggag

SEQ ID NO: 30324 - DNA, 1625 bp, Cannabis sativa
tctaataagagtattgttagctgttagaggttagtggtgcttaatattttctataaatgacctaaaacaattagttagaaatattctctaaaaattatttttttaagatatattgggctcgatacttatttgcactgatagcagtataatattgaagagattgctaggcaccactggtgccttttattaattctctatctctaatggtggtattaattctctatttccaatgtaaacttctctctacttttatgattagctgtaatttttcttttattactggaaactgtaattttgcggcccataatatagtcaaatgggcatttgccaacaatattatatggtagaggtttctactatcccgaatgctatcttttgtaatgaccatgaggtctaactccttttgatctagaaacgattttattcaaataaaaaaataataaataaataaataaaaaaaaaaaaaccttctcataatttaaaaatacaatattttattttgtctgttttccacaatacttttttacatttttattctaaaatatttcaatgataagctaagcactaaaataaaaaaaataaataaataaataaataaatctaagtatttttgagctattttaactcatctatgaatatacttttttgattttttttaactcttacctatttttctttaactctagagctattttacattggttatcggtgagtgctcttaatatatattgttcatgttcccctttttaccatatcaactttatgatagtttttgaaaactcgatggttttaattaagtttaaatttgtacattatatttatcaaacacatccaataaattttttagaagttcaaaataacttagcaagtggaaaataagtttttaatattttattgtatgtgttgctcgtttattttatatgtatgtgaaatagacaatttgagccttattatattgtaaaatatcaaattttttataactttgtaagatgccttaagtaactaaaatatacattaatatacaaaaatattgatattacaactattcagttatcaaaaatacaaaaggagtgcatcaatgaacctctaaaaaaccccaataggatgtaaattgtgtaccctaaatgatgtatatagttgtaccactcattcttggcattccttcaaaaaataaatttttgaaaaagatgatttcaataaaaatgatcttagttcataagaagataaaaggagagatatgagaccgattttactgcatttttttgttggcaataaactcacttaatacatgtcaattcagtagttttatctcagcacttgtcaattaaaacaagaaaggcagctattagttataacatttagctttgatcaagtgttcctcagtatgagatttgatcctaattgtttttgaattgtaattaggttgtgtattgagggtgctctttcagcaatagaagagattgaaaattaagagccaataagttgtatttgaagaagagatgatgtccaaattgattgcaataataatgtgggatataggccaaaactataacttataatttactcgtattaaaaaacaatttaactaataactaaaatttcgttgtatcaatttgatcaatttt

SEQ ID NO: 30325 - DNA, 1352 bp, Cannabis sativa
  modified_base (838)..(856): a, c, t, g, unknown or other
agagtaccgtcctttgagtatttttcttaacaatgaggatgggtgattgagtatccttcagctttgtttggctagcagggctttgttaaaatgcacaaaagagcgaaagcccatgcctccatttgattttgttttgcagagcagcttccaattcttccaatggattcgagatcccgattcagatttaccccaccaaaagttttccatcattgattcaagttaattgcaagttgttgttggtaatcgaaaacagctcatagcaaaggtgggaattgattgcaccaccgctttaagaagcacttcctttccacctgctgagaaaatcttttcactccaactattcattagtttccacaccttgtcttttatatccccgaacaactcttgcttgttcctacccgaatatgatggcaatcctaaatatctttcatgacactcacttataggcatagcaaggtgtcgatgaaagaaaatttgatttgccaaagttgtattgggtgaaaaagataataccaatttgtgggatttagtaactgtcctaaagctctatggtacaaatccaaggatcttttaatagccaaacaagaactctaagctgcattacagaaaaggaggctgtcgtcagcgaaaaataggtgcaaaattggagcagtatgtcgagtcagagaatagccttgaagcacaacttggagagctaaacaaagatcatccgtacctctactttaagtaaactagagagcagttcgagtggacagaggagtgtgaaaaagctttccaagagctaaaagcacaacttgcaaaatctctcgtactctcaaaacctctggacgaagaagannnnnnnnnnnnnnnnnnngtcacggaacatgccgtgagtgccgtactaatcaaagaagagaatagcgtacatcacccagtctattacatcagtaaaagactcattgaggttgagggtcgatacccatcaatagagaaactcgcctactaccttattctagcaacaaggaagttgaggccctatttccaagctcatcctgttcgggtatacactaaccagcgactacgccaaatactgtaaaaaccaaatgcttttgaacggctactcaagtgggcggtagagttgggccagtatgaaatcacttttcaaccccaaacagcaatcaaaggccaagccttagcagactttgtggtagaataaacaggcaagaaagaaagcatactagaaagcaaccccgagctggtacaaacacctcagccaagtaacaatgaagacagccgacctggaactacatgtagatgggttggctacagatcgactatctggtgcaggaattgcccttgtcacgcctggg

SEQ ID NO: 30326 - DNA, 2498 bp, Cannabis sativa
tttttgcattacataaggatttccgacttttccaatgaagttttcgttcaccatttttagcaccccatcaaaaattggccatttctttttcaacaaaactgcagaaggaatcaaggagtttaaaaaccgacatggcataagaaggaattgcttgaatcatagccttgagaagaatttccttgcctccttttgaaagaaatttaccttgccacatggacaggtaagacccgattcagtctttgagggatttgaaagaagaacttttcgatcgaccaaaacactgaggcaaaccaaggtacttatccatgtggttggtgatgggtatctgaaaatagtcttggataagggtttggtatgtgaggctagtattcggggaaaaagagagaggatttttggaagtttacaagctgacccaaaattttctgatactggtccagagcctctttaatagaattgcatgcctgaatgttcggacgacagaacaggatgctgtcatccgcaaagagaagatgggaaattttaggagaagtgcgagtacttttgatactgaaagcatcgtccgtgtgttccgcctactttagaatggatgagagaccctcagcacacatgaggaagagatatggagagagaggatcaccctgcctgatacctcaagtaggagtcacgagccccagggcttggccattgagattgaatttgaaagtagccgtggtgatacatttcatgatcaacgtggtgaactggggggggggtaacccaaacttgaccataattttaattaggaatctccattccacacgatcaaaagctttagccatatctaatttgacaaccatccaactcaccctgccttgttttttgttttttatggagtgcaagatttcctgagccatgaggatgttgtcagagatgagtcagcctttgaggaaggcactctgattaggaaaaatcaaaggattgaggactagtttaagtctattagcaaggaccttcgagataatcttgtaaatcgtggtgcaaaggctaataggtcgatagtccttcagagtagatggcttctttaccttaggaatcaaagtgacaagggtggtgttaaattaggagagatcagagaggttgttaagaaaacttaaaacagcctcagtgacatcgttgcccacaacactccaatttatttgatagaattggttattaaagccatcaattcccagggctttatcaggacccatttagaaaagagctttcttaaccttagagggagagaaagcttcataaagaatttgatagttcactggatcaatcctagggaaagagttagagaggccagcttcaatatcagtatcctaagggcactgtgaagtaaacaggtcagagtagtaagattcaatgagagataggatggagtctgagtcataaaaaataattccatcctcagaggtgagagaatcaatcttgttacttcgcttcctatttgaagcagacttgtggaaaaaacgagtattcttgtctcccaagttaagccattgtatacgagaacgctgcttccagtaggtttcttccttgaacaaaagagagtcaatgttagcttggagagtcttctgacgagaataagattcaggggaattatcctcagaactcctagcctgctcaaggtctttttggacttttttaattcagctctggaacccaaagaaagccttattcttccagtttgaaaggaatttggcacaaccagattgtttggacagaaggttactggaaggatcatcattggaaacgttggaggaccaggcatctaataggacatcattccaggtgggctcagtaagccagacatttttgaaaaggaatctcttgttcttgtttttttggttatggggatgatgggtatgatcaagaacaatttggatagccttatggtcagaactaaagaagtcaagatggttgaggccactgctaggatggtgagaatgccagatgctattccccacagcccagtcaaggcgctcaagggtgtttctaataccctggctattattaatccaagtcatacgaggatcattagggtgtaaagcctgaagatgaaaattgtccataagagtacgaaaaagagtggagggaccatttctagaattaccacttgacttatcattccaagttaaaaagtcattaaaatcacccatcacaaaccagggaagggaaatacacgacaacccaatcctgcataggattctccaagtgtgaatcctatttccaagatgaggggcaccataaaaagaaatgaaattaaaacttgaaaaaacagcaaacgagataaaatagtgaatatgattagcagaataattagtaatagttacatcaatgttcgagttccaaaagagaaagagtcccccactaagacctatatggggaacttcaaaaccaaaatcaaacctgagcttaaacttaaaacgatcaatagagttcttacacaacttagtttcaataacaaaaagtaa

SEQ ID NO: 30327 - DNA, 1070 bp, Cannabis sativa
ctccattttggagtgtatagcagccaagtgaaccatataatcacctttgcgcattgacatggagttgttccagtcaagtgaaaaattagcgtgcctccaaaccgatttagcatacttacatccaaagagggcatgtccaatggattcccaagcttgatgacatattgagcatgttgaatctgtgatcaccttttgtttaacaagagctgtagcaacaggaagggcatcattgtagacccgccaaatgaagattttaattttctgaggtaagttcagcgaccataggaatctctaccaagaggcagttgatgaagagcacgagctattatcactttcttcaagagaggcagccaaatggtaccctgtttgaactgagtattcacccgaatggttgtgatgctagataaggatatcatctttacgaaaaaaactcaaaggaatggttacaatatgatctacatcaggtggtgagaaccattgattgagtaaggccatgtcccattgtctttcagctgtaatgaggttcgaaaccacaacatcagcaggcccagtaaaatgatatggactgaaagtcgagtgacctggtatccatgggtcgttagcacaactaattcgacaaccctcacctattttccactgcagtccagctagcaaaagtgcacggccccaatggattgcttgccaagttgaagagggggagtggccaagtgaagcttcaaggaaggtgttgtttggataataacgactttttaagagccttgcaagtagagagttgggctgatgaagaattctccaagcttgtttagcgagcatagcttgattaaaatgtacaaaagagtgaaaacccataccattattttctttcctttgacataaaagtttccaagagcgccaatgaatcttgttaccattttcattcaaaccccaccaaaaattggccatcatagactaaagttgattgcaaaagtaaccaggcaaacggaaacagctcatggcataagttggaatggattggaccacggctttgagaagaacttcccgccccccgctgagaaatttttttcactcca

SEQ ID NO: 30328 - DNA, 1103 bp, Cannabis sativa
aaaacgactatgatcatcgacaatagtcagaaaatatcgaaaaacttcaatactatgtatgtggaaggatccccatatgtcaagatgaatcaagtcaaagcatgaattagcaatattattttgagaattaaaaggtaatcgcctttgttttgctaaatggcaaatagaacaaggaacaacattttgagaactactcaattgaaattttttattgatgaaattggtggttgatatggatggatgtccaaatctacaatgccaagaaaaagtagaattgcatgattgattatatgttgagattattctagagctggaaaaaggcagcagaaaatataaatgcccaaatcttttagctgtcccaatcttcctcttctgtgaatcctgaagaaaacagtagtcatcaataaatgatattttgttagaagtattagtaaggaagctagacacactaaaaagattgagttggaagctaggtacataaagaacattatgcaatgttaaagtagcagagagggaaatagttcctgatttgtgaacaggtattttggtgccatttgggagagaaacaaaaaaagctatggcattatgatgtaaagtggtaaaaagagataagttgcaacaaaaatgatgagttgcaccgctgtctattatccaacaaagagagttagaggcattaccagaaatattcgaggcaaagactggtgcttcagtaggtgtttgttgtagcttctgactgaggagagaaatgagagattgaatgtcttcattcttagtcagattagaccgcaatttttctgatggggcagtggcattatgagcagcgggttccttatcagaaggtttcttgttgccatagccaggggaaatccaataaggaagtaacatttatcctttaaatgccctggtttatggcaatttgagcagtagggtctcattttcttattgcgtccattattattattgttagatgctgatgtcgagggagtttgggcaagagcaacagaaggattttcttggacagatgcaataagagagctgtgaggatttttaagctttctctatctttcttcatgaatgatcatggaaaaaactttggacagaga

SEQ ID NO: 30329 - DNA, 1887 bp, Cannabis sativa
  modified_base (128)..(141): a, c, t, g, unknown or other
gcaatgaaatggaatagaatcgaaagtaaacaatttttaatccatttctttatttggttgcattttaaagtattggagtatcattctaatagaatggccttttcactattttggtagaatgactattnnnnnnnnnnnnnnaaggaaagaccattccaatgcaagatttgaaaaaaaaaaattaataattttttatcaattttttttatgcattttaaaatttatttcattccaattcccattcccattcctaaatttttattcatcacaaccaaacgccacctaaattcttacaaaatacaatgtgtgtaatttatttactaattattattgaagttagttgtatttagtttgatatgaacatatttacacatattcttctatttttttttttggttattttgtgtcttaaatggaacttaagtgattttgaattttttggtttttttttacgtgttttaataatttttagtgatatttagcaacatgactgtgagtgatgaagttcgacgacatgtagcgatgtgtaacaatatcattatcgatgtagagcattggatatttgtgttgttgatattaatgatgtttagcgatagtttgcaataaactaaaacaaatattagtctagtgaaaatttgtgatgcttaaggataatttgtgatgatttatgatatttgtcaacatgtttggaatctgaattaattttttttttctatttttgtttgtagattcaaatgtgtttgtggctgtagtatatgatggtgtttgtactgttgaggatttcaactgtatattcaatagcccaaaaagtaagacgttgatatttgagatttaaactactttacagaagatgcatgaaattttgtatgaagagttgaaagtagaccctttggtgtatgaattaaaattagaggtgtgttacatgttcttgagcgagaaagaagaccccctggtagtgtaaatctccaaacaccaggcactagtagcagtcagcaaggtcctccttgtagtactccagcatttgatttatttggcatgttgggtagatactttagtgatcctagacttagctattggaaagtagctaagaaggtcacacggtatcttcaggggtaccaatgatcatatgttgacttatcagcgagctgacactcttgatatagttcgatttagtggtaccaattatgcaagatgcgtggatgataagaaatctacatcaggctacattttcatgatggctggaggagttgtttcgtggaaacgtgtcaaacatgcactcacagcatcctcaacaatgcaggcaaagtatatgtcttgttatgaggctacatgtcaagcaatatggttgtggaactttattttaacattgggtgttatagactctatctcgaggctgctgaaattgtattgtgacaattctacaacagtagctttctctaaaaatgctagaagtacttcttgttccaaacacattgacataaaacactattttactcaagaaaaagttgtcgagtctcttatttccattgagtacacgccaactacttgcatgttgaaaaacccactaacaaaaggcttgcccatatgtgtgtttttagagcttgttgctcgaatgaaattgtgaggagcctagcttgttgagctcagtgggagttttattattatgtattaaacatgctagtattttgtaaggaatgcttatgacttgtattcaagaacatgcatgatattgtagtcatttctcgctgttgttgtcatatttatgtatacatgtgttgtttagtgaaatgacatacagaaaaagagatgaatgcacatagtgttagaaataatagagagattacaatggaagaataaaataagatgaataaaagactaagacaatta

SEQ ID NO: 30330 - DNA, 2382 bp, Cannabis sativa
caacaaaactttatcttatgatatgatcagtataaacatatcccgaattcacatcatagttactcttattttagtattaactgctacttaacaatagagtggcaaagcaaaatacccaaataaggaaactttcacttttaaccaatcaaagcttaaaacccatcaaataaaaaacttacattcattcatttggctttagaattagggaaaaaaagttcaaaactttcatccaaaatagacaaatttaacatcatagtaactctaattctagtattaactgctacttaacaatagagtagtaaagcaaaatacccaggtaaggaaaccttcactttcaagtaatcaaagcttgagctacagagaaaacctataaaataaaaagcttgcatttctaaattcattcaatttggctttagaacaatttgttaggaaaaagaaaaaagttcaaaactttcatccaaaatagacaaatttcacatcatagtaactctaattctagtattaactgctacataacaatagagtagcaaagcaaaatacccaggtaaggaaaccttcactttcaagtaatcaaagattaaaacccatcaaataaaaagcttgcatttacattcattcatttggcttagaactattaagccaataagaggaatttgttagttagttagttatatctgtttgagttagtttgaggctgtttagttaaaagttagttacaatttatagctacaagcttagtataaatagcaaagctctgtaattcatattcacttgattaatgataaccttctcttcataattcttttcccatctaataacttaaaagaacagattgttaggaaaaaaaacactaagttcaaaactttgataaaaaatacacaaatttctagtactagctactcttctacttaacaataatttaagtaatcaaagcttaaaacccatcatacaaaaaaattacatttacattcattcaattggctttagaacaaattgttaacgaaaaagaaaacataaagtccaaaaccttaatccaaaatagacaaaattctatcaaaaacaacagaaaaatctcaccttttcaagttctttcctaactctcatccatttctcttatattgacaatattattattcaaagcatttagtaatttaagcattccaattacattttcggataaagtaaacaagataagttgtaaaatgctattattcttcatttattccattacatttctccgttaaattattccgattaacatgccattagtataaatagtatagctctgtaattcatattcatttgattaatgataataattactaaaaagaacaaattgttagagaaagaaaaaaacacaaagttcaaaacttcaatccaaaacagacaaaattccatcaaaatctaaccttttcaagttctttcctaactctcatccgtttctcttcctcagtctcctccacaccatcttcaccaccatcctcatcctccaattgactctgcaactcctcagctttcttctccaactctctcttctcttcaatctccttaactctcatccgcatttccttctcccaatcaaacctatcctcttcccaatctccgttaccgttaccgttaccgtcttcatcgctcgatccggcatcagaagaatccacaccaccgttaaccttagaattcgcttttccacgaaccaccactctctggctccgaatctctccctccgattcaaaacccttaaacgaactcaacaacgcgtgaggagactctcttctcggcggccagtccaaagccaccatcggacgaaccttacgatcaggtaatataggacgagaagaagaagctgctacgtcgattgagagagctaagttgccgaagaccaccaccgccatagtcgccggagattgatgagaagaaagagaattagggattttgtgattcccgctgaaaagactgttatatatggttgatatttttttgttttatgacgaaaatacccctacagtttattgggcaattatatctttttaaataattacgtaagacattatttaatataaaaatatattttttttatatttttacgattatttataaaaataatacgaaaataatataaaacaacatctaaataataataaaaaagtaacatacaaataataaaaaatcaacaaatgactaagagtaaaacataaaataactatattttctgtaaataaaatcataataatcgaaaaaatatttaaaattctttacaaccgtatttttgtaattttttttgtgtatttgtaaaatagtccctaaaattttttaattaattttataattatttaagacatcttttaaaattttatttctgaaaaatttaacacactgaaaaca

SEQ ID NO: 30331 - DNA, 1942 bp, Cannabis sativa
  modified_base (26)..(36): a, c, t, g, unknown or other
agggtccaatctgtaacttttgcaannnnnnnnnnncaaaatagtatttacccttaaatcaataataaaacaattaaaaagcaaccgtgaaataacagtaaaaacttaacacaatatacattataaaacttacacagtattttttaaagaaaaaaattctacctcacgataaaaaataaaaaaattgaaaattttattagtgtaaaattccaataataaataacttattttttttggagaggtcgcaatgtgaacaaaaagtaaaattatatatcaaataaaaaaaaaaaaaaaactttaactcttaaattaagagtgagacaataaaaaaaaatatattttagataaaataattattaaaatatttaattataaatattaattttaaaattattaaatcatgagatcttaatctaattgcgaataataaagttaaaatttgagttattatacttaagtcacttaactgaaagaaaaaaattcaaattttttttacactatataaaaaaatatttaattcaaacttaatatttttttatctttttctactgaattatttttttaacttatttaccgagtttttcaaaacccgaattaaaataaattaagacaaagaaaagtgtgatcataagtaaagaagacaaatactttcacatagtaaacgtgttaatgagctttaatctacgagacaatattattaagcgtatagctatagagtattatacacaaaagtattcttatcaaattttctaaccaaagtttgtaactctttgcataaaagtgaaaaaccttatttatatgttgtattcgggtcctcaggtagacccgaatccgttagggtttgaagtgtaaaatagtctactaatgagaaaaaattcattataatattgattttgggttgggtaaatgacgcccaatttgagggttgaccgttgtttgtacagtgatgtaccatttgatggtagcaatgttgtgattttatgccttaaataaaatacaatttcaatataatcttatttactatcaataaagatcataaattatatattgacattgttatatattttgttcatgattatatatttaaaatcaaggcactaaaccaatctaaatatttaatcaaaagaggctgctccacatagtatctaatgatctgtacaactataggtttcaaaaaaatcatcactgttcttgttgagatccagaggcatgttccttcacttttttttttttccttctcctcgcatttttcttcactctcgcaggaagtgggttagccttaattggtctacttctcttcttagtaactttgggctgcattatataaataacacataaagagattttcattaatatcaaacccaataaagtatcatataatagtcaaatagtgtatctccttaacaacttcattttggcaagttttcttagaatgtcatttgttgcaatgttgaatctcacccttgacatttttttagcacctggtggaggttcatcattacttctatttctctttctctttggtcttcgaggtaagactttctttagaggtgggagcatggggttgagcccagtttgaggccacttatctggactaggcatgggctttataataccagtatatgcaaccatgtatgcttcttctttatatcagtcatcaacaaaatcatataccttcaatcttggtgccaatatagaagttaaagcatggggacacggtatgcctgataattggaaagccctacaagtgcacactttcttcaccaagtcaactacaagtgtttccgttccttttatatgcgattgaaaacttaccatctctccagccattgctgagaaatatttcatggccactttcttgcgtttctcaataattagaaagatccttttataatctgtattctgccatctctttacctcatcccttttagtgttgaatctg

SEQ ID NO: 30332 - DNA, 1538 bp, Cannabis sativa
taagcttgacagagacaagctttgggacaggggcataggtttcattatagtcaattccctcttactaattgtatcccttggccacaagtctttccttgaatctttcaatagaaccatcagcattgtatttaatcttgtagactgacttgcatcctgtggcatgttggccagctggtaaactgaccacaatccaggtaccattatcttcaagagctacaacttttgtatctattgcactatcccatactggtatgcctcgagcttagtgaaaaaactctagttcaaagtggctcgaaatagctagcacagttgctcgaaaccttggtgacaacctgctgtagtcaattattttagagagaggatgagaagtagatgagtttggtacctgagattccacattattagtagaaagaaagcaatgataatcttgaagataagatggtttgtgtatttgtctagttgatatagtagtaacaataggttcaagcatgttaattatgtctagtttataatgtgaacaaacaggacaattatcaactttattgtcaaaacgattgttgctacaattagctcgagtattactagcaaattattgccttgtatggtcattagatttctggttatttttagtttgaggtatgacaattcctctctgtttctccttttcaattttgttggcataagccttgttcacatttggaaggggatcttgaagcaagatctaagaactgacacttaggtaagactcatttaggccaatgagaaatttaagcactttgtcttcatcttgatactccttgatagttttcattgtcccacaaatacaaataggttatggcttatatttgtgtagcagatcccataaacccttgagcttagtatagtatgaagcaacatcacttgatccttgggttagtgtatgcatcgatattaccctaataatctatattctaagtacgcggtcattacaagaaaggctaacaggacggacctcaccctggtcctcaattttctagacttcgacatctccagcaacatcttcagtatcctcactcggaggcctagcttgctccaccccatccatcgtgaatagtcgagcaaagtgagagttggactctgaagcctttcttagggtccgttttgtcttcgccatctttctacatttggacgattgatttaggtcagaagtgtgccttgcaatggtaacaagaacatctactatgacagtataactgatcgatggatttggtcggccttctagtagtgtatcaattgtaccaggtcggaccttgtacgtccacaaaataaggagatagcgtctccaacctttgtttaactcccagatgaattggttgtaaccttctccacttatctggtcagggtaccgtggatgttgcaccatgggctctgaagactcagagtgatcactactaacttcgcagtcgtcaaagctggaagttgaagagttttaactgcatgaagacgagtcggcaccaagttgatgatgatttttataaagaagttgaagaagatcctag

SEQ ID NO: 30333 - DNA, 2066 bp, Cannabis sativa
cagcgttaaggtgatcacgtagatcacccatgtgaacttgatatcgtcctccttgcagtgtttccaccgaacctgatctggtgtacctgctgggagtgcgactatgcgaggatgaggaggcggactcaatgtcgttgtacttcgtctcgcggctggggtttgctacgaggattacgtcgctcagggtcctcctctgtttgtgcctcctaattgtggttcctcgcggattggcccctcgatgtcagttggttcaaattaagtccttcctcattggccctccgttccctgcgagtacggttattacgacgtctagaattggttacctgagggttgttcgtgcgagtagtggttactcggagaggacgtcgagccctattttttccatcgacctcgacctgcagagcacgtagctgatcttgaattgcagtgtactgatcgctagttagctggataataccttcggataccactactggtgtgataggtggaaaatgtcccgttgtggctgccggggaagacatttccccagcgtgaggggtagtagtctcagggaatatattaagaggcgtcacattgccccgtcctactccgccgttgataacgtctacgggaggcaccctgcctcctgacagtgggacgttcatcatcccgtttccttggtttccagccattgtaattctccttttaaatcatcaagaagtattgtcgttcccacagacggcgcctaaggttgttgaaggaactttacaacaccaaaaattgaattataataataataaaaatgatgaacaagtgcgagtattcaacccagaatggcgagtactcaaaccgggaacacaaatacttaatataagattggaaaaatattgaacacgagagaagtatagtggttcaatcagatcactgtctgcttagtccactgctgtgaagattctgtcctttttcatttcacggcggatcaactcctttacatacaaagcaagtgtcctatcatttacacaaggattgcattcattgtcaatccgtttatacattgaattacaataattaagctaaaaaacgtaaacataataaatgaagaacaatttccagtttaatctactaaatacaacaacgtatgcgacttctctagtgcgagttagctgtttatattcctgcataagcttgcttagcatacatttgagactagtcggatctaagatgtctacgtctttgtaaagacccttttgcggacatcatataacggactgatagaaccaagacatgcgaatctatatcggtttatcgaggctgttgggtcatctggaccagctcgtgatatagagaattgatctctctgtttttgcaggaggatcgcgaggatactcgcatatatcgtgatatatgcgggctattgtcgttccttggtcctacataatgcgagtcattcgaatgcgattagactcggtcatattcgcatcatctcgctgagtttggttcaggcaaggtctatactcgaggagtctctcattgacagctcagcttacctcggggaaattgaatacacgtgtccttttaaataggaatctagtctcgagtttttaggtgagaaaaatctcactataacatttgtgataaatattcaattagaacacttcttatttccatccactactatgtactcttctcaataccttgtcaatttctacttattaacacatcaattcctcttgataatatctagaatgactactaattctgaatctttctagcatactttgtcctcactcatacgctttctgagatgactccccaaaatattttccatcttgagattacccaaagttaagtatgtttaactccaaagtaagctcatggtgggttattaaaaagtagatgcttctttgtcgtcctaattatatttcttgcttttattctttcattaataaaattcaattgccatcactccctttattaatctcttgcaattcctcatcaattttgttcacttaggaggcgtttggttgggaggaatgaaaatattggaaaaggaatgggaatgggaataggaatagtaatggaatgga

SEQ ID NO: 30334 - DNA, 1700 bp, Cannabis sativa
atggttttttaactctttttttccaattttctttagtagtttccttctaccatcttttcttccccttaatttctacaattaactgctcccttcaatccaaatacaaagcatctacctaggtttgcgtgctttatttcatcgtaatggacccttcaaatgacaaaatgaaggtaaagatcacactcaatgaggaagaacaaacagtatttgaatttgattttagagaaccaattgactctgaattagtactagattgtgttctgtatgcacgaatattgactacaaagaaggtatggctttctacactacagaggcaaatggttgaacattggaataagaaatttcttgtgataatttctgaggatgaggacatgtttgtgctcactttcaggtgtgaaggagacaagcaaagagtcttgacccgagaaccatttcatttttagaatcatcatattgtgatttacacgccaaatgttttccaaaatatctcttcatcgaatcttatttattcgcctttttggattcaaatttacaggctgccatttatgagcaaaaccaagaagttggctgaggcacttggaaacaaaataggtgaattcattgaagtttttgaagactcactttttgaaggttgtggtccattcttgcgtattcgagtgaaaatagatgtcaccaaacctttaatgcgaggtagaatgatcacattgtctcaagtccgagataatttttaggtcgaattcagatatgagagacttcctgaatatttcatggagtttgggagattaggccatgatcctttcaataagtgtataatttttcttgaaaaacttgaaatggagaggaacccgaacttgaatataggcctacaactaaaggttcaacacttccaacctctaactatgatcgatatagaactgattttgcaaaaggaagtgcttagcccctactcactcgtttggcaagaacatctctcactttgacaatatcattactcaatggaagatctcaattgaaaccaaggcttttgtttcaaggagaatcttctcaacatcacagcgtacaggcaaaacacgttaatatttctggttgaaactcaaaccagatggaattgcaacaaatttctaatgagaaaagtcctactggtatgactacttgtgtccctattattcaaagctcatgtctcaatgcacctttggacaataccatggatgtctctgaaaaaccaaaaaactagaaagttatgttcacaacagcaacattcaaaccagagaaacgttcacaccagttctttgccatgagttccactacaccgaaggtgatcatcctccaactactgctccagaaacatttccaagcatggaacctgatacatttactgatctaacaggtatttatattcttatatcaagacatggaaattgctttaacacaattgcaacttatccacctctacctaaaaacattatggcacaaaacatatgtactctgagtatgcctcttaccaatgccactgcctctccatctcttattgtctctactcgtatggagaaacaagggaaggaaaattgttctcctaatcgcaacccaaagaaacaacaagaaagagattcacttagagacattcttaagaggtgtaggggtaatctgtagggttttatgccctaaataaaactcatttctatataatcagatttccttat

SEQ ID NO: 30335 - DNA, 1989 bp, Cannabis sativa
tgcaactccactctattttgaaccaattttgtcaaagtggcaagttgttcttctaatcttttggtattgttatcctgaaatacgcacaagatgttgtggcgcttctttgggtgacacgtagataatttttagacctagatggatgaaactatcgttggcataccatttagggtggattatccatcaagaattacttatgtaagaataagacaaaagtaccgcacatggtaaatatcacaattcgataagagtcgattctaggagaacttcacatgtgctgcctagggtaaatgcaacaatgaaattctgggaaattgtttcctcttttatttatcaattaaattcctattttggtgggatttccgcatgtaatgttgtaatttaggaaagtaaataagttaccccatttatttctttaattcttttgaaaaatcttattgatgtaattattccctataagtagtagagctatttcaatatccatggatttgaaataattcatttagaagagtacttaaactactaaaatttcactaaattctttttgaggatgatcaagaatttcttgctttttttctgacaagttaatacaagtaaaagggagtaggctattaccactatcacagggtcgaacctctataaaaaaatttgtgtttttattacttaattagtattatttactacttcttaattgcttaaattgactcattatcattttctaaaagcgaggtcaataggtatccctatttggaagctcacgtccacgaattctattattgatgtgacctggagattattcccacgaggtctcactttgtctctcttggctttcttacgtttggcatcaaggcacatgtagtggtcaactgtagaccaactgtcctcaggaaaaatttcttctatcccatcatcctaattaaaagaatcattacagtattttttcttcccttgatggtaggccttcatactagagcactgggcctattggtatgctcaacttatctttgcgtagcagaagggcatccaagctcagaggcgtttgtggctttctttgtccgcaagtgctggttggttgtgctcatgttgtttctaggaggtaacatgacggtttcaagttaaggttcccctactttttccttccccttgtcctttacaagagctaaggttctaacatcaatagggcttaatcttttttccctgttaacaggctcttttagagcatcctctttggagtcctcacctatagtgccaagttcggcatgcaatcatgccatcattttctccattttcgagaaaaaacctcttgttctactagcttccattgagttttagctaactcactagatactcggaccaccttggggtcttgtttgtaatagtatccatctttgtaatatccatctccgatctgaccatcatctttttcctcctcttcctcttcttctgggtttttcttcaaattgttctcattgttgggttgtttcagttgttcagccatcagtttcagacatttctatgtccctcacatggctcgggtaagcatgccttggagggggtggattaacgtcgtccatgatgacatcctagcctgaaggaagaggcttactcgataatggttgttctagtagccacctttttttcatatgcgaggtagattttattctttctacaactctcaatgaaagcaccaaaatatttattgagatttttaaaaacttaattatgtaagagcttaagaaactaaatgattgtttaagtaaaagagagagatttttgcatagttcggttattaatgaactgtaatccacgagtcagtgtatttgccttatgaggctttaaatgtattacaaataggatttgcaacttgaagaactctagttcttgctatagtatttttctctcaaggtttctcttagaacaagaaagcataaagagaacttcgaagtattttttcttttctgttgttcttcgtcccctgtacatgaagtc

SEQ ID NO: 30336 - DNA, 1244 bp, Cannabis sativa
tgcttctaggttgggcttaggttcaacaatctgcttaaacccaaagaaaaattgtgaagattgatcctcttgctggatggttttggcttgcacgaaggggaagaaaagatggagcatttggtgccttaatctctaagtcacttatcaattacacctaaaaaagaaatagtccccttttattcaacctaaattacctaaattaaatataaattcagcttatttaacactaaaggacaaataatcactaatccatgaaatacccataatgccatttcgtaattaaacttaaaccatttaaaaatttaggggcattttagtaattttaactaacccgtcaaaccgacattctaaagttctaaactagtccagaatactcccaaaataatccatccttaagtgtcgtgacatttctgaccactctgcccagtttccacggtcgccaggtccaaaaatattttatttcagaaatagtatccacaatacccacatattccaataaaatctttgtaattaataaattatgctttatttgatcatttaataaatccacactaattaatctaagtaagattataatcttatttctttaccaaaataattacatatttaataaaatatgtctaattaaatatcatattatttcctgggatattacacgcggactccacaaaccacatgccttaatctgttcgttaattagataaattgtcaaatttgaaaaaaaaaaaacaatagagacttcatgagctgcaaatcgtagtgttcctagaaaagcatacttcaaattcttaacaatcaacgagttgatcataccttcttttacaaacttaaatgttctctatattttctcattgatcataacaatattataattggaaagcatatatttattgttgtatcaattttttttattgatttaacatttttatttgtaattctttttcaacttttatattatacaatttatttattttactaatatttcttttagagttatttcactaattttttttaaattaccataatttaatttttaaatattttatttttaaactttatattttttttctattcatatctgaattctttttattctgttgacgttgcaaatgactaaaatcaactcactagattggcgagatgaataatgagtttaagtaaaaaatttagagggacacacacaatttatagtagttttctcccagtgtcatgatggtaatggagctacgtctacttcgagtttt

SEQ ID NO: 30337 - DNA, 981 bp, Cannabis sativa
acctaaaaacaaaaaaatattatataaattggtcaaacttaaaaatatcatatttattatttaacataaaaattttaaaatcccgtagtaatagtaatttcatcttttcctattttaattacaaatttatctcaccattaactatttacaaccttaagcttaactaatcaatacatatgcctcctaatcaaaatcaatacatatgcattctaaacaaaaatctttaccacaaaatacatgaaaccaaacccaaaaatcctgattcccctacccaaaagaaaaatgaaaaacaacaaaacactgataaattcaacatcaaaaaatgaggaaaaaaaaaacattaaaatcgatatcattctctgctatcaatcatttcataaaatcaccaaaaaaaactaacatcataacatagaaccaaattattccatctacgactgctccgatttcttactactttcgattattgagaaactgtacaattaatcataaaatcgatgcttaaaatcatgttttatgaaaacattcaacctaaaatcgatacataaaataaaaagcatttcatgtaaaatatgagcaccaaaaaacttctcctaaaacgtttaggaaaaacccataaaataaaaaaagaaagaaaagtaaacattagcaataattatatgtttctcaacaatctgccaattaataaaacttgcttacatgtcgctttattattttcttataaccgcaacgaggtgtgaccatcggtggtgacattttcggtgtcaccaccaaagaaattttatgggagcgtttggtataaggtgtttaaaataatttgattataggaaaatatgtaaattgagtttggctatgtagggtgatatataatcatgttcctgttaattaaattacattatttggtaggagtgttcgcggtgcgagtattgtggcttttgactatttttcccaaccaaccttcacatgcaatttttttaatttctc

SEQ ID NO: 30338 - DNA, 2265 bp, Cannabis sativa
acattgatagtagtaatagtatacatagaattgtactgattactgataaatgtatgttggctgaaatactgatcgatgctatcacatcaatatgactagagcatgactagcatattgagtataggttgacattatggtcgatagtattttcgtatgaacgttctagactcagtaccgcgtgggacacagggatagggttatggttgggtgtataggcgcctgattataacccgggatgttattatgttttatgttatacttttcttgctgagtctgttgactcacagttgctatttccatgtgtaggtaagggcaaagctaaggctgagcagatggagattatacatgtcggggcagttaggcctagagcgtacgatctttgggacatcaggacttttgctgtatagtcgctaggcgacagactattgtatatgtatagttaaacttttgtaaaggtttttgtaaacgggatctcgaaattttatatgtatgctattttatgtttttaattagataagcaaaattttaattaaccacaatttttgattacctcgttgattagcaacgagctgcacagtaagttaaaaattactctaacatgcctaaaatagttagggtgttatattttggcattgtaagtttttaacccacaaatttaaaaaacgtttgtgtattaatttaattgagatatgactaatccattgtagtatttcctcataaatctataataaaaagaaatcgttcaattctacatgcttctcttttgaggggcatctttgaccttaaaaactcattgttgcttaatttataactacatattaatgttgcttatgaaataatactaaaggtatctctacacattttgaataagttcctaaagaagtaatgttaacactcttatagaaatattattgtgttattaatttcttactctataaatttaactaatcattttggatatactttgtttgaggggcatctttgactttgaaaattcattgttggttaatttatagctacatattaatattaatgttacttatgaaataatactaaaagtgtctctctacacattttgaataagttcctaagtaaataatgttaacactcttatagaaatattacggtgttactaatttcttactctaaaatttaactaatcattttgcatatactttgtttattttagtttattcttcaagagtatgaaagttacccccacataagcattttctattagtttaatcttttgattgcaattttatatatattcagttaggtttatttttttggcttgatattttttttttggttgggtttgattgagtagtctcagtattggactctttgccatgattattaggaatagtattttgttttgtgtatgactgataagtacggatatttagcacaagtttgagaagatatcatttaatggtattgattaaaattcaaattagcacatataaagtaaattctttcattcataatattaacaaattctttgatttctataatagaatattggatactcaaaatttaagaattttgctccacaatatggatagggtgtttgttatctttaagaattaagttgatcatactacaaaattagtcaacgatggcatacccaacaaactattggaatatttaggtgatcttgaactactcttttatatttgttttatcattctgagttcactttttttcatctttttttcatctgaaacatgttattttacttttttttttttttctaatttgttaatttttatttttaattttaggtgagattaacaactcaacagttatttgtttaaaatcttttcaattctcttaacaaaaatagcaataattactctgataaagttatttattttctcttataaatatatcattagttagattggttattcaagcatccaagcatgatattttacatttttttttattttatctctaattcttagattttttctagttttagatgaggtttaaagttatcgtacaagacaaagaattagttttcctacaattatttccttatagaaaaaacaaaatgtgaaacaacattaagattaataattgtgactaataaaagcatatgattacatttgactaatcaaatttaaaaacgaaaatacataaattttatagaattgaataaaacattgatttcattaaaaaaaaaacattaattacctattatatcacattgttccgtttatatttttttttcagattttttaaatataaatgctcttt

SEQ ID NO: 30339 - DNA, 1430 bp, Cannabis sativa
ttcaatcttcaatttttctcaagcatgaccaaggaaagaaattccctccactgaagttgattgtcatgtctgccagtttggatgcacgtgtcttctctgattactttggtggtgcgaaagctgttcatgtccaagggcgacagtttcctgtggagatattttatacatttcatccagaaccagattatctagatgccaccttaattactgtattccaggtttttgttaatatcattctttgctttggcatttgagtcttctaagttcttttcaatttgacaacatatttggctttgactttaagaagcataatttatttgtgcacatgtgggctacgttttatgtagcccatattatacatggttaatcgttgaaattcttatcttttcatactccgtaacccatattatttaactattgttttaggaagtctagctcaaaagttgctcaagtttgcattagatattttaggacctctaatttgttatcatatttttgccttgtcatgattttgaaataagggttattttcttattgtgcattgctgcatcttgttagattcatctggaggaggcccttggtgatatacttgtatttttgactggacaagaagagattgaatccgttgagagacttatcaaagagcgagttttacagttacctgaaaacaatcaaagactagtgattgtgccaatattttcatctcttccatcagaacagcagatgcgagttttcgcatcaactccagccggatatcgcaaggtacttaatacaaagatgaacctcactgtggattgtattcactctgaaactctgatatcccaaaatttatacttacaagagtggctgaaaaatctccatgtcaatttgatttttgcaaaattttatgttggcattttggtcagtaccctcgcacttcattatcattattgttgctgattccgttactgcaaagtagtcacatcttaaatctactgctgtttgctgaaattcacttttgtgcaacccaatcacatatggcttactatatttctaaaataataaatctataccttatttttccgagtaattgttagggttgatgatagatgacattatacctattcatttgtcttaggtgatacttgctacgaatattgctaagacgtccgtaactattcctggaattaagtatgttatagatccaggtttggtgaaagcacgatcgtatgatccaaagcaaggactggaatctttgactgttgtaccgatttcaaaggcgcaggctcttcaaaggaggtatgaatgctgagggacagtatactttgtgtacgctcaatatggtatttaattttcttacacttaatagggtttatttgacaatcacaaaataaagcataagttagtttgaaattgcttattaagcttatactgataccctgtttagaacc

SEQ ID NO: 30340 - DNA, 3032 bp, Cannabis sativa
ctggtaaaataattccaacacagcctggcctccacaggggcctggccagctaggaggtgctctgcagggtttcctatgcacttctacaggtggacaataactctgaggctacaaatcaggccctaaaagcccgacaaaataactgaataatatatagattcaatgacattttggtcttttgtaataaactatctagggtttaggcctcctatatattggccttaactctaacctagaaagcctaagctcaattaagccaaacactggcctccaagttctaagcgtaagtttgacaatttctctctttttcacttcctatctcacacgcccatacaagcattatctctacgcttgagtttttccattcttgattcataaattatatccctaagggtgctatagtagatcccctctatagttatctggatagtattaacccttggtattaatacaactaaaaggggagtaggtcattacccgctaccttaagggggctgaacctctataaaaaatcttgtgtttattacttttcattcttgtttgtgcaaatgcatggtaagcattggatctacatgaccctactgtcggttgatcactttttaaggtcaacagtagtagagatggtagctcgagtgtgtgccattgctatgtacttgaaaatgtaatttgagtttttgaagcttcaaagtgttacatctgataccatattagtttgcaagatgacggagaagaagatctttattgatattatctgaatgaatcaattacaatggcatgaattatatttatagagaaagcaatgagaggaaccgagttatttggacaaaacaactctaactaactctaacaaattctgcctaattcctatatcctataataactcacataactaactaacaaccaatttaatacaagttgaggagttgaaattaatgttttgttttttttttctgttattttgtagttgtctttttattgttttatagttctttgttaggttgctctagagtagttttttagctgtcttagttgttttcaagttgtttttattttattttattgaaacagttatcccaatttttgcactctcacttggcatcacacgatggtgacatgtggatgtgtatctgctcgcataagatgtgtcgaacaaggcaccgcatatattcactcggacaaagccttcttaactgggtagtgagcagtctgaacaacacgccaacacttagcgaattcaattctcgcatcgtgagtcaccaaaggaatcccaaaaattttgggagtagatcacaaagatatggaaagtttttcgaatgccttgattagtgtattctgtatttaatatgcaatctttccacttatatcaattgtaatcagaagggaaattcttccctcccaagcttatagccctataaatagtgattcatactcactgggcaaaaggggaaaaaattatctaagagttaatattccaagatactattgtaagagctctaagaaaagggattattttcctttttcttaagtcaatacaaaccaagaggattaggctattaccgaactgctcggagctgaacctctataaaattctcgtgtttttatttactttattatattataccatattatactacttgtcgcttactatttagactcactatcgtttgctaaaagcgagctcaagatattggtgccttcattgagagttgaacttaagatcgttctcaaacctaatcacaaatacaatggtggtacagactcgtggaggcgtggttgatccggcgaatccacagcgatggatcctgcagtgtagaacaagggaacacaagggttccaccaaccacaaatctcgaacaaccctcgatcatagctcatggtgtgataactcctgtgagtacaatcgcggctggtgtgcaagagagtgggattaccagttcaacagttaatcagggaattctcaacattgtcgttccgcccataaccaatgtttgaaaaactattagagatgagaccaaaatctaaaacatcggtgctgctcttggagtcatgcaaggtcataccaacaccctggatcacgatgaggaggagctccgtgccgcggtaaatcttgcatttgaagagaagaggtgcatgttcactgaatggagggacaaggagatggaaacattaagggctcaacaagtagccaattacgaacgaacccagcatcccaccgtgtttatttgaaaagcctatcaggctacaggacaacagcccgtaatcataatccccctgggcgagacaaataaagatgcagcagtgaacacctctcagtctataaatggtcagccgtccaatccccagtcacatgtcccacttgtgggcggcggtaggcaagcagaccttgtctaacaattcatcaggagaggttatacctaatacttccactcaggttaatggtttctgccagctgatgggccaaaccaaccagtcactgagacagcccggtgattctgtatttaatcgtttggggatagttcatgatctccgagatgatctaaacagaaggagaggggtagacgacctgcatgacgtaccagccgttcatcccaaaacccgcgctcaaaatctcgctcaaagagatgttgacgcgactctggtcggccaagaggccgaacaagttagtccagccgtgcaggcacagttggatgaactaaaaaatattttccaaggcctggcctgttagaggaacaatgacctcgagttggaccgagcacgtggatcccctttctccccagagattaatgttttagaattgcctcacaagtttaagatgccaacctagaagatgtacagtgggaaggaagatcccttatcccacctcagtgtttcgaaatgtaaatggacctgcaaggagcaagaggagatgtatgttgcagaatttttcctgacactctctcagaggctgcctagcaatggtatttcaagttggcgcctagaaagttcaactcgtggaaggctttctcctcggagtttcatgcacaattctcttc

SEQ ID NO: 30341 - DNA, 5871 bp, Cannabis sativa
caaactcacccgatcctatcaaatgtaacaacctgttactaacatgtttatctggaggtttgcttaacaagtagttagtaaccaaatgcaacaccgccatcctaactttaaactcatcatctttgaaagtgctattcagaaaatgctgcttaacagctccatgagtcacaatcatatcactaaagtacttgtctacaaacacatctccatttctgacatacttaagcatatcagtatcacccttacacaacaaaccactaataacagcaaactcccctaacccaaaatgaactctatcacgaccaaaatcgaatcacatatctttagaatttggttgatggacttccctattcaatgcagtgtgaaaatatgatgttgcaatttataagagtaaatatccaataaatgcccaaaacaagttgcaataaacatagcacgctgcttctcagtcaattttgctctaatatctactaaaacatcatcattatgagtccagaatatggttttaccacaaaatatttcctctggcttcaagtaaaattcccacaactgcaacacaccaaaaaaaaaaaaaaattagaaactaaaacgtataacaaaacataatcatgaagccaataaaataaaaattttactatataaccattaaaatctcaaaaaaacaacaaaatagaaacttacaccacatacaacacatgaaaaaaacacctacactaaaaacactcaagcaccagccacaccattttacaataagacactaaatagaaacttgccaacacaaatacaacatcatataacatataaaaacattaaaaaaaaactaaaagattctaaaccaaatacctttaaaaaaaacaaaaacaaacctctcatattttattgtataaacagaattcataatatcaaaacgttacctattttacaataagaaactatatagaaacgggcaaatacaaatacaacatcatataacatgtataaacattcaaaaaaaaactaaaaagattctaaacaaaatacctttaaaaaaagaaaacaaacctctcataatttatacaaatcaaaactaccaaaactcataacatcaaaacaaaacctataaaaatcttaaaaaaaaaaatgataataagtaataaatataaacaaaacaatcactaatcaactagtaaaaataaaaacaacacatctttacaaaaaaaataccaaaattaccttagctttcgcaggaatcgcaatactactttcatcgtcagattctagaactccttcatcaacctctgccacactattcaactttagcttctttgatttacgatcatcaggagaaatatcaagcacacgattctttttcttcgacaaagaactcactgaactctttttcacattctcagcaactttctcgtttattttcttactcctctcattctcaacatccttacacacagaatcattactcttcttactcctcctctcattcacaacatccacacccacagaatcatcactcttatcatcacccaaacatattttcctcacattgcctccttcatcaccaacatcttttctcttcaaaccagaaggtgatggagaaatcgagcttctcgtaatcaccatagcaacacattcaaactcttacagaacaaaaaacaaaccctaaaatcaattctaattcgaaaacacaatgaagaacaacaaagaaaaaaataaaatcaaaatgaaatgtaaaagaaaagatatcttactgattcaactcaaaatatatagagagagaagaaactgaaccgtctgagatcgtgagtggtgaagcaatgggagagaaacttgagtatgctgatcaatgagagagaaaaaataaggaaaaagaaagaaatgatcgtaactgattgggactaattgaaaaaagcaatgatatatagctaaaacctataaacctgtaatacacatataagatatgaagaaaaagcaaaacagagaaaacggtaggccaaattcgtaaataagtggaaaataagattctttggtgcaaaaatttcttaaatttatacgtgatcacatcaatagtatattatgctttaaagcctgaagccttgccaattgagctttaatttatatagtgcaatggtcaacttagaaattataatgaaactaaagttagacatgaagagcccttatagctcagtggtagagcgtcagtcttgtaaactgaaggtccgtagttcgatcctgcgtgagggcaatgttttttttcgttttgttttcttctttactaagaactaattacataataacatgatacatcataatctaatcatctccataagagggagaaacttgcatttaattttcatgaagacaagttacagtttacaccaccaaaaccccaagagttagaattgaaaaacaatactgaaacacgacaaaacagaaggtggttggtcatagtgtaataataacagagcagtggtagtagtaaaagtacatgatgactccatttttttcttttttttttctttctattcttttctcccaattcaagtatcaaagaagaagaatacaaaatatgaaacaagttgcaattactagaggttggttatcaaagttttttttttggttaatttttttcaatactcagctagaagttgtgctgcaagaacaagttttcttgaggagaagctggaccaatctcttcctccaaactcctcaacccgtcgttggcggagtttttggcttccaagttctttccctctaagtctgcctccgacactgaggattttctcctctgagaagaggccacacttgggaaagttatccatgatggagctctgaactcaattctttgctcttcgccttctactacatcggtttcggatgctgatctgtttgaagatctttgagatggtttcttgtgcagcctactactccccaaaaccacctcagttggtaaaatcggttgctcgttacatgggctgcccattaacagtgctagagctcgttccaatgatgttgtcactttgtccatggatggcctttccttacctctcattctcacacatttacaagctacatttgcaatccttttcaaagcttctacatcagatggaagctttaaaacaggatccaaaatcgctgttacgtctcccgattttatcagaggaactgcccattcaactatgttcactgccctctctactacatttccttcttcatattgcatatgaatagctttcttgccactgagaatctccaacaacaacacaccaaagctgtaaacatcggatttggttgtaagataatgaagcctgtagtactcgggatcaagatagccaagtgttccagctggaagctcaggcaatggtgagcaactatccgcaggacccagtagtgacagaccgaaatccgccactcgggcattatgttcttcatcaatcagaatgttcgaagacttgatatctcgatggattacaggaggacaggcatagccatgcaagtattcgattcccctggctgcctgaactgctatggttactcttctaacccaatcaagttgttccttaagagctatgttcttaccatggaggtgttggtgcaatgatccatgagccatgtactcgtaaacaagaagcctttcctctccctcctcacaatatcccagaagattaagcaaatgggcgtgatttaatctcgagagcaggtctagctctgtatggaactctttccaactcttctgcatatttggagacataacggctcgtttcacagcaacaaccgtcccatctttcaaaaatcctctgaaaacatatgaaaaacttcctttcccaactagagaatcttctttaaaaccgcctgtggccctttgtagttcatcataagtgaacatctgagccctcctgatcttcaggtcatccaaatcggggcgaatcctaccattgtctttctggaatgaagtactattccggttactcttcttggacttagtgtcttttgttgagcactgacagtccctcaacttgtaacggacatacaacactgcagttaaggacacaacaatcaccaagaacacagcaaacgcaatctccgcgatgatgacaggcaattgcagcgaccaaaacctttcgttcttcttctctgctagagcgttggaatacgaagaacaattagaaacacattcagcagagttgcatatggaacagttatactcacaatgcctatcaaaattcaatccgcattcagtcttctcatacatttcagctggacaaccactgctgcaaggcaaacaaatcctagaatttggatctttgcaagaggcattcttatggctgagttcatagaaatctggagcacagggtgtggacttgcagagtccaggagagacagccaaagggagagaagtaggaaaaccagaaccccaacaaacgggcaacagagatctgtcagcaagaatcccacaagtgaagtaattcccagcaataatctcataaacctttatgccattaggaactgaagtacttggtttaacaatgaagccccagcaaataactccccggtcatagctcctaatcccacaagcatgaaactttcctccaactacagaaagcattgggtcgtttggtgccaaatctacattgccttgaccaggagaatgagcaactgagatctcttcctcaatatccaagcttcttccccaacaaaaggctctagagttcacaccctccaatatcccacaaacgtggtaaccaccagctgcaatcttctgaaacctcatctctttggggatcaaactgctaaccctgctgctagtttcatcaccccaacaaaaaacagtcctattctgagcaaataatccacaactgaattctgaaccagctgagattgagtgaatctgaccatcaaactcatagttttttgtcatgttatacccccaacagtcaacaaaggaagtgtttctgcgctttccagtgatgggttttcttaatccacacaaatggtaatccccagcaccgatttcaatgtactcaactccttcaatcataggttgtggaacacccatttggatatagccactactaccccaacagtatggctggttagtgttcataagaaggccacatacaaatccatcaccagctgttagaccaagaaatggaaaacgaactggagttccatttgttatagctgagtttgacccgtaacaagctacaagatgagacccatctgtttctaatccacagaagacagcacccttttcaccataagaaactgcaatcgaagacattgaccctagccctgaaactgagcaaaccaaatctgataaaactagtaggaataccaccaaaaccccagctctccatgtgcttgtattaggagtccagataaggaaacctcttaaaatgatcctcattttaagctaataaaagcaaaatagagcttacagagaaggcaccagttctgggattcgtctaaacatgtgaaaccgccattaatgtagtttacttagcctttcctccatgaaagtagaatgaagaaaaggcatgcaatgcaaattatatccccataaatgaatgcgaaagtaaaagcaaaacgtcatgctactaactaaccaacgcaaaacactacaagattcaaaccagaatacaccccattctcaaagcaattcccagcaacttcttctgttcttcttcaatacccaagtgaaaaaaaattcatactttcctctctttatccagcaaatactaacacttgcccatcaaaaagcacataaaactgaagtcaacaaccaataagaataataaacaaaagcttcccagatcggtttactttgacctcggatcaagaaacaaaattcagattacttttgaaagcgctctctctctc

SEQ ID NO: 30342 - DNA, 2015 bp, Cannabis sativa
  modified_base (1061)..(1070): a, c, t, g, unknown or other
gcatttttgcaccaacaaaagtaagttttcttgtagtgtgagttgtatcctggttgcaaaaaattggccctcaatgcgcttgtaaagcttatgcactgtaaggttttgaataggtagagtaaccactcttttgatatgttgctgtctatcttgattgaactatttttggaggaaataaaatgaccgaagttgcactatgtgtcaaagatgcgattgcacaatctaggtttgggttacgactcaatagatttgtgaaagtataattatgtcattttttagagggagaatgagaacagagagtttttccctacatgtggaaaatcacgttcggtgaaaaaaaaggtaaggaaaaaaggctcctcacaaagttatgcagtacttcccactcacaccgagactaaaacgattatattgctcaattcacaccattgagtacatgtgggggcattactcgcagagactcaaagaagacaatgtgcttaggcatactatgaatgctaaagaaaggaagcagtttgaccgacttcatccatcttttgttgtcaaacctagaaatgtcaggctcagattggctactaacagttttaattcatttgagaacatgagcaactcttatagccggtggctagttatttgtgtcctatataatttgcaaccatggaagtgcatgaaatcagaatcgttattcttaaccttattgattctaggtccatcatcttctagaaaagtcatggatgtgtttctgagaccgttaattgatgaactgaaacaattatgggagacgaatgttgaagcccgagatgcctacaatagaactgtattttcaatgtgtgcggtagtgttatggacaataaatgattttcctgcttatgctctaatgtctggttggagcacaaaagagtacatggcgtgtcccacttacaatgaacacactccttccattggcctaaatagtaagattggatacgttggccacatacattttctcaaaatgaatgatccaagaagggaaagtaaaaaatacgatggtaagcctgagaagagagcaccacctcctgtannnnnnnnnnatgatattttatctcaattggaccgaattcaattttgtttgcctggaaaacacgaacaattcaggggtgtgaaatggaagcattctattgaagagctaaattggtcaaaaaagagtatattttttgaactagagtactgaaaaaaaatttacttacaacataatcttgatgtaattcacattgagaaaattgtgtgtgacagcttagtaggtactcttctaagtatcgatgagaagttaaaagataccgagaaggcgagaatggatttgcaagacttgcaaatacgacgtgagttgtggttgtatgaataccgaaatgggaaatggaaaaatcctccaactagttacatacttttggtttaagaatggattgaatttgcagattttataaagactgtacgatttttggacggttttgctgcaaacttagataaaaatgtaaacttggatatcgccaagatttctaggttcaaatctcatgattgtcattttttgttataacgtttattatcggcaggtatccgtaagtacttgaaaaaggaaatccatgacacaatcattgatttgtgtgtgtatttcaaacaattatgttcaagaacacttaatgttttttatttagaaaaaatgcaaacaaatattctaactattttgtgtaagttagacactattttcccactagctttctttgacataatggttcacgtaattattcatctccctaaagaagccatactaggtagaacagtgcagtacaggtggatgtatcccatcgagcggtcaatgtctgtgtacaagcaatatgtcaggaatcatacccattcagaatgatctattgttgaatattttgtggatgatgaagcattaacattttgttctatgtacttctgcgaagtggaaactcgattcaaccgtcctgaatggaacaatgacattgtccaaaacatgc

SEQ ID NO: 30343 - DNA, 1025 bp, Cannabis sativa
caaaaatgtggaaaacaaatatggataagggtcatatttaatataaggcagacgtacttctctcattttttcaatttgctccttacatccaccaacatcattgtaagtcacatctggcttctcttcaacagtcatcatggtcacactgggatcaatttttggcggcaagggaatctgaatctgatatttgtttcgatcaactctgcagtaaggacacaatgtcaaaagtttgacacaataacaatagaagttgcatgaaatatattactgttgtaccaaataaagtaacctacccaacacgcatgccttcttctatatcagttggggagactttgtcaccaagaccaacaacaaactgtaattttgaaaatagaaatacatattaaatataaacaaatcttacaaatgatggtgaaccagacaagaactgtctatgagaacacttaaccaaaatcaatcaactcctcagagaacttaacaagatcggcagttatttaattaacagacacgcccaatataatccacatttttgttcagatggttctgaaatataccatgaataaaatgcagcagaaacaggcacaccaatacaaattactaaacaagttactataccaaatgctaaagtccttggaacaaaaatgaaactattttgaaagaaatcaacactcctcttagattaatggatttgcactaagtttcaaaaaagaagggcctgaataaaaattacaaataacagttgagagaaacaatgtacctttgcaatttgcttaacattaatgacatattttgcatcttcggtgtttggattaattatctttgtacatcttgctacctgattgatatcccaacaaattcttagaatccattatacaaacaatcacatacactgaaaatacatacatgcgtaaaaacagcacctgaaggggttgctcctcctgcatcatttgcttatcagaaacaagatcccactggctaggtgcagctaagccagtatcagattctttaatccctgtaatgagaat

SEQ ID NO: 30344 - DNA, 3254 bp, Cannabis sativa
ttttttttttggttcaattatggcgattgtgaccggagatcggtatctggagaagcttgtgaagtttgttgaggaacaagctggtccattgatcgaaggaacaatggttttgaagcttaatccggcgggtcttcactatgttcagtctcgtctcgaggctttgtacgagcttgagagtcttttggctggtgctccggttgattatcttcgtgcttatgtctctgaccttggcgatcaccgtgcgcttgagcagcttcgtaggattcttagacttcttacttcgcttaaggttgtttctgttctttcgcctccgactagggacccgactccgctttcgcttttgccgtttgggaggttgagggttttggagcttaggggatgtgatttgtctacttcggctgctaagggacttcttgagttgagacatactttggagaagatcgtttgtcataattctactgtgagttttttgatttttgttgttttggtgatttgttgttgcttgtttggttgatgagaaaatgtgggaaaggaaaaagaaaattgttgtatgaattgaatgcaagaaaattgttttttttttttaattgttctttaatgatcatacgttgatagaaatctgtgattcgaatgttaatcatttattattctactgtgagttttgcttttctgttttggtgattgattactttttttttggttgctgagaaaatgtgggaaaggaaaagaaaaatgttgtatgaattgaattgaatgcgttgttgttgttgttgttgttttgtcttaatttagataaaatttcatagtttaattattctttaatgataatttgttgttgttggaaatctgtgattcgaaggttaagcatttataattgtactttgagttcttgtttggttgctgagaaaatgtaggaaaggaaaagaaaattgctgtatgtaggaaaggaaaagaataattttaaatattctttaatgatcatatgttgttggaaatctgtgattcgaagattaagcatttataattctactgtcagttttgcttttttgttttggtgattgattactgtctgtttggttgctgagaatgggattggaaaagaaaattgttgtatgaattcaatgcgttgttgtttttgtctcaattttgagaagatttcataatactttgctgagattcgaagcttaagcattaataatttaaatgcttttgaatttattgcttatttaaacttcaatttcagtttgtatgaatcttatttgcacctttttggtaggtttgtaattataatttggtgttatgttttttaattttcttcttttgggtattttaggatgctgttttgttttttggtgatttattgtctggttggttacagagaaaatgtgagaaaggaaatgaaaattgttgtatgaactgaatgcgttgtttttcgtctcaatttatttaagatttcatagttttaattattctttaatgataatgcgttgttggaaatctgtgattcgatggtgaagcatatataattcttctgtgagttcctgtttggttgctgagaaaatgtaggacaggaaaaggaaattgctgtatgaattgaatacgttgttgtgtttgtctcaatttagataagatttcatagtttttaactattctttaatgatagtacgttgttggaaatctgtgatttgaaggttaagcatttatagttctactttgagttttacttttcagttttggtgatttattaccttcctctttggttgctaagaaaatgtgggaaaggaaaagaaaattgctgtatcaattgaatgcgttgttgtttttgtgtcaatttagataagatttcatagttttaaatattttttaatgatcatacgtttgttggaattctgtgatttgaaggttaagcatttataatataaaagctcttgaatttattgcttatttaaacttcaatttcagtttgcaattatataatttcgtgttgtaaattctcttttttcttcttttgggtatcttaggatgctctaaggcacgtctttgcaagtaggatagcagaaataaaggactctccacaatggaaccgattatcgtttgtttcatgcgcttgtaatggattgttactcatggatgagtctttgcaacttctacctgctgttgaaacacttgacctgagccggaacaagtttgccaaagctgataatctacgaaagtgtgtcaaattgaagcacctagatctcggtttcaataaccttagaacagttttgtcatttagagaggtacatttttctgtttgatacagtgttgtcacttgcaacttcttaaaagaaatttcgataggaacttcaatggttgacatgactgtgttttatgatttcagtttcatgtattctttactatgagttttgtatttgggaagtgttatattggacccaacacagatgttgttggactatgcaggtctcctgtcctattgttaaacttgttttaaggaacaatgctctaactacattgcatgggattgagaatttgaagtcacttgaaggccttgatgtttcctacaatattatttccaatttttcagagttagagttcctagcgggactcccatctttacgaaatttgtggttggagggaaatccattatgttgtgctcgatggtatcggccacaagcattcagctatatcaatactttgatcaatgtaagtcatgctattacttggcataaatatattcttgtgttttattttcttcggtgtgtgttggtagaatgattatatatatcattttgaagcacctcaactctcactccttctaatacttataattttctttaatatgggtctttagttcaaattggatgatatggaaatcagcaccagagaattttggaagagacaacttattattgccagtagacagaaacgacctgccagctttgggttttattctcctgcaatatgcgatgctaaaggggaagggtctgttaacaggagacgggtaagtgtttattatgggaaaatagccttcaaatcgttccttcattgagtaaaacgaagatgaaccttaggtgctcaaggtgtaaagtcttctttttctatttctaagttattagaagatattttccttttggaataaatgtttgttctttttatctgtgtaatttctttttataattatgtatttaatatttatcatttgttacgaacttgacagctactaacgtattgttattacactatgcagaataagg

SEQ ID NO: 30345 - DNA, 1794 bp, Cannabis sativa
taagatcctggtaaaataattccctacaagaatatacccaaagctttatttaccgaggccacaaaggttcaaaggactaatggaagaaaggcggtataggtatcctacctctgagtgacctttggagggatatcaggaaaatatcaactaacaatagagagagtttttagaccgggctaatgattttataaaacttgaagaaactatccggcaggtgcaaataacacacatgccacaactggggcctgtaatattgcctagccccaaaccaacaccaataatagagggaaacagaacaataatggttccgaccaaggtaatggcaagaaaggggaattcaataatcccctgacacaacaacaccttcaagaaaaggaggaaaagttcacatgattctttatcctaacaaacacccccaagaccatcctaatggctacataggccattgttccccaccaatgaaaaaagacatcagtaagagagatccaacaaagttttgctgattttatagagatttcagccacgacactaatgagtgtaagaacttgaaagatcagatctagttcctgataagaaggaataattcccacatacgtcagtttgtctaagccgaccaaaaccaagcacaggtccaacagaataatgactcattgccctaccagttactggccatttgtaggtcatcatcggcggacctcacattgttggggactcaaacaaaacattagacatctatgcttggaccccctgtcatgagcaaagaaacgaagtccttactgtagatgaaagaaatctaaaatagccaaaaatagaagagctatcttcactgaagaagatgctactcatgtcagactccctcataatgacccttcggtcataaccacacaaattgggaattgacggtgcacgctgtatggtggatgatggggtctcctctaaaatcatcttcaagactatgtacaaaaatatggggcttcatttgaaagacatgacactctgcacacgactcatgtatgggttctcaggccaaggactggctcatctagggtacatccaatgtggcatttacattcagtgttgatgtgacatctacattcaatgtcatgataggcaaccagccctgtatgatttcaaggcagtcagttcaatttaccaattgtgcatcaagcttccaaccaaacatggtgtcaggtgcctaaggggagaccaatagtctacccggcaatgttacaatattgctatgtccaaagcaaaaaaggaagacctgcccgccaagagctccaacagtgactccagccaagggcattaaaagtttgtccaaggcaaggagagagacatagattgttactttgaagatcctgtgtatagctttggacctgtagagtaattagaagaagtagagatcaatccctccatgccgaccaagaaactcaaaattggtcgaggcttagcgccagaaataaaatccaaattgatcaagtttctaagggaaaaccttgatatttttgcttggttacatgaagacatggtgggaattcatccatcagtaatttctcacactctcaatatagatccaaacttttgtcgtgtacaacaaaaataaaagctattggataaagagtgagcataagcattgaaagtaaagttgaaatgttgcatgcaaataacttcattatcaaggcattctaccatgtttaggtttcaaatcccatattggtacccaagccaaataataaatggcgagtttacattgatatcacataccttaacaaggcatgtccaaaggattgtttc

SEQ ID NO: 30346 - DNA, 2948 bp, Cannabis sativa
  modified_base (605)..(609): a, c, t, g, unknown or other
  modified_base (2842)..(2847): a, c, t, g, unknown or other
taaaatctaaagccctataaattacccaaaaacaaaattgaaaaaaatacttaaaccaaacacagtaaaagaagatgccatcggaaacaaaaataaaagtatcaactcaggaaaaagggaataacaaagagtaagaaataaactacttactatatttttgaagatttttgggcagtgaataacttcgcaattggaatcgtgatgaatgcgatgatgggctctgagagtttctaagattaaagatgaaatccgatgaaatacgcagaaaataagtcaaggacaatgagggcatgcaaggtgatgaaaattgaaggtgatttttcgtagttaagcttgaaggttcgaaagccagaaatggcaaataagtattttcccttaagttttatactttaaaaatgatcaccatcaatttgaaaaaataaagatgtgacggatgagaacaaggaaaataggaaaagatggacatttaatgctaatgatgtgcctcaaaatcatgaaccgccaaaactcaaagcatgcaattttttaaactgggattaagacaaaaatacccttgtaatcatttaaaaagctcttttttttaaaaaaaagaactttttaagggnnnnntgttatacctgaaattcggctacacttcagagagtgacacgtgtcttgcagtggaatataaatcacctgatattataaaattatatcatttaatgcaaaaaaaaaaagaataactcgttaaataaaagattaaaacaaaatattcataactcgctgactacataatcttaaggaaggctattaaaacttacattgacgagacacacacctgccttggagtacacagccccaagaagataattcatatattcaaaggagcgaatatagttatgcaaagcaacctcgagttacgaatagctagacaaccacctcactattctaaagaaacttgacgaggcgaaccatctgctaacacttagcattttttcacattatgatagacaaggataacaactcggagatgatcaagatataattgtccaaattagcattaaccatcgataaggttaagaataaaaagtagttaagcagttattttgtattatcccacatgcatttaaatgaaatgtgggaattatccacgtttcatgaacggttacatttcaaattgatcccaaatgtaaataactaccaacctatattcctataaatacgggcagattctattgaaaaagggacagagaattttagagagaaaaaaaatacattatcaattgtatcttgtactcataaaatatcataaataagatggactcgtggagtatgcagatttaactgcagaaccacgtaaaaatatctggtgtcactcatatatttattatttctcattaattttgtgatatatttattacgtaagggcttcttatttttagttaacgaaaatttgtgttaacatgtatatagatatataaatatatataatatgctatactaactaaattatataccacaaataaaatatatatatatatataaagattttaataaaattaatatagaataccatagtttttatgtaaataattgttatccctattcctggatgtgttctacatgaaggctgcagaatggtgccacgtcagatgatatattgatatcccaaacctttttttaaggtaggatcatgaaagataccgtgataaccagaaatctacttcccttgcgaaaggcaaattggttcttgaagttctcatctgatgctttcgctatttgtaggcaaataggaggcgtatgcactcctgaataatagggaattgactgttccaggaagcccttgaatgaacttccttgaagctccttaaggcctaatctggaactacactcgactgttacaactcgtttgacagcgagtccgattttgtcccctgcgtcagaccgtggttgtgcgcgtacgtgcctctgtaatgcttattgtccaacggcttgtatgggcaattacttttaaaggagaaacctttgagcagcacgtgtctagatctttacgtgacatccactagtaattaaacaccgcaagatggaaaaaccacctaccaaaccaacggtcagatggtcttgtggtgtttttggcctttcttgtgtgctgagtaagaaaccctagtggggtaaaggttatgcccttacccatttgtgtgcctacaaatatctctattttttatatacaaagggtgaacaatttttacttacaaaacctctactaaaattcttagagagctttcttttgagagaaaaacaaaaagaatacagaaattaccattgtaaacacttgtaatactcacatacttgccaaacaaggctaatacaattgactcgtggactgtggatcattaacgcctgaaccacgtaaaaaatctgtttgtctatcatttaacactttgcattttcttaagctcttattaatcagtttctgaaaattttggtaaataataataaataataaatagtgtaaaatagtcatttctctacaagtttgaaatgttgctatttacttacatagtgttatgatttgaggtcatttactatgaattctcataattaatataatacgactcttatacgacctatcaaacgagtccataaatatatgtaattattcagaaacaatataaaagataaaaacactcgtgacaattttttttgtaaaaataatgtcaattttaatattgtgatgttgatggtgatgttgctggcagagaaaaaaaatgagaaaatgagaaagataaaaaaaaaaaaggagttttatttgcaccccataaaatgataaatacaccccattattaaaaaaaatataaacttnnnnnntttttaaaaattactcttaatatactttttaaatttttttctcacattttttttatgttaatttcaatacttatttcgatttcattttcataattttttct

SEQ ID NO: 30347 - DNA, 7688 bp, Cannabis sativa
  modified_base (6075)..(6080): a, c, t, g, unknown or other
aatatttttgaattttttcaaattataccttcaaatgtatttttataatgtaagataaaaaatcataacgttataaaattatacaatatcataagtaattttaaataactataacttatataattataataaaaaaaacactaaaaaactatccaaaatgtcaaaataaattaaactactatggaattaccctataagaaatttcgaaggagatttcactattcacataagaaaaatggaaagcttttgatttccttaccctgacttttgatcatttttacacgtatatgtcaacttcgtgagtgggagatgatgtgtaagtggggtaacactagaaactatttatttttatttttgtatgggaattcctattaaaatttaaattaaaatatatattttttgacacaatatatatatatattgtaattttttctaaagaaattcaagtcatgttcaacttacatttataattccaatcactccaccttttctttaatataatatcttccatacagtattcattaaatttaaagttatagtcctacataattggtaattaggatttcaaatgtacccttaatttttgagtaaatacgttttttctttgaaagaaaaaattatcaaaggggctaattatctaattattgtgatcgtatcagtcaagtagtactactttttatctgaaaaaaaaaaaagaaaaaaagaaaatcgctaaaaaatatgtaatcgatcatctaatttggaaaagacgacaggtcacataacaataatggaaaaaataagaaatgaaatttaaaaagagagaggttggtttggtttagagagtggaaaagacgcgcgagtgggatgagagtggggcttgaagaagggaatgccttctttttactgcatggcctcgaattattttaagtacattataacattacaatggactcttcactcattgcactttgttttaaaatcacgttcgatcgggtacccaactcaactctctactcttctcaactctcaaccttacctcactccctctaatctctctctctctctctctctctctctctctcctattctgcatttcttgttttgatacggatttttctggtaccaagtctgtccaaacaacaatcccatctctctctcttttctcttttcaagaaagcattattcgatttcgtctcaatctctccttttcaataccccttccccattcctactatcctctctgttctcagtttttttcttctttttcatctctctctcttcttaaaggagaaaaaggaaaaaaaaaaaaactggaaatgaaggtctgattccatccttttttttttcttttttatattcccacctctggtttatcttttctgggtctgattttttcttccacaatttttcttcttattttattgttaagaaaagatttgttggttccgatgcatgggttttcgttgattcagattgtctgttttgaataagttctgggaatattattatatacaaattaaattgttctgattgaaaaaaacagagaactttgctcttttttccattgggtttctatatataattctactctctttaaactttgaataattcttgggatttaaaattttaaattatataccttgaacctttttgttctttttcttttttaaaaaattaaaaaaaaaaaaagctataaagcttaatttctttgaagaagaattagatcttaggtagattagatctctcatggtgtgttaccatgtttttcttgcagaaggtcatactaaagctggatttgcatgatgacagggctaagcagaaagctttgaaaacagtctctactcttccaggtactaatggacatggttttttttttttaaagaaaaactcatctgactcttaatttgttggggttgaataaatgggtttgcttaaaaagacagtaacgtgaataaaaaagaaaaaaattagtattaatttgtttgggtggaaataattcttttattaacccatcaattttaagaatgaaatcaaatgttttaaaaattagtgagattgtatgatacaagaccattttgttgttattcatttatttcttaagaaaaatattcaacatcccaccaaacagtcatagatttgtttcttgaccatacaaaaaggaaagcactattataataaaataataataatataaacagtctctctctctctctctctctctctctctcttttggagaaaactgtgaagaaatttgcagcaaagtgttcatatggtttgtttgacaagtgttgagagtggtgactcagatgtgtacgtggtggagatttgggcatagtgttaggctagctgctttttttctatggcttgacaaagttgtatattataacatgatttttactgctggcattttctctttttctttgttctcattttcaagatcattgctggcttttaccacttttataatgatggattcacacacacaaaatcactcaagaatgaaagtattaaattatggttagaagtgtcacttaaaaaaaccactcttttattgtaaagtatatgttcaattagggtacatagctacactagcactagtactacttatatatatgtatgtatatagtatatggtcacacttaagtatatgaaacttgcattcaatgcattctcttctacaattgaagagtgggtgtgtttaagatacaggatcattaagttagcccaaagaaaaaaaaaacaaacaaaccatgtaatgtgttataatatatatatatgtgtcttaagggtttgaaattatcacccaaatctgtgtttaactgattaaaatcacattcttcaattttcagggattgatgccatatcaatggacatgaaggataagaaactcacagtgattgggacagtggatccagtaaatgttgtgagtaaactgagaaagtattggcacacagatataatttcagttgggccagcagtggagcccaagaaggaggagcccaagaaggaagagcccaaaaaagaagaggctaagaaagaagaaggtaaggaagagccaaagaaggaggaggcaaagaaagaggaaccaaagaaagaggaagaaaagaaagaagaaaagaaggaagagaagaaggaagaggaggataagaagaaagaggctgctccggcaccggcaccgccaccaccggaccctgttttggaacttgtgaaggcttatagagcatacaacccccacatgaccacatattactatgtgcagagcatggaagagaatccaaatgcttgtgctattgtttaaaaaaaaaacaataatcccaagttttttcaagagaggattagttaatcccaaaaatattttgagggattggtgaaaaaatatgttttgtaaggcaaaaagaaaaagccaaactaagagaatataggagctctttgtatatacatggtaatgcccccctcattgaaaaatgttcaaaaacattagtaatgtgttgtgtagagctaaataatataaccaatgtttttgtttttttggtttccgagaatataattgtttggattcatgtagatgtgtttaactcatgttattaattcttaagaatgatacaaaatactaattaaaggaaaatgaaataataattaagaggaagtagaagaatgggatgcttctatttgtgttgtggggcctagatctagtaaagtgatgtatagtttcacagtgatagagctcgtggtgggacatttaaaattaatatgtatgctttccttttctgatatggagttatatatgctttatataaattaagtgctcatgttgtatacgaaatcgaaggctcataagtcatagccgtcctttgaagatttgtgggtcttattgagttgtctgtgtctttattaacacaagcaatgggaccatgaaattcaatggtcggtgtagtaatcatttttattatctttttctttctttctttcttttttttcttatttttaaattttggatggattaaacaattttgctgatggaattttctgtttgagaatcatggcttatttgaatattaatgaatcctttccaagctatatcttcttctcctcaagtttatatgtgacttgggcatctctacttttcatttttggcccctatttctttggtgtacaattaaagcaattatttatgtcctcgaactctataattttgttttatagagtatataagattcccatattatcattttcataaatttcgcttttaaagttgatgggagttaatataaattcacattaagctgcttcatcattaatgttgaattatatatattagtgcttttatttaatatgtaatgatgcatgtgatagctattgtttgccacatttttatataaaaagggcatgttcccttccatacatatatattctttcatatttaattatgcaagattcagcagccagccagaataaaatacatataaaatgttctctatataaacgaatgcttacaccatatatcaaaacaagcaaaagaaatcaacaaaagaaaaaacaagatgtatatataaccatgtacacctagatcgatgcaaatcttgtcttatttgaagcttaaagatcatcacactttatgatttcatttagcaaattgtgtattgtgggtaaacttgctattattatatactttttagtttttatttttagatgagattgaggacgaccttgagtaaaattggtaataaagtattaaataatgaaaaataagattctcattttcatttcttatttcatcaaatgtaatcattttcaagaaaaataaaaggaaaaaaatcaacaatttcatattttctttgaccaattttattattcaaccaaacacataacttcattgagcatgaggtttaatttttttcattttattttaacacaaagtaagaaatacaggatcctagaaattcaacacacgatcaatagttcaaaaagataagttaggagaattaccctatattccttgccacgtatttaaaattttcttttaattattatttattattgaaaatctatgttatatataataaatattgtatcatactattccaaattaattagaattatatatttataaaacatgcagatctttgagataactagagccccatgtttttaattaatcttatatatgaacatgcaacaaatagaaaaggatgttaattagtagttggccaacttgatccacagaaaataataatccattagtctcataaaatttactactaataattagtactatccactttgtactcgatcgtaaaatttgtcatttgctcataattattttacttcgaatggatgcatactcggatatatataacacttgtagagttttgatgatgatgatcaaataccaaagaagcccataaaaaataaactttatacatataagtacgtactttaataaatttaaaagtctaaccaagtccatctctatagctttttcttccgtcgtgtggaaaatacgtacaagcaattactatatccccaattatttttaaaaaattatactctatatataatatattaaattcatattacgtttaattcacgtataattagttttttttttttaattagcttcaattaggtgatttaagtacaatacatgtatgtttaattttttttaattacgtaatacttttttttttaaaattttaaataaggtttgagattttgatctttaagaaaaaaaaatttaactattgccacattggtgtgtcatctggatatgattatatgtaaacgtattttttaattttttaaacttttcttaattaggtaacatatctgatctgataatgcatttattgtaattaactatattcttaatcaaaactcacataattaaatttgagtgtgtctatacatagactggattcgtaaatttgatataattattttttattcccaaactttacgaaaaatatgatgtgtgaatcgatttacaataactaaaatggaaagtaatcaattctttattacaactattttaattcaagatataaaataaataataataaagtttaaaatataattaaaaatatttataatannnnnnatttaaatttttttatataaaatatttacataattcttttttattttaattcaaagttaaactaataaatttaaaaaatgattaaaaatatgttgaatattttaagtatttaaaatttaaaattatatgaaatatctacataatttttatttttaaatatatataataatttcaaatacgggcgttacaaagatttttccctctctcttcactctgttcgactcccgtgcgagctggtgccatggcgaaaactagggctaagaatgtggggaaaatgaaggtttcaggcaagaaaactaagagaaagggttcgaattcatcggctgaagtgaagaagacgaagacaatggatgaaattctgggggtcgctcccctggaattctcagatgatgaagaggatgacgagcaattgaaggatatgagccaggagctgtttcaaccactatcccctgattcttctttgcgattgttgcagaggcaagatgagattgttgcagactttggattctttcttgcggctaaccaagaatgccaaagttcaatctcgaagggtgttacgattacaccaccgattctcaaacctgactcggtgaagaggagtttagactcttcttttgtcaattcaaagaaaaaggacaaagtccagattacaatggatgacattgaagatgaaatttcctactggagctcaactattgtatgttacgtacttggtgccaatccacctctctaggtactggatggatttgctaggcgaatttggaaaggcaaggtggacaaagtaggtatgatttcacatggcattttcataattcgatttacaagtattgctgaaagagatgagatattggttgggggatacattttctttaataaaaggcctgtcattatgaaggcttgggatccaaatctcaatcgaaaaaaaggaagatattaggacagtgcctatttggatttcgctagaagatctagaattgaaatattggggggaaaatctttgtttaagatagtggggcagctaggaaaaccaattatggaagatgcaattacaaaagaaagggataagcttacatttcctagagtgctaatagaggtttcaatgcagcaggatttccctgatttgatttattttgacaatgagcatggtaatgaggtttcggtggcagtcaaatatgaatggaaacccatcgtttgcaagcattgccaagggatggggcatacatcggacgactgcagaaggaaagaggggaagaagcaagaaggggtagtgaaagataagagtaagacaaaggacatgggagtagaattgcagaagaatattggtgatttccaaccagtgataaaaggttggaaaccaaaaaataaagagtttttgcctgatacgcatttgtctaacacttttaaagctcttgagctgaatgatgatactgcaggaatggaagggcaacaaaagatggatcaagaggggtcaagcaaaggagggggagagagcctcctcttcttaatggatagaatacttagttggaacgtccgaggaatcaacagtccaaacaagcaaaacgaggtacggcaatttattgttaagaataatattgggcttgttggtct

SEQ ID NO: 30348 - DNA, 4277 bp, Cannabis sativa
ttataaacccaatcgaagtcataaatgagaaggcccaagcccatttgatattttgaggagcgcctcgcctcctcttcctcctcccgcttcttccaagtattcgaaatatataaacaaatatattttcatcttaatcctcaaaatctcatttctcttatttcgaatctctctctcactctttctctctctctctatctttactatccctttcattgcagtaatctagagagagaaactaatagccgttgggccacactaaccctagctgtttcctcatcgactagggttttacagccttatctctctcatcgcctttcgattttaggtatatctctttccttgatgaaaatttagtgcttatgccaatcgtttctgctgtcagatccgttgaggtttttgattttaactgccgattagggtttatgcttcatagtagtgcttgtttgaatcgcattagatcttacctcttgtttgtcgctatgcctggatttatgctttttttttttttttgttttgtttactatgttttcagtggaaaatgttgttaaagtaagtgaaaatggagctggaaattatttcggaaatgttgttaaaatcactctgattttcattttatttgattctgtatagttaaatcgttaaacaagcctacagaatagttctggcgattgtggagaaatttttgaatttgaattttgtttactttatgctgatgataagtattattttaaagattttatttttagtatttaaataaaaaagtacttgtgcacatgctacaatgttatatttaagcagcattttgtgttagtttagcagcagctaactttccttgtgtttttgttttttctttcgttacaaatctttagtgtcttgctcatgtccttgatttgattaattatatgtttttttttgtttgacagttcagaaagacatggctttggagatcactcagtttctattggcagctcaatcagctgatgcaaaagtgcgtactgaagcagaagctaacctaaggcagtttcaagagcaaaatcttcctgcttttcttctgtccttatcatttgagcttgcaaacaatgacaaacctaccgaatcacgacgtctggctggtattgtgcttaagaactctttagacgctaaagatgctgctacgaaggatcgtcttgtacaacaatggatgcaaattgatgtatccatcaaaacccagattaaggacttccttttaagtactcttggttcacctgtgccagaagctaggcacacttctgcacaggttgttgctaaagttgctgcaattgagattcctcagaaacaatggcctgcattgattgggacattgcttgcaaatatgacccacagagagagtcatgctggcctgaagcaggcaacactagaaacttttggatacgtttgtgaagagatatctcacagagaccttgagcaagctgaagtcaacaatgttcttactgctgttgtccaggggatgaactttgctgacaacaccgttgaagttcgtcttgctgcaacaaaggctctgtataatgccctggactttgctgagaccaactttcaaaatgagatggaacgtaattttataatgaaggtggtttgtgagacttgcatgtctaaggaagtagagattaggcaggctgctttcgagtgtcttgtctcaatagcatcaacatactatgaagtgcttgaaccttatatgcaaactctttttgagctcacatcaaatgctgttaagggagatcaggagtctgttgctcttcaggcaattgagttttggagttctatttgcgatgaagagatagaactacaagagtttgatccagagagtggggagtctggtgctcctcattcccgcttcatagagaaggctcttgcatctttagtgccaatgttactggaaaccttgcttaagcaggaagaagatcaggatcaggatgatagtatctggaatgtatccatggctggtgggacatgtttaggtcttgtggccaggacagttggcgattctattcttcctcttgtaatgccctttgtggaatctaacataatgaagccggattggagatgccgggaggcagctacatatgcatttggttcgatcttagaaggcccctctcttgaaaagctttcccaactcgttcaatctgggttagatttcttgcttaaggcaatgaaggatgaaaataaccatgttaaggatacaacagcttggactctcagtcgtatttttgagttattgcacaatcctgccggtggtttctctgtggtttctgcagagaaccttgaacgtgttgtgcagattctgttggaaggaattcaggatgcaccaaacgtagcagagaaagtctgtggggctatatactacctcgcccaggggtatgaagatgctgggcccgcctcctctgtgctcacaagatatatcccaagcattattgattgtctgttaaaaactgccaatcgtgcagatggtggtgacttgaagcttagatcatctgcttatgaaacattgaatgaagtagttaggtgttcgaatattgtagaaacttctagcatcatagcccaactgcttccagctataatggaaaagttaagtagtacagtagagcttcagattgcatcattggaggacagggaaaaacaaggagacttgcaagcttctctctgtggggttctccaagttattattcaaaaactcagcagtgtcgatgaaaccaagaccgtggttcttcagactgcagaccagattatggttttgtttctaaaggtctttgcttgccgtagttccaccgtgcacgaggaagcaatgcttgcaattggtgcactggcttatgcaaccggaacagagtttgagagatacatgcaggagttctataggtatttggagaccggtttgcaaaatttcgaggagtaccaggtttgtgccattaccgtaggcgttgttggtgatatttgtcgtgctttggatggcaaggtgttgccatattgtgacaggataatggatctcttgattaaagatctttctagtgaagaacttcatcgttctgtgaagcctccaatattctcttgctttggagacattgctcttgcaattgaagagcactttgaaaagtatgttccttatgcactgcaaatgatgcaaggagctgctgagctctgtgctagaatggacaccagtgatgacgagttgatagactacgcgaaccagctgaagcgcagtatctttgaagcttattctggcattttacaaggattcaaggattcaaaatctgaaatcatgttgccatatgcccaacacctcttacagttcatagaaacagttttcagagataaacagaggtatgtataaacacacacacacatatatatatatgtactcattttgttgtcatggccgtgtatgctgactgagtgatttgtttgcagggatgaaagcgtgacgagggcggccgttgctgtgatcggcgatcttgcagatgcgcttggtccaaacaccaagttgctcttcagagaaaaatcattttacgtcgaattcttgggtgaatgtctggaatctgatgacgaacagctgaaggaaactgcaacttggactaagggaatgatcaaccgcatcatggtttcttgaaaagaaacataacatccctacgagtctcttgttttcagtaagtttgtcatgtctctccggacttcttttgtctgttgccgatcaattttgaattttcatggaaatttttttagggaaaaggaaattagtgctatgggtgggaaaaaaaaagagcttttgaagtttcaagtatatatatattgtcaccacttctagatggaattggttcgttgtctgttgtggaactctgtttagtgtaatgcatcatccactgatcagtgggtcttgtgtcatttattatgttcttccttctctcttttttctctacagtttctctagttctgtgaattgatgatgatatggctattattatctacacttaaattatatatataaaagttattagtatctttcaaggatttgaatgtgaaaatgaagtaatgaagtttttgattttgatcatttgtaattgtcatttcccaacaagcctatatctttttgggtggttactctttggtacgtatgcttttcctttttaatgccacaaaacttttacctcttttttctttgtctaatttcactaaactgacttcataaatgaatataacatgtgaattttgtgtcattttatattggaatagtaattgtcgaaccacacaaa

SEQ ID NO: 30349 - DNA, 3131 bp, Cannabis sativa
  modified_base (1767)..(1781): a, c, t, g, unknown or other
  modified_base (2987)..(2990): a, c, t, g, unknown or other
atcaccaacaacatgggctaacacagcaaagaactatccaatcaaccaaagttttaataaaaccaataaaatttaatgtaagcccaaatagaagtctaacatcatatatattatatgcacataatatatattatatatgcatgtcatttaaatatattgaaaataattatttctacacatttaatctcgtaatatatatgtatattatagtatgttgatcatatataatacacataatttatacacatgctataatattatttatattatatacatacatataataacatgctacaaattcaaatatattatattatatatcactatatattaatatgatgtatacatatatatatgtcacatttacatatatatttttatctctatattaacatgtaaaattttcctatcttaacaaagaaaatatgttaatacatatattattattattatttgaaagagtaaataacataatatacactactaagctcactcatgaatgggtttcacacaaaatctattatccttgtattcttaaaatcttgatttatctctcttccattgaaactgaataagcttttgattgttagagattttatatatcaatggaagataaatcaagataaattacaactcaattgtaaaaataatacaaggactataagagattgattacataaatataacaacacatatatacaatatatgtacactatatatattatatataaagtagaaaaaatgaattacaacacacgtaatatacaacatatataatataacgtgaagaagaagatatacatacatatatatacactcactcacaaccttgagtgtatattaatggggtcactatgacttgaacaaggtattacacttttatctaaaagtttatttttccttatcactaagtactaagggaactcttaaaaaataattttaggaattatcaagccttttagggtttctagcaaagtgatttgttgatataaacttagttatcacaatcttagcgccttagacccctttatatagtgtaagatatcaccatttgaaattctaactcataacctctcatggatgttatgaactgatcaatgagagtaaacgatatgggtaacacttttttggacacttagtataagtgataattgtggaagttacacatagtaacaagtaactccaccatgtgttacaaaaccataacaactaatataaattgtcatatacacacttattagtttgtgtcatatttgatctatatattatatcatttatataaataatataacatactacattttaatattgaatttaatataagagcatctctaatcaagggtcaaaaagctagtatattgttataatttagcacatttaagaaaaagtactactttaatgatgttctaaaagatgtgctaaataaggcaatttatttattataatatcactaattattatgattcattgacttatactaaaccacattctttatttaccatactaatattatttcaataatggaagaataaaaaataataatttttctgtattctcaataaaatatttaatcagaatcaatataatcaattatttttttgggatatataattacataaaaaactaatttttgtaaaatatttacacttttacttttaatatttttacggtattctataaaaaatattaaaaaaaataacatgaaagtatcacaaaaataatatcaaaataataacaaaattatataaaaataatatacaaataacnnnnnnnnnnnnnnnaaataacaagaatacaatataaaaatacagtatattatgtaaataaaatctaaaaaaaccgtaaaaataataaaaattctgtactgaccatatattttttaaaatctttagttgtttttgtattttttttttaaattattccttaattttttttattttatattttgtgcattggagtataattataaataatgaatcaaatataacacactcattatttttcaaatttagtaccaaaattttaaattttggtttaatatgctttaataaataatataagaatcctctaattaattataaaaatgacatctgagattaagaaatttaaaatgctaaaatggatactataaaatgttgcaactgtaaatggctaatttattgcagttcagaaaaagaaaaattaatgtttaatttattttgttaaataaataaattgcagcaattcagattaaattgtcaataaaaaattgaaaaggagagagaatagtcaatgagaccactagcggcgcaggaaaaggatctgtttgaagattcccaaaaatagaataataatgtattaattgttgggtcccaataatatataaaatttgtgttgaataatataaattttagggatatgattttatcttgttatatattttaccgaatgtattttgtgatatattagatgggtattagggtacatgagtgtcaagatacatttttattttttaaccctaattactcctagattaatctcagccatcagatcaaataactctcttatctgacagctgctgtacatcataaattacaaaccgtaaaagtactataacaggacaaaatcatatcccaataaatttaaggaattagtcataaaacaacaacgccctgcccagtggccctacaattaatttaactttaaaaagtaccaacgttgtctaagaagaaccgccatcattaaattttatttaataagtatatatattgagagtaacgaggcagtctcaactggcgaaagcagcaaacaaaaatcaacacagtcaaagtgtcaactccttccaagttaatatggatatagtatatatttatttcaaaaaaaaaataaattgatagtatatattttgtattaaatttagcttaaaatataattaaattatatttaatttaattttgtatttatattttaatagataagatataaattaggagtttttttatttttannnnttaaaataattttttttatatttttacaaaattttacataaaaactcatattataattaatggagcaactacaaccaaaatccgtatagtaaacctcatagaaaccaccagagaaattcaaaccataaatttaaaaaaaaa

SEQ ID NO: 30350 - DNA, 4837 bp, Cannabis sativa
gggtcacgaagaagatggaggctgccattttccttagccggtatatatgtaattaacaacttttagtttctatttttgtttatttccttttttgtagtcagtaaattttatctatttttagtttattatagaaaaaatctcaatgtttagagccagcataagattttttttttttttttggagttggtttcctgtttttgaaaatgcattatttttctaatattgtgaaaaacaatatgtttggaagttgaattttaatgaagaaaaaaacatataagaaataaaatgtaaagaataaaaattaaaaatcaacttttcatatgaaaaaatttgttagtgtcaaacttttagcaatgcaattttaatttatatatttttcctacatttttattactttttatttgttaaatcctaattgaggtagaattaataagtagatgttatagatattagaagtaactttttggaaacatcatctccaacgaaacaaatccagaaaataatgagagaacaaaatgtagaatataatccagaatgcttttcattcgactaaaaaaaagacatccaaaatcaacacttatctaattttcaacagttgaattttacatcctggatcggtcctttcaatttgggcaaacaatataaattaccagcataatagaacaacaaggatatgacccccagctttcaataccacaatagggtaggttaaaaaaaatggcctatcacttgtccaataaaatgcttgaataccctactagctgctgctgttttcagaagtagaaacctcaacactgcaaacaggacagacctgcaagtcatacaaacaaaatagctattcagcagaccttcctaaataacattaaaaaaaaatactaaagagattacatcaccaggctttgtatatgaaataactatattattcttttaattttttttaagataggatgataatcattgcacataagatcaaccccagttcaaatccttccacataagatctaacatttccatctctctccacacatttccattcatccacaactctctcctaccaaacatgatgagacaattgcaggtaacatacatggtttggactgcatttctccctagaagagagatgtgccacattcagcagttcataccaacccacccacccctccccaaaacacaaaattttgttaaacaaacattgcccgtgccatatttgtttaaaaattacaaaataaatcagataacatgactgatacaaaagttgatcaaaaaaacagagctaatacaaaactatttgaaaacaattaggtcccaaggttaaaaacaaaaacatggaagaaatgaaatttttatagatataacactgtcttttctctaacctataagtttaaagaggagagaaccagtctattaatgaaactaaaaagggagagagtagaaatttaaacataccttgttgatgttcaaccagttgtttatacactcgggatggtaggaatgtctacaagagagtaatgtcaaggtctcttcatcctcatagtcaaaccgacaaatgacacacctggaaaaataaaaaagcaaataaataaaaagagcacatatgatatagccataaaggcttaaaacttatgaaaatgcacactcacgaatcattgctgccattctgagttcctcctgtcttgtattttactgtaggcaagttggcaattgtatcagctgaaagccctctgctctcagttccaactacttcacccaatgcaagcaattcctgaaataattcgaacgctttctttgattgaacaaacataaaattatgcttcatttgaagaactagaatataaattcagcttacctcataggaaagttcatctggatcaacctcctcccatgcatcctgcaagccaaagacagtagaaatacaaaatagatcagtatatataagcaaagaatggcgattataaagacaagaaaatgatatatatatatatatattaaaccattaattcattggcatatcagtttagactaataaactaaagtttataggcccccatgttccaaataattactctctttgagatgcatgcatgtaaatcaagaagtgtcgcttagtaagggaacaaaaaacaagcagaagagtaccctgaaacaagacctataattctagtacattttaaacagagacctaaaaggaaatcttgactgaaagtactctacatatattcataaagtatcgtctggttgtatgatatgctccacttatttaagagcaagaaagaaaggagcttagagacaccatggtttcttcatgacaaggatatccatcaaactagagaattgaatatatgacaataagtactttaatagtcaactcaacctggtgcttacagaaagaagaaaaagaaaagatggaggccaagcagagtggctaaaaatttttcttgttctaaccacatgcaaagagaaggtatgagcaaaattctttcttctttggacagggcaactgtgtttagggaaactaactaggccagattagcccaaagattagacattatctattagagcaaaattatttaagctgatcttcatttgcaaacagctacgccatgtttcaacctaaatcgacagccacataacacttcacttatcatctttcacattacaaagttatagttattatatcatcacttgaactgaatttgtttcaatcagcatgaatcggattcataactatattatgtgatcatgtttgaaattcagctagctgttgctaactagatattaatcagtatcttcttggttagaatgtagctgcaaaatgttatactcaaacaaacaaacaaccaaatcggtgtttggtcaaaaccctacagacgacaaataatacctgagagttgcctccatgctcttctggctccgagtcctcatcttcacctgaaaacgtagaaattaccaaattctcaaacctcataatttgaagactttcaaaagaaaaaggaacagaagtacaaacattgttacaatgctactcacggtcatttattccagcaagggctaacaatctagcagccatttccctatcttcagcatcttgtagggctcttgcataagcttcatcactcgaaaagacagcagggtcaaattcaacactgggttgattgtcctctccaccatcagcaatatcatgatcatgggcatgggcatgcacatcaaatgcatcttcttcatcctcagcatcagttccctcatgttcttcatcttcatcatcaacatcagtatcatcatgaaaatcattgtagtcatcatcttcatcgtcgtgtaagtagcttccagcttcccaacttccataatcacttccttctgtggtcattcgtagcatcatatatgccctttcctactccataaccaatgaagaaaaagacacaaagaaaagacataattatagcgatcgacgttaagaaattttaagatctaatcatatctcttattttcaatctgaatcagagttgaaaacattaacatttggagacaacaaaaacacagtccataatagacaattagcccttgaaagatatggtaatgccacctggatcaccacaagaattagaaactggaattcaaactgttgccacctaaaaactttcacggtaatggcaagtaaactccctagtcctaggaggacagagcataaacaaataacaaaattcaaataattaactgacgtcaaactctcatatagctactgaaaaagccgataactatacaatattaataaacatttatgttcgattgcattaacaaaccaaaatttatatgatcaaattcaaaaaataaaaatttaaaaaaagggtaatttagaatgcattcattcaaaccataatttccataacttttcgacaaccaaagaagcatcgtcaaaaccctaaaaaaacgggcccaaaaaatttaaaaataaaaaggcgaacctgttcttggagagttcgagctagggcgaggtcagcatcgacctggctgagattagtaaaaggtgttctggaagaagagcgagcaggagctggaggagactgggctgtctccagcgatccagcggcggcgggctcttcttgttgtggatcatctgagcgattgagattagggttttcgacaaggtcaccggcgacaacagtatcggtgttgggcttgactccaccgccaccggcggaacccaatttggcgttgtgagtgttctccatggaaggaaagggagtgagatttcgaaagaagaaagcagatgaaattaagagaaataaattttggaaatttggttttggaatatttgaagaatcagagagagatactattgcagatttgagagttgagaatgagcaaaaaggggaggggtttttatgtaattctgtgctttatggtttgttcggtgggaactcaaatttgtttttgttttctcccttcaaaaaccacataataatttcttcccaaataaatcacagctttttaatgtgcttctatactattatttatttattttttttttaaaaaaagattactactattgttttaaactggattagtagttcgatcaaaatatggaagatattttagatattgattttttaaaaaaaaaaaattatgcgtgttaaagatattatttaaaataaaaaaaaggatatttatttaaaatataaaattaataaaaaatctatagaatataactataaataattataacaattaacataatttaatagtagcttacaataatagcatcattaattctccatattaaatctttacaaaaaaaaaaaagaaagaaaaaaaaaaaagaaaaaaatcaccatattaaata

SEQ ID NO: 30351 - DNA, 3496 bp, Cannabis sativa
attcattttctgaaattatttctaatggtcttcttccaatatgcaggttattttttttttatttatttattgaagtttgtaatgcctattttgctttacttttatagcgtttgcgtcggcttagtccattttttgttccacggatattaatcaatatggcgtctggtcacgtgagcatgaaatatggattccaggtatcatctccctcccataaaacccaattatactgcaaactaagaagagtaaataatgcttaggtatgcaccatcttctttgcatggataatactgacacaactaggctacctgaacttaaatttcaaaagactagtctgcaaaacaactttagtgataactaacagaaatttcatcataattattaagctctttaatgctcataaccataaggacttccatatgcagaatgaagtgcgcgttatagtaatttctcacaaaagatatgtgatctttctcagggaccaaatcatgctgcagtgacagcttgtgctactggtgcacattctattggtgacgctgcaaggatgattcagtttggagattcagatgttatggtggctggaggaactgaggggagcattgatgcattgtctgtagctggattttgtaggtattacttaattatcataccaagtttttgacttaaaatgttgtttctcataaagatggatttggttagtagttacatttgaaatctttcatcttttaagaaatgcttttaaatttccaggtccagggctttgactacaaagtacaactccacccctcaagaagcttcaaggccgtttgactgttcaagagatgggtttgtgtaagtactaaaaaaatcttttgtcttcagaggtgtgtttccatgagctggctattgctgttcttttactgtttccatcctattgttttggctaatttttcttttaactcaggataggtgaaggttccggtgtcttggtgttggaggtgagttgagactcaacatgtacttttcaatgattgacttaatcctttttataacttttttggatccttataagtgtgccttggattatcttctgttgatacattgatgacaaaggaacttgaacatgcaaaaagacgtggagcaaaaatctatggggagcttcgcggatatgggacagctggttgttctctgaacactgcaaattgtagatttttttccctgtagtaacttaatgtacttagatttgaatactttgttctcctgcaggtgatgcatatcatattactcaaccacatgttgatggaagaggtgctatcctgacaatgtcacgtgccttgaagcaggtaaagcttgatgattgtggaccattatttttgtgttcctctagatttttaaatgttataacgttcttaggcattcaactggcacagttttttcaaaactatccgaggaaaaattgatagtcttatcaattttatgatggtttggtcaactctattagttttccgctagggcgtgatacatatgcattgtaatttgcagtgtagatctaaaatgaacaagctttcggcaagtgtcttttacagtgatgttcattgccaaaggaaaattatgttcgtactttgcaggataatatttgcagatgccattactgctacctcaagcttattcactactggataggtgtactatgagctccttgcactgtaacatacctagttctgcatactacaagcttgttcactaatagataggtgtgctgtaggcagacgagtagcttgtttgtaaagcatgtaacatgagtaaatgattgagcaccaacaagcatcctgtcttgttttgagaaagtgctttgggtgtgaacataggtttgggcattgggagagactcaatctatttgttcattaatgaaaaattatcgcagaattataccattttttctctgtcatcatctcatgaatggatcaggaaatacttctgtctcattataatgttgttgttttacagtctggtcttcattataaacaagtggattacattaatgctcatgctacatcaacacctttgggtaagtcttctagaccttcatctacgatgtttctccttttatttttataagctctttattatagctgtagattcataatgttgcttgtgatgctttgctcaggtgatgctgtagaagctaatgccatcaaaagtatgttctccgatcatgcaacatcaggtgctttggctttgtcttccacaaaggtaaattaagcattatgaacatcttgtcaacacaatgttagtgtggttttggaaatacctctacttcatttcatagaaatattagctaatgaattagttataatgaagttttagctttaccattttcttgtcttcgttccaaaggatatttcattcagctaaatggatatttgtttgtgaaaagttttcttgcatcataattttctacacacacttcagcatacatagaatgaggtttccatcaaaggaagaacataaataagtaaatgtattgtatttttttccctcatactttctacaattcagcttggttcttcatattgtttcctttgggggtgcaattataataaattatagggagctattggtcatcttcttggagcagctggagctgttgaagcaatctttgcggttttggccatacatcatgtaagtgattgcctttccttttatattttctatttataatgcaagactaggattttactactacaaataccttacctcctcgccaaatatctaatttctgtaaaattgcagggaatggcaccattgacacttaatcttgacaaaccagatccggtatttgaggatgcttttatgcctttgaaatcttcgaaaaaaatgccaattagagctgctttgtcaaattcatttggctttggaggaactaatgcgtccttgttgttcacctctgctccttgacaatcactttggttctgcattgtcttgtctcataagccatatttcattcgtcaagcgatcttttcggccaaatgtgagataagcctgtagcttgagaggttctgcggacaaaaaagaatgcaaagcattgttgtctcattaatgttgaggttcacctctccactgtttgttaggattttagctgtaaattttgagtgagctttgttttgggagctgaggctgaccgttatttgggctgcacaagaagttgctgcaacggctagacgtgtgcttttggtgaagtatgacagctttttagcatagcaagatttgttcaagggataattaaagataaaataaaagaaaaatccgtcttttcttcaccctaaattttgcattacatcactttcatgatcttcaaatctatatcttgcattaataaagagaattatgatcttatgaaaaaaaaaatagttggagtaaggttttcaaaattaactagttaaacaaacacctcaaattttgtaataatattttgaattacacaataattttctaacgtgttgtaaaagttttttttttt

SEQ ID NO: 30352 - DNA, 4259 bp, Cannabis sativa
ttcttcaactgagcacttctaattatcatattctaatatctcaaccaaaattctctatataaatataaatattcatacaaagagatttaagagcttctgttccttgcgatcacgaattccgaagctcttggtcattaccgattcttccgagctacgtgaaattgagtctcgccgaataagcttctccgtcgacatcgggaagataccactacttcctctggctccggagtagtacagctcctgcctcggatcgtaaattgacggcagcgatggaaagtaatggtaggaactcgacggccaggatgatgtgtccgctgccaccgccagcatgtcggaagattcttcgagtttctgcatcaaaaccccttgcataggtcgcaaaacgcctccgcacagaaccgtctccaccgccgcttgacacacgtgccagttcccgctcgatagaagccccacttccccacgagctcagctacttccaccatgaataatttccagatatacccacaagattgtgtgtgcaagtggtaaaagtgtaataaaataaacttaaagtgtataaaagttgcttttaacgtgttgtagtatatatgtaataaagttagctttttgtatttttagtgtaaaaatttcttttttttttcatgaaacaaatatatctttttcttttaaaaaaaatataatagtatatatatattatttttttttattcaagcatttatatattataatatataatttaagactcttgaacccaaaaatttcgatacatggactctcgtacggtcacttcacctaaactcagatggttagtgtatataactatatatcattattaatacggaactttaccctacactagcacaaaagttctctaaattatatgatcatataagaaacttctttattaattcatcctaaaaatgaaactatggtagaagaaaatctgctcatttttcatttccacagaaaacaattataatgtatttgttgatggttgttatgagtctgacttgtgagaacaaaaagcgaacagggataggaattaaattagttgatctcaagaactttaattttttgataatcatatgctgggaaggagtgttttagaattatatgcctgaaagagataatccatctatgtagattgggttgcactgtcttagataaatgttaaaaaatgaaataattaggagaagatgaaagagcttgatgataatatttggtttggagaaaattacttatagtttttaaaattaaatgagatggtttatgtatagggaaaacaaattgtactacctaagtatgtaaattccttatagaaggaaacaacaaatagtatttcatgtactaggaaatgaaagccatttcatgctgaagcttcttgatcattaccaataaggaatatagtatcaatgcaacagcaaaattttagtctggatcatcacaaatctaaattaaaattatcccttcaaacacttaaggtttttaataaaagataaaacgcagctgtagtaatatgcataagcacaagttctcaaagagtacttttgcattaaaacaaaccaactatctcattaatcaactaagagactggatttaagtgagcttggattcattttgttgatttcttccattggacagatgaatatctttcgggcagctgagcgaaaaaccctgcacatgaaacacgttcccaaactggagaatttagatcaattctataactgacagtgcagaaaacaaaactatggtttggataaaaagaaagtattggttctggtactcaactgccaatcataatctcctaacaacattaagtctccttcaatgtccatgtatgtcactttccactcactgcttccatctatcaggcttccattgaaaccaaacatctgatcaagctcggctatgagttccgcgtagccatcaaatttggagaggtccgttgttcttccaagggcagttccatgtttgagaacctaggagagttatcaacaattattttaagtgatcagcaaggcagcttaattgtttgatatttgataattgaaccaacaattcaggttcaaaagttttgtacctttatgtaactcctgtaacggattgagcagcatttattgcattgtttctctgggaaaaagtcagagatactcttagatgtgtctgaaacctggataggttcagaaacactgctacactgggatgttggaggaaaggaaaaggggcttaacagctcacaagatgtagtaacttgtggtgaagggagctcctgatgactattgaacaaattgactccgaacagcatgtatttgttagagtcatttggatagcaaggagctccatcaccactcttctttcctaatgtcatatattcctgggaacctgaatggccagagtttccatttgaaactgaaaagcttttagtaaatgcagcactatcactgcctctataaggggcacacattgaccaccactggttattagtgaggcttgttttcgttgttttttcaccaggaaatgccaattgttctctggggtactgatagaaaggcgcttggagctgtttttcaaatttcagttgtccttgcttcaattctggatttggtggcataacaaattttggtagcattgattgtattcgtgcacttggctcctggccatgtcttacacttatttcttgaccttgcaagacctctttaagtctctgcggtgtatgcttggctgaattcgacaaaaggcgtatcagaaaagaaaactttgatcagtcaccatcactacacaaactctcaataaaaataaaataaaaacaaagctttttcatgaagatttctaaccttgagtggccaagctatgagattcagatgatagaagatcaagctcgcgcctcctctttggtggaggtcggacaaaaatgtcagtcttgtctgtagagtcaactggcttgatgttccaaggagaaagcctttcaggaagcacagatatgcttgattgggcatcccattgcacctgtaaagtagatttgagttcacagattcaattctgtatcatttttaaaaacctatgcttaaattatcatttgtcttaagagctagaattgctaccttcaaacacctccaatgagagccaggccatcttatgccgtcttgatcttcaacacctattatagttcctgtatatctaaaacaaaggtaccaaagaaaatagtgaggcaaggttagcgaattattatttaaactataaataattaatgatgacaagtgcaatgataaactacattaaaggcaaacataatttgaaagtgaaaccaaacatagtaaaggcatttcaatcccattccaatggagtactaccaacaaaacaccacctaagtgtcccaatgggcttacaaaaaacttgggacaaataagtacctcttttctgaacattcttctccttccaaagtgtatccaaatttagttccgggcaaatagtcattttccacagacttcatatactcgtcataaggtattatgaactcagcaggacaagtcctgcattgaaattcatataaaggcttcattcataaatatgcaataatcaaatgataatgctggagaaacagcttataactagaatagctttcattagattaattaccaaggacggtagtacacatgtataaaagctaaggcagaaaaggaatggaaagcagtggcaagaacgccgtgctgcatgctttggctagatataacggatgttgaggcatggtttagagtttttttcatagcacggcggatcccaacacgaaggtctccattttctcctctgcaaaaattaccagagtttctttaaattaaccttagttcaaattactcccatctggttgaaaaagctagagaaacaatggaagaaaaaaaaaaattaaactccaacctaagaaagatacatgaatccccagcaacaagcttctttgcagacacaaatgtactccaaccactagtgagcaaatgtcgttttggctgacctacaattttttcaactattcacattagttttgtaagaaaatgtaaagacaacaaactgaaagaaaaggaacaacaaatgtgaagtgtttggtgtgtctaaacttaaacttctgtcctgtttatagtggtaatggactaataatcatgacagcatgaggcatccatccattatgtacaaatctttatacacatacagatagatgtagcgaatatgaaaatgggaatcataaatgtggtatatacttttctgagatg

SEQ ID NO: 30353 - DNA, 3374 bp, Cannabis sativa
caaataaggggaaaaaaaaaagaagaagaagcctccattaattttagttttaaatgttaaaacaaaaacacacagtagtgcacaaataaatcataacattaaagtggtcctaaacaagtgtactgataaataattgtccaaacaatagctgtgcattattgagtcttgacgaactctgtttcacattctccatgaagaaaagtacatagagctaaagcaccacctaaaggaagctgattttgtaggctcctttaaatattacaattgtgacattaacatatattgttaataaaagatatatcttttaaaaatcatcatgcaactaatacttatgcttcaataatctgaacaaaggccaaaactactacagattatctcaacatcacaaaaaattggatcaggtaatgttttcaacgtgttgatgggcatatctccccatttagtacttcatactaacatgacttgtccacaattatctcaattcaccatctaatgattagtaattacttcaaaaacaaaaaaattataacttggggatactaaaaagtgagcatatataattatcatattaaaaatcaaggcaaaagattcacagaacaacttcatcacaaaggacaacgtaaggaattagataaccactgattgacaagaaaatcagagaaactaactactaagatgattcatcagttaatttatactaaataataaagaaaaaaactgacaaacccacattcttcgtttgacagcaaacaaatgaaattaaagtatcatagtatagcaacaaaatcaagcacgtagactttttcattattaatttccctatcattgctctatctactgtagtggtagtggtagatacctttgcagcttattggtcaaactattatcacaagaaaaagctggctatcataacaatttcataaatgcatggaagtcaattataatcacaagaaagaaaaaagtatcttaatttaacttcatatgtgagcaaagtcataaatttgtatcttaaccaacagaacaaaagctccacgaccccaactaggaaagtaagtaactattcatgctaacttgcattagaaaggaataacagcaatcaacaaacctcactattaaggctgaacttccacttaagttgcagagcctgccatctttcttgctgccaatgctgcccaagaattacaaggcccataacagctgctgcaacaaagatagaccagaatgtatttgcttcttttgcttgagaatataaagatgcagctcctcttttccaccaagcttcacatggaagtcctgaaccatcacgtttgtcatctttcaaaggccttggtgaaagagttaagtccccagcatctaggttttcttctgatgtttcaacatattcaggaatagctgtctcctcactatatggtgctgaaccaactaaatttgtttcagtttggaaagaactatacttggcagcactatacacattttgttcttcaattagatttaatcctggaatatttgtgccttcttcaaaatctgtaccatgaaagggtggcctattacccttctcgtcgaaaaaggaaattcctggaaagtcatctgttacagtcagttcttcaaaggtcaagttttcattatccttgccactagttctcccctcttctccagcagccaattcagataccacatctttatccccgtgctcatcactaatcttatcattgtcagattccaagggcaaattctcatgctgacttggtggaaaaacaaaatgccctgacatgaacaaagcacgggaagtttcagcttccactccatatgtgcccttgtcattatcgtttgactcaacttcttttggaccaggggcagcagcatatgttgatgctgtaagtgaaacaacttcccattcattcccacgagacatgatgtcttctccctccttgtctgtcatcttccagcacctatgggttttccagttaaacctaatttaaagggaaaaaattaaaataaaataaatcaccaatctgaataaattcttcactaacaaaatgccccactctaatcaaatcaccacaaagatacgacaaccactccagaagcaaataagaaaaatttatctcttcaggatcgcatagattatagtgataaaagacttaatcatgcattggacaaacaaattaacgaaaagatcctactacatagagtacaaatggggtctagttgtctatctctaatttaacaaacatgataggacgcaacccataaaaagattgatatcgaaaaagcgattgatacacacaggaaaaacatttgcaatcatgataccaagacacagatacttattaaaagtataatttcaactcaaacagcaatcaactaagaattccagaccaacacaactttcaaaactttcacgagaagaaataatacaaagtctaaccttgccagcatataaaattacaaaatcatataacgaaaatcacaatttctcaatcaggcgatacggaatcgcaataaaaacaacataagatagataacccaagaaaaacctgcgcaatagaacgtaatcgaaaccaaccaccatcatcataatcataataacatcatacaccgattcgaatcagaccaacaaaccaaaataaagaaaaacatagagagtcgaagaagttcaacgatttaaaataactcacctagttgaacgagacgagatctaaactgagtcgatcggattaagactttttgtaaaataaaaacttgtaaaatctgaaaaaaaaaaaaagaaaaaaaaaaagttggagaaattcttctttacaagatgaagaagattgtacggattgtcaatacaattttcatgataggggtaagaaatattattttggatgaggaaactggcggtaccggtaaaaattcatttatgcttagcatacgtttggattgagaaccggctatcgtaagttgcattttgggttgggcagttttaaaaattttgtgcttagctgaacggtccagattcatcttagaaacattttttgtttgatacgccttacagtgaagggaaaccaacgaaggaagtatagcttgggaccaaaaccaaaacgggaaaactggtttgctattgcgtgcgattaaaggttagaatttaatgtgacgcgagtgtcaactatttttgttgctacgtgagtttgaggagttcgctgtcttcacgccaggtgtacttcactaatctaggttggacccactctatatattttgttgaggtaaaacttgagttatatttagtggaaatactattttggactttatgttttgtaaaagttatagattggactttgtgttttgttaaatgataaaatggaccctgcatttttcaaaatagtaaaaatagg

SEQ ID NO: 30354 - DNA, 2724 bp, Cannabis sativa
aacactaatattttttattttaatttttttgtccatatagatggcttcaactggacacaaacctagatctcttgatgaggaagaagatcctgggattgagcatataaacaatgaagaaacaggtgcacaagatgcgaatgaaagtacagcaccaacatctaccactttgcctactacggatgatgggactgaggaaactggattgaagaggaagtcaaacctttcatcatgggtttgggaacactttactaaggtttgtgatactaaaaagaatgaaaaagctaaatgcaattattgtggtgctcaatatgcttgtggtagtaagaaaaatgggactagtaatttgggtcatcatattagatttcaatgtaagaagtatgaggggactttggcagttgacaagaagcaaaaaatactatgttttgaaatgaaaggggatggatattctttggtgacacataaatatgatcccgaaggaattagagaatatgttgctaggatgattatcaaagatgagcttccattttcttttgtggaaggtgaaggttttagagaactactttggaaaattgagcctaaatttagtgtcccttctcgcactacaattacgagggatgtcatggatctttatgttagggagaagaagaagttgagagaattttttgtgagaaaaaaacagagagtttgtcttacaactgatacatgggaatcttgtcaaaatttgcattacatgtgtttaactgctcactttattgatgattcttggatcttgcataagaagatattgagttatattgttgttcctaactctaaaggtgacacacttggcaaagctattgaacaatgtttgttagattgggggattgagagagtatttaccgtcactttagataatgcatcatcaaataatgtttctattcaatatgtcataaatactgtaaatcagtggggtggtgcaatcttgagaggtgaacacatgcacttgagatgtgcttcccatatcttgaacttgattgttcaagatgggttaaaggagtatgacgaaagtataagcaagattagagatgttgtgagatatgtgaaatcttcaactgctagaatgcaaaagttgaaagagtgtgctgagcaggctaaaatcacatgtaagaaatcagtttccttagatgttccaactcgttggaattctacttacttgatgttagaggcagctgaaaagtatcaaaaggcatttgaaaggatgggatgcatgatgtaggatatgtgaaggagttttgtacttctgaggagaaagcatgtcctaatgagagtgattgggatagtgctagattattcataaagttcttaaagatcttttatgattccaccttaagattctctgggtctaattatgtaacatcaaaccactttctagatcgagtttcttttattcatagtcggttggcattttggtgtgggaataagaataattataaactgaatattatggctgaatcaatgaagataaaatttgacaagtattggggggaaatagagaaattgaaccctttattacttgtggctgttttacttgatcctcgttataaggagccatatctgaaagtatgttttgagatgatgtgtggtgattcacttgaagcttcaagacatgcaaacaatgttaggaagattttggatcaaatgtacaaagagtactacatcattgattctaatggtgatatgcatcattcttctagtactcaccttggggaagagagtagggatgaagatgaggatgatgatgattacacttggtttgatcaacaacgcaaagaaaagttgaaggcggctgaacactcggagaacaaaacagaagttgataagtatttcatagaagcatgtgagaactttgaaaatcctgattttgatgttttgaaatggtggaaacataatgctggtagatttaagattcttcaaagatagcgcaagatatctttgccattcctgtgtctactgttgcatcgaatctgcattttctactggggggcgagtcattgatccatataggagttgtttaactcctaaagctgtacaagcactcatatgtactcaaaattggattcgcaatacaatagcaattgatatcactacaacaattgaagaagtggaagcattagagaatggtaaatgcatttatatttttaccatattttatatttatttttaatattgaatacttatcattttttttaatttgcagaaatattggctggaattggtgatatcagaattgagtgacgttgtcactttggagtttggactgatgaaggattctatgatattcataatttgtgcactcttgtttatgtaacatgtattatcttatggtttagaatagatttatgttggacttatgttgcaatttaggttggatttatgttggacttatgttataattaggttgaatttatgttgggttgtaatattttgaactaatatattagtcttttaggtgaaaaatcaggttttactcttggattggattggatggatccaatcaatccaattaatattggattaaaaatattggatggatccaatccagtataaaaaatattttatcaaaagtattggatggatgcgatccaatacatggattcatccattggatggaaccgatccaatccaatgtttcattggatcggttcggttcggttgacctctggtattggattggatcggttggag

SEQ ID NO: 30355 - DNA, 1565 bp, Cannabis sativa
ttattacaaacaagtgggttcatcgggtcaaactcaacagggatggctccttagatcgatataaatcttgcttggtagccaagggatttcttcaaactcctggcattgactatgaggacactttcagccccgtggttaaacctgcaactgttagaattgtgctaagtattgctgttactcaccaatggtcggtcaagcaacttgatgtgagtaatgcttttcttaatggcactctccaagagactatttacatgcaacaacctccagggtttgttgacaaagacaaaccacaacatgtgtgtctcttacataaagccatttatgggcttaagcaagcaccaagggcatggaatgacaagctgaaacaaacactttacaaatggggttttcatgcatccaaatcagatacatccttattcatccatggttctcatgacaaccttgtttatcttctagtctatgtggattacattttaataactggtcctaattcttctcttattgactctatcatcactaatctcaacagtgctttctctcttaaagatttaggacctgtccactattttcttggtgtggagatttacagggatgctacctccatatatctcagtcaaagcaaatacatagctgatttattaaccaagctacatatggacggagctaaatcttgtcccaatccagctagctctaccacaaaactcagcttgcatgatggagatctgtttggtgatattactctctataggagtacccttggggctctacaatatcttagtctcactcggcctgatgtagccttcataatcaacaaattgagtcaatttatacatgctcctaccatcactcattgggaagcatgcaagctcttacttcgttatctcaaagggactatttcatacgggttaaagcttcaagtttctaaccatttcactcttcatggatatagtgatgctgattgggctaattgtgtggatgatagaagatcaacggggggtatgccatgtttcttggcgaaaatttggtctcgtggtctgccaagaaacagcaagtggtggcttagtctagtactgaaagcgagtttcgcgctttggctaatgcagcagctgagattaaatggatcactcatcttctatccgaacttcaagttccattgtcccaacctcctgttctgtgggtcgacaatcagggtgcaacagccttggctgccaatcccgtttttcatgctcgatgcaaacacatcgagattgatttgcattttgttcgtgatcttattcttacaaagcagctggtagttcgatttgttccttctcttgatcaaactgcagatattcttactaaatctttaactacagatcgctacaactatcttaaaggcaaactacatatggcgatgtcaccattccgtttgaggggggatgtaaaccagaacacgtgccttaattagcagttctgttattcggttaagatagtttagtcttgtaattagtttgttaaagattctgttatgattctcttgctttgtaatcttgtgcaatataaataagatcattagctaaccattt

SEQ ID NO: 30356 - DNA, 2413 bp, Cannabis sativa
tatgaaagttattcaaatatacaactggtaataattttaaacacaatcacacaatactcaaagctctgatgagaagaaccttatacagatttcgcctctctttcactgcaactcatcctacccttccaacaacctcttctattccgtacaaaaatggcggctgctcttcctcaggaccctcaaattcggtgccaacgtccactttcaactcgaactccaggtgggttttcaccaactcctcctctcttccccctcccgaatgggtagaacctctcaatgatgtatctgaagtagtctcgagctcacgagacctcgaaccaactccatgggttgcccatattctaaatttattagatgggtcttcgaatatggaacccaatttgaactctttctgtaaaacattcttgattaaactgtctcccaattttgtcgcctatgttctaagatcacccgagcttcgtcagaagcctgatattgccttgcgtttctttaattggtctaataaacaaaagaagtactctcataaacttgaatgttatgtttgtttgattgatcttttatcatcatgtaatgattttgatgcaactcggagtgtttttgctgagctcaaaggaatgaactttctaatgactatttctgcagcaaattcctttattaagagttttggtaatcttggtatggttgaggagttgttgtgggtttggcgtcaaatgaaggagaatgggattgaaccaagtttgtatacttacaattttctaatgaatggtttagtgaattccatgttcattgaatcagctgaaagggtttttgaggttatggaaaatgggaaagttacaccagatattgtgacttataatactatcattaaagggtattgtagggctgggaatactcagaaagctttggagaagtttcgagctatggaggaaaagaatttacagcctgataagattacttacatgagtttgatccaagtttgttactcaaaagaagattttgattcttgtttgagtctttaccaggaaatggaagagaagggagtagaaattccaccccatgcttatagtctagtgattagtgggttatgtaaacttgggaaatgtatggaagggtatgttgttttcaataatatggttcagaagggttgtagagcaaatgtagctatctatacagctctgattgattcttatgcaaaaagtgggagcatgagagaggcaataaatctctttaagagaatggaaagtgatggttttgaaccagatgaggttacttatggggttgtcatcagtggattatgtaagaatgggagactagaggaagctatggagtattttgagttttgtaaagatcagggaatggcggtaaattcgatgttttattctagtctgattgatggtcttggaaaggcagggagagtagatgaagctgaaaggctttttgaagagatggttgataagggatgctcaagggattcatattgctacaatgcccttattgatgccttagccaagtctgggaacactgatgatgcattaatcctctttgagagaatggaagatgagggttgtgatcagacagtttatacatacactatactcattgatggactttttaagaagcacaaaaatgaagaggctttgaaattatggaacatgatgattgacaagggtattacaccaactgcagcatcattcaggactctttctattgggctatgtctgtcaggaaaggttgccagggcttgtaagattttggatgagttagcaccaatgggcataattccagaaagtgcttttgaagatatgatcaacgcgttgtgcaaagccggtcgtgtcaaggaggcttgcaaattggctgatggcattgtcgatagaggtagagaaataccgggcaaaattcgtacttgtttgatcaatgcattgagaaagacaggaaatgtggacttagctattaaattgatgcatagcaaaattggcattgggtatgatcgaatgggcagtgtgaaaaggcgagtgaagttccggcttctctttgataagtctttgtcgtagattgtcattgcaagtaattggttctgcatcataaaacaaatttatcaaccttgttgaggagtagtgatgatgagaaggataatctgtagaaaacagcctttattggtaccattgagtagcagtcagtcagagtgactgttggaggttcacaaatttgatattcattgctggcaaacttgagaactgaggtactaattcttgtttatatagcttgagtgacttgataatataattctcaatttgctacttaggctattgccctcaatcgatctttaccataggaatttggaacagtcttttcatatgaatttttttcttaaatatctattggttaagaataaagctaattaggatttttgttc

SEQ ID NO: 30357 - DNA, 2229 bp, Cannabis sativa
agtacgagatcttgtgggttgttctagccttggaggaatggcgggatcaataagattagtaggattggcaggatttgcaagattggtggagttggtaggattgatggtattagctagattagtacgaccttctgtggtgggaggaacatgagcatcaggatctaccatcataagatcctaaggaggatttgaggtagcagttcttctgcttagaaccatggtgattgattagaacaagatgaagaaacttacaaaaaccttattaagtgctgacttgaaatttaaccaactgacaacaaaccttattaattgctgattatcagcacgtgtaaataagaataataaatagtaaaaataacacacaaatttatagaggttcatcccccttgatgaatgggtaatgacctacttccattttagttatattcactctttagataataccatgcagattacaggcctagacctcgtaacttctacctatggcactcttaagtagtacaattgtgagaataatgtgttccaaataaagaactcgtaggattttatgtagaacttacgaagaaaatagacttagagtctaggaagccttaggcgcgtgtggagctttagagagagagctttgggtgtgtggcttagatttagtccctttttcatgtgatataatgtcctttatatagtataggtcttacaaaagattctaattcaaataggtaaagatatccctttttgatgaggaaaattacatcttttttatcctatatttgaattacaaaataggatcattaaatcccttacagataagactaatatcttgagggaatatctctatcttcattggttgttggaactatcccgtaattttaggtcagcttgttaggagctttttgaacattttggccggcaagccttgctgaaggctatctagcctggctggccagccttgctgatggttgtccagcctggccggctagccttgctgaaggttatccagcctgaccatctagccttcctaaaggctatctagcttggccttggagccttgccaaaggctatctagcttggcctgccagccttaccaaaggctgtccagcttggttagcctgccttttcgaaggctgtctagctttgccaaccaaggctttactagcaggtatatgcatctgtctttgcttgtgtccgctgtgcaaccatagaatatggcaggttgaaagcttcacacactaacctagtagcttgaaggctgcatgctttaacttggtaggttgaaggctaaacacactaacctgataagttggtaggttgtaggcattaagcatggaggtttgcaggccggaagcactaagctataggttggcagggtgtaggcactaacctagctagtaggcaagtggcatgcacaaacttgggaggttagatacaagctattctctacgtgtcttataacaaacgaaaaagcgacatatttgagaactgatgaacaaccgtactagagtaaagaatgtaactaagtgatgtcattatatcccttatgctcaaaaaatacatgtttgggaaatttctttcacttagccattgtctaggttaatgccaggatgttaacttgtgcactaaatatcaacgtgggcactaagagttgagcaacattcagtaaaacagccataactccatcaatatttatttgattgctgcgattaaccttaagtatcaaagctatttcaaatgtctattaagtcatgtctcatacccatattgcaattctgaaatttgtgccgatgatagtaacgattttttccacaaatctccgaaaaacgatttgacgaatgaaattcaaactccaaaaattaacattttcatctagagtcaattttcagtgttagatcatcatcaatggccaagaccaacatatagtgatttttcatattttttatgttattctatgaatatttctgttacccgtgtttttgtgcaagtgacatgtggcatgtaacacaagagaataaattcataatcccactaattaaaatcccccacagaaggcctagtcatggagaagcctcacagatacaacaagaagtcaagattaagagataatcagaaatccaccctgccttatcttagcttcctagactgttgcgatattttgcacacgcaagtgtacgtatcgttataagtagtaaactcaccaggagtgaggtcgatcccacaaggagtgtagttaagtacgtt

SEQ ID NO: 30358 - DNA, 2361 bp, Cannabis sativa
  modified_base (902)..(907): a, c, t, g, unknown or other
ccttagcattagggtgttacaactcactttgtcaaaagtctactccaatggtataccaaattgtgatgcaaatatctcacataacaaaaagtgatccaaatttaaatcacaatatagaaatgcaaaatttatatcacaataaatactatgatttatatttaccattattttattattaaagtttagttagcatgctcatttgtattaaaaaactttcataattattattattttattgttgccctagatttttcccaaaatacgtggacgcggataaaggtgacacgtggacctggaagaaccatcgctcatgaaaatcaactaagtcttagacaaaaaaggaacacctcaaggaaggtgcctcccggaggagagcataaggcacatctttcctctctgggaggctagagccatgctaaggcagttccgggagttatagagattacttgaacaatcacttctcatttaatgttgaatgggggaagacgtattgaaacttccataaacgacatgacagatggcgtaagccccccttttacagcgattacactacaatcgatgagtctagtcacgggtacattatgaggaataacagtagtcaagaggggataaaagattatatccacctaacttctaagatacctacggtataggtcatgtatttcctatttcgtatttgccgagaatatgtgcccctatgaagctaacatagaaggacaagtgattcattcgtagggatctcctcagaaaaacactataaatacccccacaaacagattaaaaatgggtcgaatgatttcgttttaaggaatcgaagagagaaaataggagagaattctaccaagaacattctctgtaataaatactctcattaatacaaaagactcgtggactaaggctcnnnnnngccccaaccacgtaaaaatctcatgcattaaacttcctacagctcttcttatacattatttaattggttgttgaaaacctcggtcaacatttatatttactattgtatgattattattattattttatatttttaataaattattatacgagcattaaattacatattaaatttttgcattaaaatttacggttatacattggagtataatagtaaaagttgatgcaaaaatatcacaaaaccattatttgtacaaaatatatagatcaacttttgcatctctcattggatatgtctaagtaatacttcttacgtcctttcataagtgttgggcgaagcaagtgcaagacaccatcacagtatgataattttgagatgaatcatgctgggaatgtgacctttagtctcttagcattctcgcgagtatgtgagtcaatgagctaaaaactctgtaaatagttcattatctaatcttttcaagttggtgtgtattctgtatttcccgagatgaaccttctaagttaatcgttcatctcgctaatcttctcaatctgtagttattattcatagctcgtctttatctttaaaagggtgagtttgaatatttctaccacatgtatttttctaggcgagttaattgaatgcattaattgctttataacgagttagtttttttacacgtgtcaacaccatattgttactcgaaatatgggtataacagagacataaaacaacaataatttattttatttcgttgttagttatgtggaaaaaaattaaaaaatttaagtaattcaatattaaaaagtaaccaataaaaaataactgattcaatatgcacatttgtgaaattgattggatttgaattattatggtgattggattgaatcaaaattaatatactatgatagaattttaaaattattaaattaattgaaattttaattaaatataagtaaagaaaagaagaaaaaaaacgattacttctaaagtaaaatattgaactcataatattttaattattttaagagtgattattataagttgaatatgttataattttctataagtataattactaatttaaaaataaatttaattaaaatatttttctacgtaaatttaaaattaaaattatataattagaactaaattttcaatatataaaataaaaaataaaaaaaataaagtttgaattaggtttgtaatttgttagttgaacctataataaatatttaaaattaattataaagaatatatattaattatggtggaattttcaaacagtaagttgaactattaaattaaatcaaaaactataaattactattgttattagtaagtaaaatatttaatttctattgtaatattcctaacatatacatatatttatataaacggtgttaagtttaaagtcatcttggagagaatatatgcactaaactcaaatcata

SEQ ID NO: 30359 - DNA, 2411 bp, Cannabis sativa
  modified_base (286)..(292): a, c, t, g, unknown or other
tcaaaactcaaagcttgctcattctacataacaacccctaaaaccacgtcaaatgaactcacacatacatattttaacctcataaacaacctccaaacaacaacaacaacaactaaaactctaattcatgcaaaactatttcctcaaaattcgagaatacaagagtaagagcttaaagaattatacattggcttgagatcacttatcaaatagttgaaaattactagaattactgagagaattcccaaccttagcagccttaggaattcgagagagagagagagannnnnnnagagagagagagagagagggtgaaagagagagaatggtttctttttccttaagaattttctaatttcttcttagtaaatgagatacaaatatatctatctaaatattttagctacttactaataaaaaatcagattattacatcaacacaaattccacaaaaggacaaactacaaatggcaaaaagactattttgcccttccgtcaccaagcaacataaaatggcacttaagggtatttttgtcaactctaattctcaacaattctcgacattcccaatatctaactatatcgccccgctatactaaaaatactacgatgtgattctaatagccaatcaccgcgctccaatgttgtcgggtacaaaacatgtaaaattaagaaatttctatatatgacatataaaatgcattctgaattcaaatgaatcaccataaattaataatttaaaattaataaataatttccataattaaaccctaattatctgctaattccaaatttaagctaagcggtctctacagcttgtatactctcggtgtgccacatggatcttaatttgattgtggccagagtatgcatccatgaagctcaaaacttcgtaccttgaggttgcactggccatcttttctatttgcagaaatggaaagcagtcctttagacaagctttgtttagatccgtgaaatctatgcacattatccatgtcccattaggctttgggaccaaaaccagattggctagccatatgggatatagagcttctttgaggaaatcaatgttagtccgcttgtcaacttctaccttcacagcttctgatcttaatggatccaaaggtctctacttatgtcgaactggatcgtcttttggatctgtattcagtgcatgaaaaatctatcaaggacatattctagtaatatcataatgactccaagccaatacatcactgtttcccttgactgtggaaaaaatcttttctttcacttttggaggtgagctcttcccaactcatataactttggtgggatcttaatctttgatgcatacctctttttacctcttccatttttcctattttttgttccacacctattcgtaaaatctagttcatcttattcttggacaacccctattgctggctgggatgaggttatggattctgctacattcccttcttgagcatgacgatggtcttgattgaaacattataataacttttggcacctttctgattacctttgttccaatgcttctggtatcgccagaaaacttcaaacataagtggcaaatggacatcactgctccaaaattgaccagaaatggtcgtccaaaaataacattgtaagttgttggacaatcaactattacaaaagtgttgtaattgaaagaggacactaaatttctttcagagacatctccatttattgtcaaaggaagttgtattattcccattgggattagcgtgtctttgaagccatgcaatttaatcagacaaggtaatagattcgcttccaccagaccaatggctttgaaggtatctttaaaaatgatattgatagagcatccattatctacgacaatcctagaaacacttttattcgctatttgttattctatcaccaatggatcattctaaggaaaatgcacatgcttggcaccgtcttctttgaaggtcattggcaaattcatcattcgaggactttgtacaggtgattgtactaggtacaaagtctcatcttgctccaattcatttaagtacatctcttgtggatttttggttcttttggaaatatttggtccactacaaatggttgtcatgtgacaatctagcataggcagggctgcttcataagaatagggattttaaggattgaaggatataataattctcactactggagcattttgtgcccctcaaagggcattagagcttgaattctaggagcttgagcatggcttactccctgaggaggattaacagctccatgttatcccagaatggaaagttgtccatgtgcaaccccctaatcctgatagcacgctccactggtgcctggtcactcagagggactgttgggttttataccctaaataaaactcatttcaataagatcggaagagc

SEQ ID NO: 30360 - DNA, 2055 bp, Cannabis sativa
tgatcatactttttcaaaaaactaattaaaaacagcccaggttgataatatgtcaacctgggcgctgggtccagtttcagatccttagactattccgcttactccctagaaatatttcaatcttaatctttgatgaaaacagagaatatgcccgaaatacttttcagaaaaactcctcggaatttgcccaagttgacaaaatgtcaacctgggctctggccccttattttggcctccaggttgatctgcttcttccccgaaagtacttgttgcaacatttttgatgaaggctaagaatatgaatgagttgaatttttagtttcatgcttggaagtggttcaggttgacaaattgtcatcttggacgttgagtgcccgagcaccgggggctccaggtgctcaaaaattaaagttctctaaatctgattctgatgcctcaaatatgttcgtggtatatctagttcatgtactctagtgcaaagtttgacccattttcatttagacggtcctaaaaacttaaaccttagttatgtttgcaacttgggtgctgggtgaaaccctaagcactcgggttgatttttgaggtgttatttcatgtgttttccgctcctggactctggacttggatgcttcatgtcttcatggcatagaacattagatgataatgagttggaaacaacttggcaggatccaaacacccattctggagttcctgaagtcaacataggcgtagggctagggttccctcccaggtcgacttgctatgatctgggactactcaactccaggatattttctttcttgccatgtttcaaacattgatctccatatcatcatggatgcttttggtgtaaacacaaaatttacacaaatcgtttttgatgaaattcatattattttaattatgtttcaccgacaatgttaagttgtgctatgaattaatttgtctttggcagtttggaagtcagtacatatattaactattatgtttttgctttttctagctccttttatctagttgatcagacttgtgtttcctcagttaggtttttcttgcttattaatagtacccttcaagattttttcacagctaagaggggactcaagcaaggagatttgatatctcccttattttttgtcattgacatggaatatctcatactgatactcaatttattcttagtagttctgagttttcccaaagtacttttcccattagatgcttgggtattccgctatgtgcttcttaaatttttaatatagattgtcattcattaaatgaaaaaaaaaatttggctagaattaagctgtggagttctaggcacatctcttatctaggtagaagtattttattaactcagttttaatgaccattcacacacattaggctcaacttatgattttaatcaagtatattatattcttgagtaaagcaatgctatatgtaggtcccatctctttggaaaggagtttttgatacaactagcccagggcttgttgcttggaagactatctgtcattctaagaacaatggtggacttggcttcaaaaatattgaatattagaatgtaggagccttaagtaaatatatgttggacattcctaccaaaaaagatattttgtgagtgtgttgggtgcattcaatttatgtaaaggatcaagattggtggagctatgaggctcctatgagctctagctggtactggaaaaaaatagtgatggctaagaacataattagtggtaaaatttaggctaatataggatgaactttagcatttttgctatttgttataaactttggccgagaattagtggggaaaaaagtagttctccatcatttggagtataggtagagtgttactaaacataaattcaatgcttggcttgtctaatggaagtgtcttcaaactagagtttgtttgctcactttcaggtgcatttctgttttaactgcatgtacaataagaaaattcagatagctttatgtaattggattgggataaatatgcatcaaaataatttagattattatttgaaataggtgaaacgctgcaaa

SEQ ID NO: 30361 - DNA, 3237 bp, Cannabis sativa
taaagtcggagagaattaatgagagatgacgataagtacatggattttggctatatatatttcctaattaaaatcctattcctattattaaaactattattacgtttttttaaaagattaaaattattattaattatcatattttaaatttaaaaaaaaaaaaatataagaaactatttaaaaatttaaaacaactcccgcataataattatagaaaaatctccgaaaacattttatttttttgttaatattacaaatataagaataatttttttacaaaatagacaaaaaaaaattaaaaaaaaaattacaaaaataagtcaataatttaagaagcatttcacagttcaatcctaattcctaacactctcacttcaatcctaattcctaacactctccctcgttttccaattctattaagttctttctctttctttctttctacttttctttctttctttcacgatcattgaaactttgcatataggaaaatccttcccaatggcatttggaaaatcaatcctcttcatcaccattctacttctcctccaagaaggtacttgagtaaatatcttgattttgcattctatgttcttctctcttccttttttactttgatttgatgatcttacgagatatatatatatatacattgatttatattgtgtttctatttttgacatgttcatgtgatttttttctttatttttttttttgtttcttgaaaatataaattttttcagtacaatcgacagagaagagttctgagaagacattcggcatatttttattactaatggttattggactctttctaatatggatgctgcgtaagtgagtttgttgagtttgtttattgttttttttatgtcatactatgttttgtttcaatatatattaatgtacatatatgtatggactttctttaacaattctttaataatgtaaagtcctataattgtactgtacagaaattttcggagcactatttttaaataaaatattatatatatttaatgcaggtaatgccccagagaatcaaccacagaatcaaccagaaaatcggtgtacaatgtgtaaaaaattatctgcaaatttttgaccaggattgtaatctatagtacatgaaatttatattatatgctccaacaaattaacaaacacaagagctaaaaataagacagactcaaaaccaccatgaactcaatcacaaatttacatccagcagagtaagagaataagtataggcattatcttccttattataatcaaagaggccaaagtttactaccaagtcaggtcacggaccaaacaattaagcacttggtacaacacactattgttaagtgagatcaaatacttatgcttatctcataattgtcaactcctacccctgccaccctgaatcctaaccaattgagctacggaataaagaacttggaacaaacttgattttctagtctaataagtaactatatatatgtatgtatatgtatatgtatatctaagtatacacatacataaaaaggatgcacgtttaggttctggaaaatccacaccctcttaaaggatggaacaaagagtttttgacatttaaaaaaaaattattacctcataaccttttctccttccttcacttcacttctgaaaaagccttgcctcatgagcataaatgtctcaagtcaagaaacacttgcacaaaaataaaagacgcatagtcatagaaagtcagaatagattaaaatcctattcctattattaaaactattattacgttttttaatagattaaaattattattaattatcatattttaaatttaaaaaaaaaaaagatttctagtacaggtatgttatttttcaatagaaaaattagggatatatcatgtttacattttaaaacccaaatcaaattaatatacattcctaattcacaagcaagaaaatcagggaaaagaaactttgagcgactaagaatatcaaaatgaaagaaaaactactgtaaaacgtccaacttgtttaaatccagaatgaaagtctcaaatgtatacaacttattattctacagttttattaaaagaaagaacaaaaaaaaaacactaaaatagattggggagagaggaaaacataaaacaaaatagaaatggtaaaagagactactcatttcaaaataaaaggtacgtaccgagatccctttggtcacctgaagaagacagagagagataaggagatgagaggcgggcatgaaagaaacgaggaaatagatggtatcgagatcctgagcccaccccatcgcctccaccatcgatacatagatatacatatatggatgcactttttaaatgaatgcttagtattaaaaaaaatataaaatacttatttgaattttattttttttaatctaaaatagatatttaataaaataatttatgattttttaaaaattgttcttatttgaattttgttctttatgaaatataaaataattttcttatttaaattttattttttgaatcatcaataaacaaatttaaattaaaaatatatatttaataaaatagtatacgtattttttttagattgttcttaaaaaatatttaattattaagatatttttgaaaaaaaaaatatagtagtttaatatgattttttgataattaattaatattgtaattaatagtaatcaaaataaattataatattgtaatgattttgttagtgaatatggttatgcggttttgttagtaatatttttttttgtttattattaattaatataaattataaaaatagaagaaagaaagagaaaaaagaattaatgtggtttacctagaaatattttttatttgaagaatatgtttattagtttaaatttatttattaaaaaattaaatattaacaaatatctttttcaaatttgaattatcgttgttgaattataaatgatctcttaattttagaaatttaaagttttaactctaagcaataaaataacaataaaaattgagccttatgtaaatttcgtataatgataagaataataaaaataatatatataaaaatctagactttacatatacatattttcaaccttcccaaatgtattgcttcaataggatgaatgtataatttacaaatacatatatttcaaccttcccaaaatgtattgcttcaataggatttttaaaattatattctcctctttcacttaatattaattttaagattattaatagtg

SEQ ID NO: 30362 - DNA, 2879 bp, Cannabis sativa
tatatcatgatatcgaaactgggaagtgaataatatatgataaaaatttcatataagtacaggaagtgaataatttagtgtattctggttgtagatgaatgtttgattgaattctgttttagtcatttcattctcatctgtgatagaaaaaaagtagttactgttactatctccattttgatttaggtgttattgtttatattatttgtatgcagtcaaacttatcaagcagggtaaaatttacacacctatataaaattacaatgatgtaagtgttcgctattattgttagaagttttgaatgtttgtgttttgttaccttgaacatacttggattacaatgattgaaattccatgatatgccataatgtagattcattgcttactggagttgaatatttctgcagtcttactattttgatacatgatatgctaatcgctgatctcctagaaagatgcagctattattagagataaacttgtatgctttactgatatttaatacaactgtgtttgattttttctaccgtgcaactttttgcagattagtcagtaccttagcttacatgctcgttttggcattctccctagtgaacttcttcaaggaaaggctgcagaggtttgtactatttttctcattaacatgtatttattcactcgttgtcatctatatatcttgagaaagctgttcggttttgaaacctttttgattaaatatgatttacacctaattttcatgtctctgcctattgttttcttcaatttactgtgactttgtattgacatgttgcctattgtctctggctgctcattccagttatgattagcccattaagatatgtgtatatacgttttaattgttattagttttgaatatgataaagcaatattgtatgtggcagggcagaactggggtcgagtcgataatttcagatacaattgttgtttcatatgtatggatgcatcacttcctgtgctggatcagtatgtggatcaaagagtagactgcatggtagatgctggattgctcgacgaagtctatgacattttcaatctgaatgcagattatactcgaggcttgctgcaggctattggtgttcgggaatttgagactttcttaagagagaatgttgtagaagccagattcgataatgaaagctattcaactgacatctctgtctcattgaagtcggtggacacgggtgataaaatcttgaaagagaatatgagggcaatactgaactcctgtgatgatgatagtaagccaagcattatattaaaagaagccattgacaaagtaaaacttaacactcgaagactcattcgtcgtcaggtaaagataatattcaattattttacctgtatttcttgtttggtcttatcttcttaataaatcatttgtattcttgaaatagttactttggccaactttagacacctaaacttcaagggtcacaaaaaattcatattccattattcatttcatcaaaacatttaccatttaaattatcaattccttactttactaagcatcgtcctaagctgagtttacactagataaacctttggtaactacttttccctttctccaattaaatttaataaatgactccatactttttatgatataagattgatgctacttcatcatttatttattggcttggcaagtgcaatagttgacttttggtgtttgcagagacgaatgattgttcggctgcagaaattgtttggatgggacatacatgtccttgatgcaacagactctattctaagtattaactcttcgtccctcgttgtgtttttctctttttcgaaattttcacattacccgtataatcatttcaagtctcaactatcactctaaattgcaggtaaatcagatgatacatgggctaaccaggtagttgagcccgccgtgaaaattgttagatctttccttagccaggaaggtagttcggtcccgggtgaggagggtccaaacggggttggaacaagaatactcgaaagggaactgtggactcagtatgtatgcaaggtcagcaaagcttatgtttcttttcttgttccattgaatagttcgagttagtttattctgttaatgtgagttagtttatcggtttaggcttgtggagataaagtccttagaggagcacatgagtgggaacaacacatacagggacgtagtcatcgaaaacgaaagtcaaaactgcgaaaatcgcaagttcattttgttgcggaaaagcaacatcaagctagccagattggagatgaattttcagtgtctgactctgattatttcctaacaagagaatagttatagcttttgatttagaagatttatggtttctatggatggttgctcaagtgaagtgtgatatacattatctcaaaaaaataaaataaaaaatcattattttgtacactgctaaattatcaataaatttcaacatggttagcttaatgttactaaatttcacttcttctcacaataaaactcaccaattttgcaacttttgtaaaatattaagggtgtgtttggaaacaattgtgtaattactatgcagtgtaattactagcttttgatttaaaacacattttatagtaattacattgtattttaaaatacaaggtgtgtttggatgttaaatgataattacatgtgaattcctaatatcatgtttggcatgatagttagtaattacacaataaattaatatcataatatttaaaaataaatttcatcaattaataatatataaataaataataatcttttcgtacaataatgtcaaaattataacaatttagtagcaaatatttaaaataatttttttatgactatctaattgttcttgcgttccatatattttgagcta

SEQ ID NO: 30363 - DNA, 2863 bp, Cannabis sativa
  modified_base (819)..(819): a, c, t, g, unknown or other
  modified_base (946)..(964): a, c, t, g, unknown or other
  modified_base (2836)..(2837): a, c, t, g, unknown or other
tttggtttgggcggtttacgaatttttttgtacaaccctaagtcaaacagtgttaaaaatattcgttaactaaagtgaattaaatagaacctctatttatatgttcattcaatcgagtataccataaagaacactgttctttgtatggatctatgggcatgctattagcagggttggatggcaacgagttgactaagtgaaaaggaaaaaaaaaaggatcagaaatacagaagcacctggcttgtggcgacactataaatcttttcttcaaacctttcaacaattttcttcagttcaagcaatccctcttggccaaagaaagggagatcttcttcaatgtatccattagacattatataagtgagtgaaaatgaacatttcatgtattttattattactaacaaatatatattgcacacacaacacacatacatgttcattactaaaaaaatgaaaggataaaagtcttgctgatctcaatgcttcatgttctcataaatttgtcttactgatcataggcatgggtacagaaaaatagctcaaactaaatcatatacatgaaaagaaaattaaatcatattctttctataaaatattttagaacagacaaaagagaaatcttagtgtattaataatcataaggttattgttcttataatattaagactaattaggattttcacctttaattttaacatgtaacaaatcatgccccctgaatttttctgatcgttaaaaatttttcttgaactattgagattgttagatttaaggcattttgtttaatttattttaattttactattttagtgattgttnatgtactaaaccatgctctccaaactttgatatctactaaactatgtctctcgaactttgacatatatacttgatcacgctccctgaactttcatccatgttagactttttttttttactaaaattnnnnnnnnnnnnnnnnnnncaacaatctcaatagtttatgaggtatgtttaacgaccttaaaagttcaggggcgcataatttttggtacatgtcaaacttcagaaagtaaaaatcctaattaacctaatattaacaggatggaaatgtctagttttaaaaggagaagttttacagactttgtaatagtggggttccataaatttatgatattttagatgtaaagtcaaaaaggcctaacacgccattgtaagttcctataaatgataatggaagacgaagataccatatatggttcttcctgtaaagacaacaaaatctacaagttataataatcgaagacactatacacaactcttaagcaaagttgttagcctccccaccatccaaaggcaatatctacaccataatatctacaatatcttacaaaaataaaagtgaaaagataaaagtcttgcttctcacattttcatgtacaatacataatatattatgggtgtcctgttattaagatcgtaccctacagatggttgtaatagcaatttaaagacaaatattcatacatatattaattcaatgtgagccaaaataaacaccataaatctatactattgatctatactttaaagtgtgtttgctttagctaacaatgttctttataaacatatataatataaataaaatagatattagaacataatcaacagttgtttcatacttcaatgtgagaatgtctctctcaagtataacacttgatgaaggaaactattttttagtgtaccgtcagtatgttagccatgttaggtagtgagcaactcggagtgtccattgatctagtggttgtaggtaataggcatcagacaagtttgaaagaaaacaaggccaccggtagttgaccacaagagcaatagtcctgctcctacaacccaaacatctacactaaggcaagaaaaaaaaaaagagctaatacaacaataaactgcatagtaaagagccacatgaccatgttgtaaactagtcatgagtataagcttagacatcgtgcttaaaaaagaatacacttgtcttctttaaaataaactttttttttatttaagcatttatatattacattgcataacctgggatctttaaaataaacttagtacttacccatggagatttaataattggaaattcgcacttggtatagaaaagccttgcaggtactcatagatttcaatttttttttttattacaaatagataattttattcaaaaactgaatagtacaaacacaaagaggctgcaaacaacttcaccagctctctacaatttttactacatatcggtcacttttttggagttattaactgctgaaccaagcactctatacttaaccactctcttaatttctctactgataaaaccagtagcaaaacaacaagcataaaacacacagttgttcctatttttccaaatgaaatacaaggttgcagtcgttaacacattgagcacctgctatttcagatcacaagaaggcttcattttataatcccgcagctcctaaattgacttcggccagctgatctccccaaaccagctgcttatatcatctacaagcaacttagtgaacaattagtccatgaataaatggctgtgagtttctctttctaactcacaaactgagcaaagctttgagattatgggcaaaaatcaaaccaaattgtcccgagtaagtagatggttattacaaatctgctagaagataaatttgtgcttgggggacaacaagtttatgccaaactgatttagcatagtcaacctccgaggcatcaattaaagaagagtataaatgtttggactgaaatttaactctcctaacagcatgtgaatgttaggttttatgccctnnataaaactctttacaatctgattagt

SEQ ID NO: 30364 - DNA, 2224 bp, Cannabis sativa
atgttacaaatggctcaattcctgtgagtacaatatttttttctttaatatttggttaaccataacataataagatttggtacatatataatacaaaggatgagaagatacatacctttaagtagtagagcatcgattagattgttgtaaaagtcaactccttctggattgacaccaccatatattccttctgtactcacaaaatggacatatcgttttcaaaatcaatataataaaatgagcatgctttttaataaagtggtacggtacgtatatatagaaattaaaagaagaaaaaaaaaacatactaggcaagattctggtccatgaaatggagaatcgatagctgttaactccaagggacgacataatttttacatcttcctattttgaacatcaaaaggtactaaattatagataaaaataacgtaaatcatgtataatcgtaaaaaagtgacactatatatatttgtgtatgaacataaggccaactctaatagagagatgcctatattagtgcttgttactaagtgaggacagatcgagtcataaaataatatttatggagagaagataagaaagagtgttcattgttagtacaggtgccacgaatttctttttctctatgctgtgggatttgaagtttctcaatatatattttttaaataatttaaatattaaggctggtgacctacctcatacacacatctatttcataattaattctttcaacctcaaaaaacataacatatatttcatagtatgagtgatcatggatggctcacgtatgttttaatttattaattggtggcaatcacaacaaatcacaatagtggcgacagctagaaagacccaattattacagtgtacagtgagttcatttttaatttgttctttattttaccttttccataactaaaaaccctttaatcaacttaactatatttatgtttcctacttgttccctacaccgattctatctcctattttggtctctctcccacagaattggatcaaaatcaactgtaatattaaagttggttgtgatataatatgcgtggtagttttggctagagaccaccaggagttgtttttgtggatagctactaatatgctcaatttctcagatcctctcattggggaagtcgcggcgtgtatgttaactatagaatcagcagtctactggaaacatctttttgtgttaatagagagtgactcagacaagattatcaatgctttaaaggaaacatgttccttttgaggtatattactaactatgtactacaatgtaaacaactctttaatttgttttgcagttataatttttcttttatttttaaaatatgtaattttgcgacccataacgtgactaagtgagctctcgcttataatgttactggtatgattgatccttcatctatacctgataacattttatgtaataagggtgaaatttaaacttttctattgtttaatatacagctttttcaaaaaaaaaaaaaaaataattgctaaaaggtaatacctagcagactctcagagtcaaaataagaaaatatccctaactaggcatcacttatagaaagtgataaatacgtgtatatatatatctaaaagcttttctacatagtatacataccagataacggtgataatggtccacggctatatctccattgcttccatcgattatgttacctgcaatataatttatatgtatacattatattagtcatgataaacaatattaattaatctaatttcttgtcataaaaataatatgcagttgatttttttacctggtatgtgtgtataaacatcccaattatttaaccctttaccatcggttaagtaagcgccttcatactacaatcaagagtcaaataaatatatatattaagtgcacacatatatatatacttaatttgtatattaaccagaaaaaggagaaacctggtaagcagaagaagcagtgccaaacagaaaattagggggtaatggagaattaatattgctgataataagatcatcacataatatgaagggcaatgatgatattgatattagaagtagtatgatctccaagaccaataatacaacattttgaagcctatgatgaaatcccatgtcttaaaatgaaaaaaatggtcaactacttttttccttgtatgatatatatatatgcatgggctctatcctctatatatatatactaaaagggaaa

SEQ ID NO: 30365 - DNA, 1581 bp, Cannabis sativa
tttttaatttttacggtttaaattgtttccatagttattttagtatgtaaatttaaattattagcttgttatgttgttattatgtaaattttagtaaaaataccaacaattcttttattatttttttaataaagtgaatcagacaattttttcttaataaaaaattgcatcaaatcctttctcaattatcgtgccgattaagttcaaaataagaataaaataataataattagaatttaaatttaaaattattgcaaaaaagaatttaaatttagataaattaaaaaaaaaataacctttcaaatgttcaccgccagctacgaaatttccatcgacgaacagagtctgaacaatcggcggcggtccaaactcagcttcctccacatacttccgaaccctcatatctctcaattcagctacgccaatcaccaattgatccttaatctatcaattcaacaaccaaaattcattaataaaaaagtaaaaaacctagaacaatgtaagtaactccattattcttaccctattgatcgccaaatcaacatcgaaattcctcaattcgatcttctcagagtacgattctgcacccttgacctctacggaagaagactcatttcctccatttacaaggttcaatggcgtcgatgggaagtcccagagatcagaatcgacgtaggagtcgtactcttcgtcgccgaacttggagggacgggtctgcttcacgaggaggaattcggattggttgagagggttgttgatgatcagaacgagcttgtagataatggcggccatagctaatcggagaagattgggggaagaatttgaaaactacaaacggtacgaaacgacagtaagtgatggaactgtctaagacaaaacgacttgtcgtttttgttaggtgggagtgaaatgaacggttgaagtgaagagcccttcttaataatattaataatttaatataccataattacctaacctaacggtcctaacctattttaatcacaagttaggttggaaagttggaatttaaggaagtaggaagtagattgggtggtaattacaagtttaatagccaattagaatcactgtaaattatataagtcggattttttgacacagcataaaatcggtacggacttggcatggggtttggacacaattaacacaaagataaaaacttaagcacaatacatatacagaataaaactaacttaaaaacacgtttaaaaaactcgatatttgataattgttggtagaaatcttcagctttcctcaaagtgtacacgacaatttaacagccacaacatttccacgatagaataatctctatatgaatcgttctacaccaaatgatatatatcgctctcaataaattgttttgagaaattcgatagaaattttgaagagaagaaatttttctgtgttgaaaaaatgtcctcttctattgttttgatgtgatttatatagaaaaattaattaaaaataaaacggtaagaaaatgattatgtgattgtgtaagatattggttcatggaagaaaaaaacaaattattgactgattacttttactgttcatttaacg

SEQ ID NO: 30366 - DNA, 3411 bp, Cannabis sativa
gcaaaattctctcactgaggaccagtgagtgtggcttaatgcaccgatcagagatccaagaaacgttttccgagttgatggtgagtacttcgtcattttcaaagatgattactctacatatataacttaattaagttagaaatttgaaatgtttgagaaatttcatgagtttctagtaatgactaaaaactagttaggtaagttattaaagatcttgcaaactgataagggtggagaaaatatttagatatgcagttcaaaaatcatttagttgaacttcaactttattccaacttacctccccagaaaatcaaaactcacatattgatggaaatggtaagatctatggttagttactagcaatttcaagagtccttctaggaatattccttagaggcagcaaacgatattctaaatggcatcccatctaagtctggtcctaagataatcttggaatgatgcgatggtcgtatacttaatgtacaccattaatatatatggatgccctgatcatgtccttaagaaaagctagagcatgtaactgaggtttgcatgtttttttattggctattctaaagtgactagggtagactattttgtattcatcaagacaaaaaagtgtttatttccgtaaatactatttttctaataatatgactatatacgtaatcttaaaatcttgtagcatagtagtggagatactatttattttaaatctaaaagtgttccatcatattctatgaactgtaaaagatgattccactgtctcagttgaatcgatgcaagttatgacaactgaagatgctaataccactgatgttcctggataaaaagccacaacatctcttcgtattgggaaagtttctaagatcccacctcattatgatttagatgacactagtgatgacgatctattgttcgtttaaacaagcaatgagtagtcctaataaggaactatgactcaaagtcgtgataactacgattcaactattcatatggataaaccagaagttttcaaaatataaagggacaaaagaagggaaactctgctagttaaattggtctattcaatggacttaagcaaacctgttcctagtatcatgggtttgatgagattatcaaagcctcttttggtatatctagtatttacgtagatgatatcttagtcatcgaaaataatgttaagaaagtatcagacgtgaaataataaattattttctctctcacaagcagcttacattagtaaggtgctaaagcccttttcaatggctaactctaaaggaggtctctttgattccagagataagagttcatttatcttaattaggaatagtcacaaactattctagaaaagatagaggctaagaaaagaattccttaagcatcaaaagtaggaggtattatgtacgctctggtgtgcactagactagacatctattgttgagtggcagctgtaaatctataagggtggtactttaaaccctttaggctacaccgactcaaatttatagactattgtcattgctagaaagtctacatcaaggatggtgattactctagagttggagaagtgattttggagaagcgtaaaagcctatccagaatcgctgactctactagagactaaaatatgaagtttctccaaggctactagagaaatatttagactcaagaaagttatatacaaactttggcgttattctgtacatggattaactactagtgttacttcatgacaacacaaatgtaattgccaaatagtaaagaatctagaatcctaagagaagtaaagaatatagactttggcgttattccacaaaatcatagattttgtgactatggagaatgtaatggtggagaaggttaatactaaatataatctatcagatcctattacgaagataatgccatatactacctacatttgatcgagacattaagagcatgagattaattaaaatgcacttttagttttatattagttcaagttggattttttggggttttatgccctgaagaaaactgaatatcaatataatcttattcactatcaataaagatcaaaaatcatgtcttgaccttgtcatatgttttgttcacatgtttatttcatgattatatgtttaatatataagttttattacatcctgaacatatagttattcacaattatagtgatgtcatcatagtagaaaataattatgattatatgcttcaaactatttagtctcaagatttatcagtgcacaagatttacacagacatgataatcgaggatgtggtttacttacacttgaataagtagaatgtcttttccatggcattagtaaagtaaacttgtatgagatatattggctatatagtagactgggccaatattgacaatagaaaagatatcatacactgaccatcatatattttctaagtcaatgtcacttagttaatcttagatcaattgatcttaatcctgtgatggataagctttaacctaactacgctattagatttctttgacttgtttgttattgacttacccgttagactagcacatacttacatcttgtgagctcgatagtgcaattgagtgggagtgttaatcatagatatgggcatctatagcttgtatgtttgtcagaagtaaaatgatggtttccttatagcatagctaaacatgataaatgaaagagctattattttagtaactatactagtttactgaaatatcatctacaataagctaagtattttaaagataaaatacatcgaatggtaaaatgataattttgtccctactcaatgtaaactgtctataaaagatctttcattatttagattgaaacaatggataatttatagcgtatctatattggatgtatagagcgttaatttctatgtaattaagagtgtaattttgaatatttagtggagttaggagaaattaataaattaggaaatttacttggtaaatttcatatctacttattgagagcttgatttcattgagctatggtccccacaatatcatcttgtagactcaatcaatttatttatttaatcaattggaattcaaaattttattatgtcatattggagagctttcactaagtttacgtcattttaagaacaaacgaaataaggatttatttgttagttatgacatttttgggtttaattaataaatatattaaaattatattttatttaataattatttataatttttaaactaaaatttagtatttaaataattagatttgataaatgataaaattagagaaagacaattcatttcacttaagctaattataaaagatggaaaaattcaaatcatgggcttttctttgtgacttcggccatgatagaagtatttagcctaattgtctttattttagccaatctcatctaaagata

SEQ ID NO: 30367 - DNA, 2555 bp, Cannabis sativa
  modified_base (2480)..(2483): a, c, t, g, unknown or other
tcaggataaacaagcctgatctaccactagtttcaggggaaatgtcaattgaaacagcttggattttgagcataattgtggcactaactgggttgatagtaactataaaattgaaatctgcaccactttttgttttcatttacatttttggtatatttgctgggtttgcctattctgttccaccaattagatggaagcaatatccttttaccaattttctaattaccatatcggtattttactattctttttcttttctattctttaatataacttttgttattttctatttttaatattctttaaattttgacactgaaaattacaaaacttgtattgtgtctacagagtcatgtgggcttagctttcacatcatattctgcaaccacatcagctcttggtttaccatttgtgtggaggtaggtactctaaaattatatttatagatgattattattaaattttattttaataaaaattgaacatttattattttgtattattttaataaaaaatttaccacataaatattttatgttttcagtttcatacatttatatactatatttcttttttttttatacaaattaaatattatatattacgtttttattacagtcgttactacaaaatttgttaagtgttgatttagttaagtaaaatgtcacatattatattagcgatcaacttcatttttatttttaaaaaattattaaataatcttaaaataaataacaataattattgaaatatcaagaaaaagaacaataaaaatatatttttatttatttatttagtatttataattaaatataatcatttagttttttttttcttcaatttttgaattatttaatcattttttattgaaagtagacaattaatttattggcgcacgttagtttagtcatatttaataagatttaacaaaattagaattaaaagctgcaataaaaacgtaacatatagtatttaatcagtagaaaaaaataatatataatattaaatttgttgaaaaaaaaaatatatggtatagaagtgtatgaaactaaaaagataagatatttataccgtaaatatcctttctcgaaaatacaaagtcttagccatttaataaaatagaggataagttcgataatttttgtaaaataaagagtaaataatttttattatatttaaattgtttaggtttccataattatttttctttgcacaattttgtattatagctattttgctagtatattattattagtagtaaattacttgtatattattattattgttgtagtcttgaattaaattaatataaaattggaacatatattgatatatatatatatatatatatataagatttttttttaatgtggagaattttaaaaatgtgcaatctgaatttattataaaatagatctcactatatttttggaatataaaaggggtacatggccactacaatgtagtgtagtgtaggaaatttttatttatttatatcgtgggtcccacttattcaatattttgtttttttttaatttaaataatcctaaccaaataggtgggattatatattttctcctaaaattgaaaaaaaataatcttaactcatctattaatatctgtctgaaaatcaaatgcccaacatcaatccaaactaaaataacattatcgtttaaattaatcataaaattttacatctatcaaattgtgaaaaattccaaatctacaaactcatctcacgtagcccaaccaccttcaacctcgaaaaccatcggccacctccatcacttatctcacacagcccaaacatgagagatctagtcatgagatcaccttgccatcgccattgagtccctgcctagttagatcgaaagtgtcatcacagtgagtacctataatcgccatcaagctcttatcgtcaaagactgtcaaaacaccgtcattttctaggtcgacgacgcctcttgagtgttggccttgcaaaagcccacgtctctgcaatcatgaaagaagaagaagacgaggcaaagaagaaacgatgagcagaattttttttttaccccaattaatgcattattatatcagtggggtccatagtattgaataaaattaaataataaattaataaaaaagtaattataaaaaattggttagatgatacagtatatgatggacacgtaggatataaataacatttcttaattaaaatagaaaatgtcagaaaatagagttgaataaaaaaatattttaatcaatcttagtttgaatatgttgcattcaagatcacgatattacacttacccaattagaacaaactattaaataccatacaaataaggcatttagaaaattctccacggtaaaaaagtcctatatatatacacttttgttttagtttaggtaattattgatcatctttggtacataggtagtcataattctagaaaaggaaaaaacatatatacagtagaacctctatnnnngaatactctattcaagaataacttctaatttgttataaaaaaatcaaatctcaattcggaccagttataaat

SEQ ID NO: 30368 - DNA, 2968 bp, Cannabis sativa
  modified_base (2817)..(2826): a, c, t, g, unknown or other
ttttttttttttttgagatgagatattcaatttttatgttctattatgtatataattagtaaataggccgcattttagttatagaaaatttaattatatataaatattaattaaataataaaattatatcaaataattttaaatatattttgatgtataattttaaaaaatatatatttgttcaaaaataattatatagagaacacaaaagaattttaaaaaattatcatataatttcttttatataaaaaaaagaaaatacgtaaagatatatttttaaaacaattgtcatcaccgtaacttacttatagttattactacatttaaagttgatgtcaccacagtacttcacttgtaaccattaatatctttcccaataaatttactctgtatgtaaaataaatcaaaacatgatcagtacgtactaacttgtatatatataagtgaatcatcatattataaattaattaagtgaatcattagttattatatgtacggttatataatttatttatttattaattaattaataatctttaattttttaaaaaaaattaataatctctaattaaataaaataaaacaaaaaaataattaattaatcatctttaaataaataaagtaaaataaaaaagaaaaaaaattaaaaaaacatagatagatcgagttatttaaagaaattttagacgattaactcatcgccttatatctatatatatagatactaattttaagagcaattattagagacctttaaatggccctctctaattttattttggttaatataataattattgaagttttaatggttacataaccacaatattttttttatgaatcaggatatgtattactaaccaaaacaaccataataggcaatacaaaactagcagcaccatataaaaaatgacctgaaaatttattgttttcatctatattacaacaatgctatctcattttcacaattgttctatccattttagatcttgctttttatttttttgctttttcataaccataatattacatttacctttaatcgttagatcattgttaagcgggtgtaattaatttagaaattaaataaaaataattaataaattacttataacttatactaacctgattttatttatttgcttatgaataaaaaagtatttataaatattaatggtaagaaatatatcattaaatattttaattaaaaaattaatttattttaagtatatcgttaatttgagtttaaaaataaaatttttatctggcctattatagtagataataaaaaaatattactctaaatataatcaagtagatgattggtaaaaccagttaaatatatatttaccaaaaaaaatctctttgatcatttagtttggtcaatgtttggttatcagagtaactatatgtattaatgaaggattaggtgtgtttgacttttttttttgtgaaaggttgtttgtttgttatattttgacattaaaatcaatttaatttgaaattttgacaaaacaaaaaataaaaatttataagcattgttataggaggtgatcatcaagatgtctaacacaactttagaattgattggtgtataattaaatattaattatatccacataataaattttattgagagagagagaggcggctatacctttgattttaattacaatttatggtagaatttggacaatttttatttttcattggaatttttattagtacatattttaataatatttagagtagttacaatataatggaattaatggtctatctttctaagaattaagattgattattttttattgtaaattgatgatgactccttgaaataacttccactatataaataaagcccttccatttacataggcagagagactttaatcatatcacacaaatgtatgaggaaatggtccatgattttgattccacttggcccaccctacttcattttaatgaaatgacccttttgacccaaaaagggtaaacctaaaaagaaatcaaaaaaaataaaaatgaatgaacatacatggaagtgtaaagtataccaaaggaagaaagaagggtagagaacaaagatgccctaggaataatcattgatattgcttaaggtgaatatatattttttatatatttatacacacacacattgtatacatcataagaaagagattctttggaggaaagaaaaggcatatttatatatatggaattaagttgcctaaattctcttgcaataatattgatgtgcttgcatggttatcaatatggctaaaccctaacctgagccgatgtttggcatagtacaaaagtaagagggtagaaaaaattaagaaagaaaagatgtgttcggttggccacatagaaaaaagaaaaaataaataagtaaaaaaataataataaattgattttaaccttccaaaaatagagagaaaatagaggagaatgaaatattatagtaaattacccaactaccctcattatatttaataatttaaaatatagaaagaaaatagtagtttaatttatttccttctcattttgatctttctttctaatattttttcttccctcttgatttttttttcctctatcccaaacatagtgtgagtttgaagaagtaaaaaccatataattgataagaaattaaagaaaaaacactaaacatttaaaaagttctctataataatatattttcatgttaggtgtggctaaaaacattgaaggagaataataattttattcttttcaactttggtgttgatgggggagtagacaatccatctcctttttattattattattatnnnnnnnnnnattattattattattatataatttgttaatatattgaaaagtagaccatccactagggtaagtgggttgatcatttttgtctctctcctttcaattgatcatactaaaatgaaaaatgttaaataacacaccggtgatgtac

SEQ ID NO: 30369 - DNA, 1444 bp, Cannabis sativa
cttccgatctatatgtgtttatttacattgttttagatattcatatttaggatgttaaacaacatacatgatagtaaatctagatcctggtaaaatatattctaacactaagaactgctctaccacttctcaaagactttggctcgaaacattgtttagggaagggtgttcctcgaaagggatagagttggacaacacaaagatactatttttataaaaagatttagaaggagccttaagaacatccttatagcttagggaagggggataagcatgcctatcacaatgttgaagaaatttgtcacacttgttaaaagtatgatctaaattcctacaatggtaatagtaattatgaatcccctcgtaaagaaatttaagccatttggtgatggatagtttcctaaagtggacattcattccactatggagaggcttggtggtgtcaaagagaactctaactctaataaagggtattatgtagtcatacagggaggaaaggtgcaccttaataaggtcccctatagtatcagctacaatctgagctaaactataagacatatttccaaaaggaatataatggaccagcatccaaaggggaatatacctgagatggtttggaaggattgtgttaaaaccatcaggaataccaaaaaacatgagggaacggtcaaaaacccaaggttgaccttcatcaacccttctataacctttacatccaaatcgcaccagaaaaagaccagagtgatactcaaagaaagtaaaaggaaaacaagctatccaagcttctttcaacccattcagctttgaggatcttagaagtaagaattttaactaccagacaataggactcaaattgaggctcaagatgaagggaaacatgatcaaaatcatggattagtacttcatctttagtgagttgaataccatggttagggttttcagggttggttgtcatggcagaaagcatgcaaggttgtataataccatataacattgagaataattgtaaagtaggataaaatctacacctgaaacgtacccttaaatagccaaatagacagaaataatacctggaagatcgcatcccaggaaggtggagagatgctaaatcaatcctagcataccatagcccaaatcttctgcagcctaaaaccataatgatccatatgatggaaattgttgtgctcaaatagaaatatcaaataaataagattacaactctatgacaaataatacaaaggataaaatcatggattaaatttgttacaacactacacaaaatatacacaaaaaatagagaatatagagatgaagagaagaaattcaactcaatgcaataagctacacataaagcacaatatataatagcatatatataagagatatgagagcattctcaacaccacatacaccaccagtttataataggggaatcaccaaactt

SEQ ID NO: 30370 - DNA, 1243 bp, Cannabis sativa
  modified_base (47)..(64): a, c, t, g, unknown or other
aattttttattgcgatttaagttggagcgctagttgcaataggggtnnnnnnnnnnnnnnnnnnaaaaatacaaaaaaaaattgttttgaaatgtaaaaataaattgttggggattccctttaaaacaccttgtttcaattttcatcttgtaactatttaaaaccatcaagaatactaaatgactatttaaaattgtcgagaatacttaattatagtgtactgttttaaacagtcacttacttttattaatggtggtcttacaaaaatcaatttgaagatcgacgagaatagtactttttgtagtagtgtactgattaaattcaataattataatcaatccaaatttgatgtaaaaaatacatctgatttgatcttatctacttggtcaatatattatacaaaacattacacttaattagtgtgttagtacatcatatcgttgattttttttttttttttttgagaaaacgttctcaaccaccaaacactaagagcaacaaaggctctacaaaggtgggagcgaggatttattcaaaaatagcatctgctattaatatgttttgaatacaagtaggattccctggccaccaaactacactttttacatatgttaaagcaagtttggccaaagtatggggaacaccattacaagatctattacaatgcacaaaattaacatcttggagcctattaccaagaccaataatatcatctaaaactagacccaaaattaacatctttaagcacaatattcagataagtagactcagcaataatgtttccatgcccaaaagagatgcattaaaatagcaccttacggatagccaaagcttcagcgactttaggaacaagcagtcatccaaatgccaacttgaagaagctacatctattccaaaatgattatgaatcaccacacccaagccactacaattgcccaaagaactgatagcggcatctgtattgactttgagataaccaagcaggggaggtttccatttcgagactacctgaagaggggctgtctgagacaccatcccaccagtagggatgtgttatagtgagattttctcacctagaaactcgagaccggactcctattaaaaagacacgtgtattcactttcctcgaggagagctgagatgtcgatgagagacccctcgaatgtgaacctcgcctgaactgaattgagcgagatgatgcgaacatgaccgagtctaatcgcattcgtatggctcgcgtaat

SEQ ID NO: 30371 - DNA, 5250 bp, Cannabis sativa
aaagtaaaaaataccgcctaacagtatttttgtaaaaaaataacaaaaattagtataccatataaatttccccagaaaaaataattattatacgggacaagagtcaaatatcaaaattttaggcattatcattatatatactaagagaatatataccccttgaaattcgtctaaacttttcattgatttccaaatgtgtccctttttttgtcttttacttatttatacatcacttattaatttacttaattataatatataaattccttatttatcattctttttaatactattttatatatatcaatgtgatgataacggactcaatttatatttttaccttttttttatttaagtttagtttcattattaagaagaatggaaacaaatttaatttaattatttattttctctctcttaggctttttatttttttaagaattagtgtgtagttttcaatattgaaaaatattaacagtattattaaaaattaatcatattttgtattgggatattatatattagagaattgttaaaatgtactattcgtgcatatcaaatattgttattagtgtaattaaatattaggtcctacataacttaaaaaattaatttttagaatatatcgttaaccaatcataagacgctatttataaaagtgttgagtatcattgatcctcaataacaatgctcaatatattatgaagttataggattttatagtgtttgcaattattattattattatttgtaataaaaaatgcaacataattaataggtattttgttgtattagttaagaaagaaaaaagcattttattttattcatatagaatcatatttaattcaattaaaatagtgtatatgtgttttttttttcaaacattaaaaatgagtacacataataaacacacgataacctaaaaaaataactgaagaaaaacaacatcacaattcaattattaataaaatttatggtcatttaaatttattttgaaaatgtatgaaaatgggagcacaccttgcatgtgccctcttactagttttactaatacaccaaaataataaaaaaaattacaaatttttgtttgtatagaatttaaacatttttatgatttttatgattttatttacagaaaatatattcttttgatgtatttttatgttgtactcttgttaatttgttattgttattttgatattgtttgaatgttattttccagttacttttatatagtttttctattattttcgtgttgttttataaaccattgtaaaaatataaaaaagaaaaaaatctttgaacgtaaaaatgtagaaaattttaaaaaaaaaaaaatagtgtattatgtaattatcctaaaattttatttatggaattcataagtataaaaacaaaataagaaaatttacacaaaaataataacttttttccaaactttacatttatgctttcacaagggttttttttttttattaaatgtacattaaataactcgcctcaagaactacggttgataaaaatattcaaactcgctaccacaaaggcagaatcgagataagaataataactattaacgaataagattggcgagacaatgagtccaatctcggaataaatagaatacataatggaagttgtttaagacgagtacacaaagagcttgcaactcattgatccacatactcgggaataagagcttgtaactcattgacccacatactcgtgaataagagtttgcaactcattgacccacatactcgagaataagaacttgcaacttattgacccacatatttgtatgtacaaagaataacagcattcgtccatctcgttctttagtaaccacctcgctaataccttccaaggtgataaaagagaactgcgaggacgttgtatctctatacttagcagttttcctacaaagacggtaaagaaagataatgcatacttagcgagaaacatccagtatagtcagcataattgtttatgaataatgtcaaaagagtagttaaacatttatttaatattatctcatatgtccaataataaaacgtgaggaatgtctacatttcatgagcaattatgaatgaataaatctctaaagaataactgtcactctacatatctatcaatagggatagaactcaaggtaaaagggacggaaaaatctaaagagaaaaagtcaaatattattatcattaatattattgtattatgtaactcaaatacttttcctaataagatggactcgtgaactatgaagaattaacttcaaaatcacgttaaaaacttcatgttgtttatttattatcataactaatttctgtagttcatttattacaaaaggctaaagttttttgttaacgaaaatatgcgttaacacattacaattgcgatattttcattttcagtgttaagagtagttgaatctattgtgatcttactgaacttttgtgataaacatcgcaattatatctttctctcgaaacttgaggagtattattacttcataaatagtgatgacgttccatatgtagtaagaaaattgtggaatcctctaatagtatcataacacacacttataaacaacatgttaatgactacactaacacaacttaccataacgtatgtactaagaagtcatttcttgtttggattgttgggatccaaagatgtattttatcaatgggagtcattattttcatgtgtgatagacaagttaagaattgttattggttgttaaatacatgcatattctgaataactctttgatgttgtgcatgcacacttgtcgatgcgagccaatggcttagtctatgtgctatgtttgagtggattcatatcagtagttatcatcctgtttttatgaattcgatgagatgttttattatgtattatatttatatcatgtcgatacaatatgatgcataattagttttatagacattagtgtttcttgagatttttgtttgttgacactattgtatagtgagagcacatatatgtgtaattatgtagtcttagtgtgagaatattagaatattttatgtggaccaacataattaagtgttgctcatttagtgtcggtattagtatataatgataattatataatcggtaatacatggtattatcatcgggccataatgggatggacataacttattaatacgctcggggcctatgaacacgctctaaaacgtctttggtcagcccatagagccaagacaattaatactcacattgagcatgtaggcccattgacccataattcttcattaaaagggatgtgctcttttatttggtaataagtattaaatgtgtgtggttaagataggtaaagaatatagaagagttgtgttcatagaaaccccttgcacatttatttttcttttcttttgatgtgtagattgaaggaatgggcatgagtagaaggagaagttcgataatcattgtgattattataaagtaaaatttttattatatattgtattcgatgctttaaataggataatatggtagtgttaatgtttggttatgttgttttatgttgaattatttttaacagaatgtacatattacatactaaacacattcaaaattgtaaagtatattgtaaatgaaattatgtagtttacttgtggtaggcactcactcacatggacatgcatagaatagcaaatttggtgacggggctgattcagaataagccaaaacttacaaacttgtgctgacctcaatatatatagaatggatatataaatgaaacattgttgataaccttgagctaagcaataagcataatactttgaaaaattaagagacattattagtgagaagtctgaatgcaattttgacatatagaattgcaattaatagagccctctgtcaaaacactcaacaacacacacatataagagtgaagaggctatgaattaagtttgaagaactgaaaagcaagagagagggggaagacgagtcagtggtgaaaatgaggggcgggtgttgaattcgagagagagagagagagagattaatcgatttaaaagtggtgtaactgagtgagaaattgtcctgtgttatgctaaggaaaatctaaaaggatgaaaaaatggggggctaagagtggtggcaaataaagaacatcaaatctttttgtagattttaacaaataaataaataaaatacaacggatagcatatattattcaaccaataaagaactaactataatagattatcttgctttcaaaaaagaaagaaaaactatagtaaattataagtgaagaagtagtaaatttaaattagagtgtgtttatttcattaatttttaaataatggtcattataattaaatataaaagttaaattttattattgagcagttacatttttttcaataatattattaaatagaaaaaatcaaaaaaatcaaaaattaaagaaatatataggatttattttaatatagagagtgttttttttagaaggcaatcaaactttattaaatttcaaattctactaccaagtaagaaaataattcagttgagatatctcccatactaaaaacacgattagagtataaattagaagctcttgcaaagaaatgagcaactaagtttgttgaacgtttaacaaataaaatagagacattttcatagcaacaagcaaagatttacactctttaataacttgacaaaataaagagatcatatcaatgggacttcgaattgcttgtacgactacaaggcaatcgtttcaagagtaacaacccaccactattttcctttaatccaacttaacactttacggatgtcaattgcttcaacaatctttggacggacaactccatcgcaggcccgagagacaccttctagcaaaaagccatgcttattttgagcaactaaactatgactgtaaccttggttatctccataaattgatacatcaacatttaccttgacttcattagccttaggaacacaccaccactcgacaccatcacctggttctaaaccagattgaaatggctccatttctgaagtttgagcagctctccaatgtgcaagataactactagcgaatgcaaaaagatacgcaatatcaattgactttttttttgccacaccttgtcatttctcacaccctaaattgcccaacacagagttgtaatgagattgcatttctcagctggtggcttgaaaggaaatcatacaccagtccaataatgtcataccaactgctatagt

SEQ ID NO: 30372 - DNA, 3638 bp, Cannabis sativa
  modified_base (317)..(324): a, c, t, g, unknown or other
  modified_base (642)..(643): a, c, t, g, unknown or other
aattaataaatatattcaatggcaattttatttgataattaatattaattattaaataaatagtttttgcatttaagttgttgaattagaaaaatgatattattgagaaaataagataactagttgaaaaagatggcaaaattacaaagtgggggcccacatccatggccggccacttttgatgtattttaccatttattttaccattttttaatgccaaataattcaaacctaatcctagttggattcctataaatagataatgatggcctcaaattgaaggatgatgaactcacttgccttcagtcaaaattttnnnnnnnnttctctatgccattcgaatccttcctctctctttctctcttcaatatttcgaaccctatagtgatagagtaagtgcccacacacatctctctctttctctcttcaatatttcgtaccctatagtgatagagtaagtgccaacacacatcaagtggtacttaatcatagtgtgtaagactgtgaagaatccaattcaagagaaggagaatcgagctcagatcttggtgatactccgctacaaaaagaatacaagggttagagatatgagcggaaggagtcatttaattctgctacacccaatgtaaggtttctcaaacnntatatgtgtttaaattacattgttttagaaattcataattaggatgttaaacaacatacgtggtagtaaatctagattctggtaaaacatattccaacatcaaggtgatcggtttgttgtctcatcgtcccactcaagcactctagcttccctacaatatatgtattatgtagataacttggccttcttgttaacaagttatagttcacgtggcaatgatcttgcccacatgtacatgccacatcatgtgggggaaaatcgggataatattacatctcgacatatgtttcttatctaacagtcttactgtcaatgtctaatgcaagactgatattgctcataataaattatctatgtgagataatttcatttattactgagtttttcacaatttctatgtctaactttccacgtgtcatgtctatatttatcgctcaaaatatcggcataacactggaccatgaagacatggagcaactaaatccggaccttaagagttgaaattgcatgaacctgcaccccaaaagtcaacttggccacctggactttacccaaagctcaagttgacatccttaactaacgtttctatttttaggaccgtcttagtgaaaatgggtcaaaattttcatttgtacatgaactagacatgccacgaacatatttgagaggcatcataatcaaattcgaagaaagttcatttttgagcacccagtccctgggcacccaacgcccaagttaataatttgtcaatatgggcaccttccaagtatcatatcgacgatctgaattttccatcttcatcgtcttcataaaaaatgaggtaataggtacttttgaggaagaaacaatatttcttgggtgctagaagcaagacccagcgcccacgttgacacctggggctggcctagtgcctaggtttatatttttttaaattgggccaatttcaatgatgtttttcagaactgttccaagaatcttctctcttttcaggaaagattaagattcaactatttttagggacaaaatagaacttttaaagggccataaagggaacccagcgccgaggttgacaaattgtcaacttggttttctaattaagttcttcaaaaagtatttagggaaatttttccatcctcaaaaaaaatgaagattcaaataaactcgggagaaaaccacaaactcgaggccctagaagcagacccagcgccaaggttgacaatcagcctagtacgatgattttgatgactcaaatgccaaatatgattcgattatagaatctagaatggtcaaaaatggggtaggatacctcatcctcaagttctagaaacttggaagtatcaaaacgatatcctagaagcttcgaaatgagtacctagcgcacaggttgataaatggtctggtgcgcttggttctgcttattcgattctaattatgtttcgaccgtctgtctagttttttacaatgactaagatctatgaagtgagagaagtcaaattcaaaactttacatttctcatttccaacatgggaaatttacttggaaatgaagagtttcgagtctcttatttccgtagaatagcaacatttccaagaactagtgactagcttcgccagaaaataaaaataaactaattgatgtcaaaatatcacttagacatcataaagtacaccccatggacgttttttcactgaccccacgtccaggttgatgtcatatgtcaacgtgggcgctggatgtcaactaggccctgggttgtgaactaccttcagtaaaatagtcataactcacgcaatattgatcaaattgatgcaattcaacttgagtttagaagctatttcaatgttctatcaagttgtgtctcacgcatcaatcaaaattctaaagttattgacctaaaattttaccgtacttttgatcgttggatcatcatctacagtcaaaattagccaatttagatttttcatagttaaattatttttccatatttttatgggcctcattcacctataaaaggagagctaacttagttcattgtttacattcagaaaaatacacacaatatcagagcatctctctctagaaatcaaagcttaaacacttagcctttttctataattactatctcgtgagaaataaaaactcaaagttaatgtagctccattactatcgcagcatggggagtacactattataaattttatgtgtctctctaatttacacatttctatttattattattcatctagccaatctagtgagctggtgttggccacttttcagcgccaacactcagtacaacttgacgtgtaaaattcttataacgcgtaatgttgtttgttgaatggaaggattacatttgagaaagtaaatatatgtgcattcataaattacacataaatgtgtgacaaatcatttttgataagcaggacccattctttaaataaaaataattagttgaagtaatttgacaaatataagcatcttcaatggggtaacacccataattactaaaatacacacttcatcttaaaatattatttgtttgtattttctttctcatccacataagaattgacacatttttccacaaaaattactccaatagtagtcaacttcaaaagttgttcaccaaggtcccacataccactttttaatcaaattttataattgtatatattctcaaaaaattagttggtgataaagtaattatgctcataaaattagtttaaaatattgaccaaaatacacacgtggcaaagactactccatggcaactcccattggagatgccttaagtatgtgttacatttgtgtgtgatttgtgcacatcaattgaggttaagaaaaattctctatggaacttctttcttgttctgatgggaatgaaagctcacgtcgtaaaagaccacactaattagagcatccccatcagttgaggtatagtagctaaatagctaaaaaaaaatagtgagaatcttatatcaagcatacatta

SEQ ID NO: 30373 - DNA, 1418 bp, Cannabis sativa
  modified_base (46)..(59): a, c, t, g, unknown or other
ttaaacaaaaaccactagaacttatataaaactaatatttacgtgnnnnnnnnnnnnnntctcatctagtatatatatatatttcttgtaaggactatagagtaatttgcggtaataatatttaagttataattctaaaatttttgcaggtatttagctattaattgttaataaattgtcacgtgacaattccttattggtccaagtcgttaatttttttttttaaaataaaaaatagtttaaataatactaataaagaaaataacacgtggataatgacttaacatttaactattacaaagtttttaaaatataacttaagtattattattactaaaaattaaacttaagtatctatttacaatagagaattaaatttaagtatttataccgtaaattattctattctaatataatttcaagttgtattatttggtgacacaagtacatttgaagccctagtgtgttaaatgtggaattatccttaaggaaagagaatttggagatggaatgtctagtcagtctttaattaagaaaacaagtaagaagaagaagccatgaacatgtgctctttgtactctctctctatatatatatgtcatctttccaccttctatatgttatatatagttttgtctataccacaccatttattcgagatattataccattttactaaattttgtttgtacttttcactagtaaatattcctcttctcaaaaaaaaaaagacatttttttatttatttaaaatacttatctagacaacttttgtaattaccgtattctgttgtaactttaaaaggagatctcgggttatgtacaatatttatacatttaatttaagattaaagtttaattataaattttttaattattcatattttttagtgaaccctttaattagtaaaggaatgtacaataattcaaaatcacaataacatgcctaatctaagaaggcattacaaataatgtgtacaatttaaatatgagcattgttattagatattggtgcctatagcacattcttaatatgtcgcgttgcgattggctagcgatactccctaaaaactattatattaaattatatgagactccatactaagttagactaatagcgatattaacatataggaaagtgctaagcacggctagtgctctggcctttagcatttctctttaaatatatatatgtaacacataaatttattcttgttatattgttataatgtacaaatagcaaaataatatagtatacaatctaatcctaaatcctaaaatacttttgacattaatttcagaccccttagattctgccatataaagaaacttagtgatcaaatgagttggattattcaccaataaactagaacccaaattaattaatacgcctttccaaaagaaaaattaattaatat

SEQ ID NO: 30374 - DNA, 1863 bp, Cannabis sativa
aggtagttagggtgttacatgatctctttttgtgcattattccattgtttggcaacaccctcgcattgttcaatggatttgtgaaggtcggcttccaattgcttaaccttctagagaccccgatgctaggccacatgagaaaaaaaggaggcctacaaagaaaaatatacatgattttttatgaaattttgaaagaagataaagaataaagagaagaagaagggaactaaccgataggttaaaatggagacttctctcgagcatttcttcagagctaccattattaaccatatcccagtcgccagactggaaagatttgaaatggcgccatcaggaagtggcaaattgcaagtagtactctgagccaatattccccacctcgatgggcaaggggcaagaaggttcaagataaaccatttcatgcctcttacccgaagacgtggtagcctggtaagttaagccttgggctggttcgtcaacgtgtacaatggctggagtatgaacctgaacttggtcttctgaagactcgaggtttatgggttgcgaggaacgctttttatgggcagttgttttcctaaatctcttaggaggttctgcatcaaccctgaacgaggtttttgaagtagtgatcctctttttccccttttttcttaaagtgttaagaagattttctagatccatatctgcgagacaaaaagataattcagcacttattcaaaaataaataaaaataaaatggggaataaattcccacttaaaggagattaccataatcatcagatgatgaagaaggaggactatagtaattactaaattccctagatcctgtgatcatgaatatgtcgtaagggttaattggatctaaatcccaatccgaatctgggtggctcaccctatccaagttggtcccatactgctcggcaatcccatagtacgagctagtacaactaagttggacaaaaaaccttgggtgccaactatcaaacctatgggttctacggtctatgaggtaagggttccaattataaaaattatattgactatcctggaatgttactaacgaagtatgttctgcgctaagcatagtaggcaaccatccacattgattacctcaggatgcttcttcttcaactttccaaggggttactctttagagatagtgtacgctagccacataatcctagctatctttgtcagctggaactgggaccttctcccttgaagagtactttggaaacttgtaatcataagtgtactaatccgaggcaagaaggccaacagtctttagattggcttcattcaaaagaaaatctaccaagcgcaaaccaaaaggaagacccaacaagattttacgtcactcagccatctcaagagtggggattggccttttggaaactactctcaacacaaaaaaaaacataataaataagcaacctcaaagctataaatagagatacaattcaaaaccaattttttcaaacaagttacttacgtatgatgcgaaatgcaatcgtgttaactggagaaaggccagatatccagaagaaatcctccttaaacatggtcttatttggtaatctcacaatgatcctatggtcatttgtgtgggtaacgaggtaatcgaagtcccctgcacatcgcttcctcgcggggactgctttaacggagtaaaataaactatttcaaaaggagtgggacactcccatcctaaaatgtaatacaaaaccttcagacttgcaagaactatataagaaattggaaccagctgaaaaggagcaattccaagataattgtagaattctttgaagtactctctcagggggagaattattctagccctgatgtactcaaggctccaagcgc

SEQ ID NO: 30375 - DNA, 1314 bp, Cannabis sativa
gtgttctatgttatatacaaatagatcttgggttaattgttaatttatttaacaaggaatgcataattactcgtgttggaacatgcaacttctccttcacaattatagaaacgattcatatgggtaaaaattatgttagtcgccatacccatttattataagtttcacttgaccatacaaggagcataaaagtcactacacatctatgacccgcacgtaaaaggtatttggaagatggaaagacaacccacgaagggtggtctccctccttactattcctaggctaggaagtaaaaaaggaacatgattaaacacagacgcgaagacaagcccctcctttctccagcgtggaagaaacttggggagtaaatgttatctctattttctcttagtgtgacatgtgtcattcacgtggattgatctgaggaccaaaatctaccatcataggcccaagaaaggatgtgggcccatgcccacctaggacgccctagaataggtaaggtcgggattgaaggaactatcttccggtcttgaccaggaagataaaatggatgggcgatagagtctggaactgtcccttgggggataaagcaacatgatcaatctctcacgaacaagcgagatggataaggagccgacttgagaccaaagtcccgagccccagcccaggagcaaggaaatttaaaatacaactctcctcctacattcactaacaaagtggtcaagaatgaagcaatttcttaggcactcacctccatccagggagcatatcctctatggcatattcctgacagaatcacaccaaatctaaataatatctcttttttcttgtttgagaagagtggcaaaaaaaaaaaaaaaaagatcactctaggaattaaaatgtccaatacttggacatagttattttcccataaaaaataggaccatgtgcgacttgagacattagtgttgcataatactatagtgtttcacacctaataattttggcattgagcctctaccctaaggccctaactctaataagatttaatcacactactaatgggcttgaaactgtgaaccatccacaaattcagttcagcctagtccggtccatttaattgccttataatatggaaagatattcaccattaaaggggttcaaaaaaatttgattttacagagagaatacattgctaaaagtgtacacaatacattagtaatgctatcgtgaactaacactcattaatgtcctaaccacataaaaaaattttgtatctatttattaatttttttctcagttcatatattttttgttattagttactaaaa

SEQ ID NO: 30376 - DNA, 1123 bp, Cannabis sativa
gaaaaacaacatataaataactatctataaacatgaaaatattagaaaaagtgttaaccgtaaaataaatttcaacaacctaaaacaactgaaaaatcaaattaaaacaactttgtaaaataaaaaccaatataacactaaaaggacaatcaaaaaacaagaaaaaattcttaagaaacacaaaaccttcctacaaccaaaaatgagaacaaaaacaacagaaactctaaaaacacatttaaaactaaaaaaataactaataaaaaaacccaaaataaaaaacaataacaatgtatagtttggttcaataggtcaaaaacaagttaataacagaaacataacaaaaagaaaaactaaaaaacaacataaagcaaaatgcctaaacaaatgcacacaaaaatgtgaaaatactttaaaaccatgaatacaaacagataaaacataaaaaaatagaaaaaacgattgatcaaaaatttcaacttaaaaaggaaaaaatgcgaaagaatatacaaaccttgggtttaactttaggctttgattccaaatgaggaacttcatcctccaagtcagaattggagagaacctaaaacattatggagaaaaaaaaaattaaaacacaaaacagaaaccaaaaaaactaaacaacaagaaaaaaaactaaaaaaaatcaaaaaaaaaaaaaaaacaacagtagacaacttacatccttaacagattttgaagatttgtctttgccttatgagctgagcttcaaccttagctgcttagctggaagaggtctttttttagaaccagaagactctgcaacatcagtcattcccttcttcgcaatgcctttcaaacccattttaggatcacctttagaggactttgaaggagatttcttaggattttttgaaattttttgagcatgtgaagggcacttggaacccgacctagtgatggccatctatagaaaaagaaaacaaaactgaaagaggaaaaacgaaatgtagttatgcaagagaggggagatcgtagctgaaatggaggttggaaattagtgggttagggcaaaagagttgatgacgatttgatgatcgtggattctggacagagaaaaaaaaaaccaacagaataaaga

SEQ ID NO: 30377 - DNA, 1037 bp, Cannabis sativa
gatgactgaatacctccactaatatcctaacagaattgactagtctgtgaagttaacagactataaccactaacaaataactaactataacctaattaactagaggcataaggacacatgcatgtacacaacctaggcatacaaacttaataattctccaccttgactacagttatgtacattacaaacttgagtcaattagtagctacattcataaaccagtgacagaactttgttgtagttaataaagccttagtgagttcttttgcagcattgtcatttgtggaaatttttgagagttgaaccttaccatttgagatatatctctaatgaagtgtaacctgacatctatctgcttggttctttcataaaacattatgtttctgctgagatgaagtgaactttgagtgtcagagagtatagtgacacatatttgatcaatttcaagtttattagtagtgtttgagctgtttttatgtttgtaaaccttgacttaatatagtttccaatcaactttgtattagcttatcacttttctgcaaatcttatgttgagatcacagtgtattgcctttctgtcatatttacgaattatgaaagacttggttggtccgtttattgatgccattagtacccacttgcatcttggatccaagcaacaaattttgtatgtttttgtgcaagactttttgaccttgtattggaagttgtttctaattgcatagaatctaagcacacttgtagtgtttctttatccttgtatatttgtgtttcttttatttcaagatgttgatcgaggatctgtaattagtagttcatcataatcattaatttctgcctctctgttagggttgttttctagttgcacaactatttcctaagccaccagttttgcatataaagtcaatgaagtcgaacattgtttcaccatcttccaacattgtgtcatgcattgatttttgttgagttaatggttcttctgccggtggtgcattgcctaccattgttgctattgcatttgtttgtgtaactaatgag

SEQ ID NO: 30378 - DNA, 1378 bp, Cannabis sativa
tttttaaaaaatgccatatttaagataattaagtttttatgccatatatatcaaaacatatattcattttcccatatttttgtaaatagcccaaaaatatataaatataaaatataattgctgtttgcgtttttgcctaggtaaaatgtggccttcctaataggcactaagaaggatccaagcaacaacactcgctaagtgtttgtcaaattcgaacaccgtatctgaattataacatataatccaaataggacatatccttccaggtatgcttcaaaacattcagaagctacagggtatctctcaaagcatttagaagctacttaaggtctctcaagggaccccgaatcatgtagatactgtccaagagttcatccaaaaatggaaattgaagagttatctggcaatgtatatcattccggagggtgtatacatgtcacacctctaccatgatcctaaaaaatctaaggaaaaggctcacgacagaaaggtgtgacctccttaaggattatcacgaccactattctgacataaccttttctcatgctccaaataacggttcacacacgtgctggcactatcaatatagtacaatgagtagtaatagctacaactttcaaggattgagactcattcaaagtctattacactcaataaatgccttgtaaactccctatcaatgggctattattgtataaataaaatcttaggatccgagcccacaatgcatgatacagtttataaatagaatctcaccatggaaagggtccaaacatttatgacacgtttattaaactgtaactggaatcataataatcaatgggagaaatgaatcggtttaaaatagaaaataatcggaaataatattttattatgctatttactaaactatatatacggaaagaaaaccagaatcatattattttgtttacataattaggaaagataatcggaatactttaatttgacaaaattattattattagaatattaattattttttgttatatatttttaaagggcatatttatgttcttcatttttaattaataaaattaaaattaaaataaattaagtttttttttttttttttaagaaaagcgtacttgttataagataataaatagttagacctcatggtcattacataaaaggttctccagaatataagagactgtgatatcaccaaatcttatgtgagcaagcgctcacttggccacattatggaccgcaaaattacatgttcaatattcaaaaaaatacaactaaaaaatgatggagaagaactaacacaaaaggagtgataattcttaagagcccaatgaggatccttcccattaagcgcattgatcatcacactcgagtcgttctccacaat

SEQ ID NO: 30379 - DNA, 1897 bp, Cannabis sativa
tactattattttaacttttttttttttcaaatttacggtttgaatttctaaaattgtttctcctctgttttctatgtgggttgctatacgattttttgttgcgatttaggttgcagcgctagttgcaatagggatttctatgtacaattctgtaaaaatacaaaaaaaaaaaaaaatctgttttgaagtgtaaaaataaaaaagcccctaaataatatttataccctaaaaaaaataatatttataaaatataatatgaattattattattaatttttttttatataaataaagaagcatagatatagtgatgctttttgagagtagatgttacttttatagtgtgacataatgtttgactctaaaatcttatagtgacgcgtggggaaggaggctaaaagggtttagtgactcaccctgaagggtcattaaatactgtttttctagtcatctacatcagtgacgcacagtgaaaggtcactaaatggttctagagtcactcaacacgagtcattgaaaccaattttaatttgtatagtgggttaatatgtggaacacgaaatggacacgaattgatttatttatattcattatattattgaaatttatttatttatagttaaattattatttatttttataaaaaatataaattagaaaaaaaaatttgttacaagaatataagatattatttataattgatataaagaatttcgtattcatgcatacagttttgaactgttgatggtcacacacatcattgatgagcattatgagttatcaatttattcatttccatttaattattttggtgagcttgagttatcatcaatttgatccaattcaattattaatatttttggtgtatagtgtttgaatgctatatatgtacgtacatattccttctaaaattatttgtctcatgcgtatttagttttatttattattattatgaacaccaactctttcatattaagtggccatatatgtaccatataccatattattattttgtaaataataaatgttatatgtattatttttattagttagcatgtggatgaaataattggcttcacctaacaattagaagatttataagaatattagtatacgcaccatccattctattgagtatttttttggaaaaattaataatttcaaaaatgtgtattcgaaattatatatatagggatttttacaaaaaaaaatatacctcaaatcacatttcttattttacatttttatcaaattttataattacatttttacggaatcacataaaagcgtcgtgtaaacaaaataatacaaagcaattaatttagtttgtttagattagggtttagttttagtatttagtttgtaataatatatataaatatatatatattaatgaagattatcataatgtaccgggtatgggtgaaacccaaaacccagtagtagaaaagttgtatacgatacttgcctgagccccactcaagtgacactaatacccggtttctttgaaatgctttgttacaggtgcaagaagacttagaatgagatagttcttcaaaaagatgagtatgttgtatagcgcttagagtttgggaagatacccgaaattatagcgaacgaaaaaaatttgaccaggcaaatcctttaggtccgctttcggtccatctatacaagatgcctttgcagcctccactggaaatcgggaattagctatggcttattggagatcttgcttgagatttgtaggattttttgaattttcaagaatgtcctacaccaactcaatctcttgataaatacgacagggttaaaaaatgaccaaagtaattgaaaccaatttgtttaaaactacaaaaactacaagtcgttaatatccacacgacaaatcgtttgagcc

SEQ ID NO: 30380 - DNA, 2882 bp, Cannabis sativa
  modified_base (2011)..(2028): a, c, t, g, unknown or other
  modified_base (2830)..(2833): a, c, t, g, unknown or other
ctcgaagaggacgtacccgcacaatttcggggaacctctataaattttggtgtgttctctccattttattttctgcatttactattgtgtttatactattttctgcttgatttttctctttgtgttcttcatgttcttcaaagaagaacatagaagaaagcttggttgaggttgattcgtattgggctgtagactatttttttgggttgtgtttatgatctggaatggattagtatataggttgtgttgattgtatttctttgggtttgatcttgggtgcaatcgggtttgattcaaactgggcaaagggatttttctgggtttatgttgtggttatctctgtactcttcagagaagaatggagaaggaaataacactctgctagggtttttttatttgtgtgtgccgtgtgtatgtttgaagaaaatgatgcttatatatgatatgatttagggtttcagcttggtgaataaacgacctgtagttattaactaggggctgtcgtttaggttcatcaaaagggagtcaacaaaggtggtttgactgggtcttaaaggtcagatttgaccatttctttgactagtctttgctgtgtgtaggttatatactaggaataaaaatcctacagttcggtaggtattttgttttaaaaaaataatgataattcaagagcaaaatcatataaatatcaaaattgagaagcaaaaattatatttattcttttattttttagagggtagtatttgacaagaaaaattatatgtattttttatatcacaatatacttcgtcaacacttacctaaagagtgacataggctctcttgttgaaaaaaatctgtcttaaattttttctctcaattttcttaaaaatttatagtttgtcaatttttttgccccacttaaaagtttactctagcttgattgttaacaatgtacactgtaattatttatgatcttcaatttaattagtttttgtaaaattttaaataatgattgccgaaagtgaatatcaacaacttattacacgtatgcttcaaaatgatatatttttacactatatattatacaaaattttaaaaattatataaaagactatattattatcatactatatacatttaatataatatataatataggatcctgactttgactctgggtctgtatttgattttggaccttggacccgcacttggtagttggatcgcagcatcaactttggatccggacactcgacctggagcctaggcccaaaccttggaacccccagaccccagccctgaccaaagacttgaatctcgaacctggacctcggtgccagaccacgaccccaaaccccaaaccctagacacatccccatactcagacaccacacgtcagacttggccctagacctgaactcaaacctagaccagactcagaccccgagtttcaaaccccagaccgtaaaagaaatagttataaaacctacatttttaattttaagaaataaaaatagttatagaacacatttttgtttttcaaaaataagaaacaaaaattgacttttacttttgtgatttaaaaaattaaaaaataaaagtgttatcaaacactagttttactttttctttccctatacataggagtgacaaaacgtgttatcgtgtcgtgttcgtgttatattttatgtgacctgtttctatatttcgtgtcaggcgtgtcgacctattttttactcgtgtctaattttctcaaccttaaaccaacccgttaagtatcatgtcgtgctcgtgttgacctattttgactcattttgctattatcgaaacttgagttgtagagaaaatgataaatttaggttccattaaaaaacttacatacatttatttatgtatatatatatattttttttatatatataataaaaattaattttttaaaaaatttttaattttttttaaagaaaattaaatttaaaagtttttaactttaacattgaatcactaaatatatatttttatataattnnnnnnnnnnnnnnnnnnttttattttattttatttaaaaactaatgtcaaacatttcaaatttgtgttaagctgagcgtatttgacttatttttatttcatgtcaaatcgtaccgatttattttcgacctgcgtctaattttttcgacccctaatcccgtaaaattcgtgtgttcatattcgtgtgccatgtcgaaatctttgacacccttacctatactctttttgtgtaagaggatgggtcatttcctttgtggttaaagaatattgtatttagctgatattgggaattataatactatcttttattcttttcaaaggaaaataaaacaaacaaaacagaaacaaataagacaaaaggaacttggtagaaaaaaaataagacaagaactattttctttttttgatccaaaaagacaaatgaagtattgggtatgggcgaaaataattagttattaggcccccaaacgtgtaagtaattgagtgagtgagtggtataatttcaaaattcgaacaaaggcaatgagtgagtgctttattaacgttcaaggaatttcttccacttttgccccacacacatccccatgattttattttttcatacaaatattcattttatcaatcttaatgatatgtgtaataaagtcttcttattcatcttttaaaaaaagaacaaccttgatgatattgtagattctcaaccttcatgtttttgtgcaaataagaggtagaggaaccaaccactacaaacccaatgacaaagatcatttcaaataaggacaaatctatatatattcaagggtaaatattattttggacnnnntgttttgtaaaagttacaaattgagtcatgtgttttgttaaatgacaaa

SEQ ID NO: 30381 - DNA, 2345 bp, Cannabis sativa
gtttttatgaacacccctacccataatttcattgccctcaaagtggtagaagtcgcaggcctccccatcactcaaactaccgtttacaagatccttttgggtattggagatagggtcaaggtggaagaagtgtgtgctctggtgtcgttggaattaggcacgctttggatggtaacatattttcttcctcttgagttgggggagctgatgtgattttgggggtcaaagagttggaaactttgggttatatgcaagtgaattggcggactatgctagtgaaatttgagtgagatggtatttgggtgactttgcagggcgaccctagtctttgtatgtctccaataatcttgaaagctatgattcatatagtggagcagaatggttagggttttgggttcattttggggctatgcacacgcatagcaacaagctagagcagagagtgcccaaaccagtgcctaagtagttggatcaatacaaggaagtgtttaacatgcctccagggttaccaccggaacgagcaaaggagcatcaaatcaatttgaaggaaggagttggtccaatctcggttcgcccttattgctatgaccaaattaagtaagatgagatcaatagtatggtgcgagaaatgttaaaaatagggatatgtgtgcctagcacaagtcctttctcaagcccggtattgttggtcaaaaagaaggatgaaagttggcaattttgtgctgactaccgtgcactaaatagggagacattggctgcaaattccccattcccatgattgatgagctccgtgttgggctacatagggctaaggtctttttcgaaactggatcttaagtcgggataccaccagatcagaatggcggcacaagatgtagagaagatcgctttttcgtatccatgaaggacactatgagttcctcgtaatgccattgataagccttttatattgataggctacctattacctttgtgtactcccgaaggtctaggaaatgggctgcgagtcatgctggagagaattagtgctgatgtggcaagtaagtattggtgaggtgttttttgctttgtgcgtgtttatttgaataaaagttaggaagttagcgtttgggggaattatgatatttctgagtaattgtaaccatttgggagagaatcaggctctcgaagtcgtggaaatttaatacaaaggcactgccaattttcatccaaagtcctctcggttatatttgttctttcttttctgtaattagcttcaatttgatagggagatcctatcatatagattgtggatataatagaaggacacataagctaggatagagggcttttatttgttttgtcttattcttatcatggtatccaaggacgttaaagaaaatgggttcgataatgaaacgaaggatgacaatgttgatgccatagagttggacaccactgaagtgcacaaatcaatggaggtatctttccaatttgtcactgaattgtctagcaatttgttaggccttaggataataaataaagagggtaattgggtaattgtaatgggaggaattgatgctatatatatgagtaaggagggtatgggggtgtgaatgattttagttaagtgagctcttagctcttgggagagagctgggtctctcgaatacccaacaaccttgttatcttttatcttctaatatatattttatcttctaatatcaatatatcatctctattatctttacttgctactgtttgtaccgaaatgataggaaattcctatcacaattccgccatgaaactcaagggtcaactcagcacataggaagtggtaattcttattgactccggggccactcatattttcgtttccaagtccttagtcactaagtttcacatcccgatagttaagaccaaggcttatgaggttacaatgggaaatggtgattctatgaaatgtgaaggcatttgtgagaatttgaatatccactttcaaggagtggatatttgggatgatttcttgcccttgccattacttagggagtgccgacattatccttggtttacaatggttgattacactaggaatgacttagacggattggaaggaacaaatcatggaatttcagctgggtaagcggagggtaacaattagaggcgattcttctcttgaccgatctctggtgtctttaaaaactatggcaaagactcttcaagcggagaaacaaggcattgttcacaaaaccatttctttcttttcaccttgaggagaaggtgaaggtttttcgagaggtattgataagcctcctatacattttggatataatagaaggacacataagctaggatagagggctttt

SEQ ID NO: 30382 - DNA, 1232 bp, Cannabis sativa
aatcactaattagattggatcgaattatagaaaaaatattagattaaatcgcatgttcaccttagtactaacatcgaggaagctagagagttttaagcgtgtattgagcaattttgctcctaattgggacaacaagtgaacaagctaaaagcctttatcttctttagtaactaccaattatggcatgaaaaggggaataaaatctgctcttgggcttcaagaactagaggagaacattcgctatttgggtttatccatacttcggtcaaggaaaacatatgcatattttgatttcatcatgagcaacttgaactcaaaacttcagggttagaaatccaagactctctctaaggtcagctgggcaaccctcatcaaatctgttggtctatctcttcttgtttatgttgtgtaatccactcaattcttgaagaagttagctactaaattgatggtatggtgagagacttttggtagggtggcgagaaaggtaacaaatggttacgtctcaaatatgcgtctttaattttaaatcaacctaataaattattcaaggatgcttggcttccccctcttttggattggataaagatcaattgtaatgtggcagttggtttgaactccatgatgatttcaacagtagctaggaatcgttgttctgacattgagtggctaccaagaatcttatgttcacaaattttcttattggagaagtgacatcctgtgagtttgccttagcgactgctttagctaaggacaactcttttatgaacctggagagtgattctaaagtggtaatcaatgatatcaatggtaccatcgttaaatgagaaatatgtaattatattactacttgtttaaaattttctaacttattttttgggtgtaatttttttaatatttctcatatgtttaatattattgcccataatattaccaaatagattttgagtttggatatcaccggtaatattgatgttacctgtaaatttaatttgtaatattgagtttgtaattaatttttttaactgtttttaatatatcagaagttattatatttaaaaaaactagatctgggtttattttatttgatttttattttctcaccttaaatagttgagatggaaattattgggtatacaaattctgacagctaggatttagtagatgttatgtgaaattatgtgtgtttgaccttatcaagaaactatttgtttgtatttatttcaaaaaaa

SEQ ID NO: 30383 - DNA, 1659 bp, Cannabis sativa
  modified_base (1369)..(1375): a, c, t, g, unknown or other
tgaaatcagtgaagctcccaatatctaatactatatgtgttggaacattttataaatgaattatttataagtgtatataagagaaattgggttggactccaagaatactcacttttgtgaaagagggaggagtcgcagaaatgcatgattgcctccaacctgtgtgcatgcagctatttcaacaccatgttatcatatatttgataagattttctagtaatataatattgtatagttgtgtagaattacaaacatatataatatatatatatcttatcttcaaaatctgataattgagcgtggtagaagaagaagaagaaaacaaaaatggcaataatgtcctcctggcctaatttatatgatatatatgcatgtatatagaaagaagaagaagaagaaaagaaaaatggcaataaggctcaacagtgggttcaacatgccgattgtgggtctaggtgtttggcgtatggaaggaaaaactatcaaagacctcattatcgactccatcaaccttggctatcgccatcttgattgtgccggtaaccttttccttcttcttcttctactgctaatacttttcatgtcattttcatttcggttttgcttcctacttctcctaagctttaagtaatgtcaaatttattgtcacttctgctaatattagtaggaactttaatttttttacccataatgtggttaagtgggcgtttaccaaccagagattcggttgtatttcgattttctctatcctggaacacctgttttgtaatgaccgcgatgtctaacttcttttgactttaatataagtacgcttttattaaaaaaaaaaaattattgtcacttaaaagattcatttggtaagtagatggtattatatacaatagtattttattaaattgtattatttatcatatttttatataataatacatcaaattttaatttgtattaaaatattgagtattaaaagaattaaaaaaaatatatgtgtattttagttagttacaacatatatttacaattaaaagtgatattattaaacataacaaaaatttcttcttgttcttcatgcatatttcaatcattaaagtagttttgggggtatttgatatagttgagctttgatatgcatgtagttaatatttataatttttttgtttttggtaaatagcggcaaaacctccaaaatttttattttagtttcacttaacccccaaaactcaaatttgggcggtaaaacccccaattctcgtgttctgttagcaatttaacattttcgtctattttaagtgttaagtaccatgttggactgtccacgtgtacatctgcgtggatacagtgtacacatggcacaattctattggtccannnnnnnaattatttaaaaaattaaaaaattttaaaaaaattaatttaaattaaaaaaattgtaaataaaaaaaatattttttcttttttttttctttcttttcctttttccttcttgtctgttcatcttctcgctctatctctctctctctctctctctcaatctcctctgtatgtctctcccagtcccgatctagggttttcaaaacccggcagccaccccagcagttatctaaccaccctaaggctctctctcaatctcgatctcgtatttctctctctctctctctc

SEQ ID NO: 30384 - DNA, 3113 bp, Cannabis sativa
aaaaaaaaggtatagtttttttagggtttaaattattggtttagaaatcaaattttttgattttctaagtatagattaacttgacatgtccactctttctcttcctaaaactctctgattctctcaccaaatgttcattcatttccgacacttctccattcgccacctccacatctccaggaccctccaatggaagctcagggacgagtacaagctaacccaacccgacctagtccaacgcatctccactcttctccttctccaacgtttcgatgcacttgcaaacctctccttccacttctcagacgaactactcgactccgttctacgaaatttgaggttaaaccctaatgcctgtttagggtttttcaggttggccacgactcaacaagattttagacctaatataacgtcttattgtagaattgtgcatatattgtctagagctcgtatgtatgatgaaaccaaagctcatttgaaggaattggtaactgtgtgtaagaataatcactcggctttttttatttggcgtgagcttgttagtgtcttcaaggagttttctttttctcctactgtttttgatatgatattgaagatttatgctgagaaaggtcttacaaagtatgcattacatgtgtttgataatatgggtaaatgtagtagcttgcctagtttgaggtcttgcaattgtttgttgagtaacttggttaaaaatggtgaatttcaaactgctgtgcttgtgtatgatcaggtgattaggcttggtattgttcctgatacttttacttattctataatggtgaatgcatactgtaaagaaggtagagtaggtagagctgaggagcttgttaaagaaatggagagttctggttttgagccaaacactgttacttacaatagtttgattcatggttatgttagtttgggagatttggagggtgcagaaggagttttgaagttgatgttcgaaaagggtgtttcgaaaagtgaagttagtcatacaattttgattaaaggttattgcaagcaatgtaacatggaggaagctgaaaaagttcttttgaggatgaaagaagatgaatctgtgattgtggatgagcgagcttatggtgtgttgttagatgggtattgtcgaaatggaagaatggatgatgctattaggattcagaatgagatgttaaagttaggcttaaagatgaatgttttcatttgcaattctttggttaacggttactgtaaaactggtcagattgataaagctgagggaataatgaagcatatgaaaagctggcatgtaaaaccagatttgtttagctataatactcttgtagatggatactgtagggaaggtcgaagtagtgaggctttcatgctttgcgaaaagatggttcgaaaaggggttgaaccaactgttgtaacttataatactcttctcaagggtttatgtcatgcaggtgctttcaatgatgctttgcgtcttcgggatttaatggtgaaaagaggtgtggcccttgatgagatcggttattgtactctgctcgatgtgttcatcaaaatgaaagattttgatggtgcaacgagtctatggaaagaaattttagctcggggctttaataagagcagttatcttttcaatacaatgataaacgggttatgcaagatgggaaaaatggttgaagcggaggaccttttcaataagatgaagcagcttggatgtgcccctgatgaagtaacttatagaaccctgtgtgatggatattgtaaagttggaaatgctgacagagctttcaaagtaaaggacttgatggtttcagaatcaatgtttccttccattgaaatgtacaattctctgattactggagtctttaagtcaaggaaattaagtaaagtgtcggatcttactgctgagatgaacactagaggactgtcccctaatattgttacttatggagcacttattgctggctggtgcaatgaagggatgatggataaagcttttaatttgtattttgatttgctcggtaaggggcttagtcccaatgtcgttattcataccaaaatcatcagtagtctctataggtttgggagcattgatgaaggaagtgtgctgttacagaaaattgtggattttggtacttttccagattgtggagcttctttgcagccatgtaaagctaccattagggataatgaaattgaaaaaattgcagattttctcaatgaaagtgccaagactgtatctttgcccaacaatattgtttacaatatagctcttttgggactctgcaaatccggaaagattgctgatgccaagaaatttttttctgctttgctgcttcgaaattttactccagataattttacttattgtacccttattcatgccactgcagccactggtaatgttaatgaagctttcaacttacgagatgagatgctgaataagggtctggttcctaacattactatatataatgctcttataaatggcttatgtaagtcagggaatttgggacgagcacaaaggcttttctataaacttcacctgaagggtttgactccaaatcttgtgacctataatatattgataaatgggttatgcaaaactggtgatgttgctgaagcttttaagttgaaagacaaaatgatcaaagaaggcattgttccatctgttattacctattctgccttgatcaatgctcttcgcaggaaaggagatgtggaagaatcagtgatgctttctgctatcattatcaaaatgggaatcaaggcaaaccttgtgaaagacacaaatttgattcaagatgatgtcaaagtttgagaatatgcaaaaggtctttgaccctgatagtgtggtacatgataagaattgtcatctgttgtttgtgccttgcaatgccctgtaaaggtctctgaaaaagctgtatcttgatgcaacagttcttggtgatttgcttttgtgcactaaaatcttcagaaagctgtatactgaaaatggctcttattaagtgaagaggggatactttgtggcttcacaattaaatggtctactacttctccttctaaggatgtcttctcaatccggtggatgtaagaaccatttaccgaaagaa

SEQ ID NO: 30385 - DNA, 1472 bp, Cannabis sativa
  modified_base (1239)..(1246): a, c, t, g, unknown or other
actttcgcttacaaaattagactcactatcatttgctaaaagcgaggtcaacaatagacttttaggggctggttgtgttactgaagcgcctagttccaacggccagtgtttcaggcttttcccgttagtcttaattatttctttgtttattcaggaaccacttcttgacctgactctttctttctcaaagttttgatgcaattttgctcatcactcaaaatgttactcattcggagttacccggagatggctcctttctgcaaaaaaaagatctttcacaatgtctcacatcctcttcaaggtttggttttcccactaggatgagttccacgagtgatgttcgcgactgccttaaccttatgcatttttctctccttggtctttgctagcctaatatttcagccaatcatgcaacctgatgggccaaacttatgtttaagaaggaatttgagcgtatttttttttctttttctatttcaagaatttcgcctgaatatgcatcttatgtctagatttgtgcttgcgtttagccttacaggaaagaattcaagtgaatttctctcgacgagacttattcgaaatgttttcgatttttggttgcatgcgcacattgaggctagtcatgagggtgatcatagacttcttgtggcgcaggagacttttggtttcgcagtgggaaaactgggcctgtgtccttaagcaggaagttccttatatgctgaggtccaaaagttatgtcaaatcctgtgatggtgaactttcaactttcactgggaaagtctaaaagtgcacaaggaattcagacactgactttgcttgcgaccgccaaaagggcatatgtgaaagcatcacggggagtggaatatgtatcaagcagtccttccattcctagaagaagagttgaagacatattgtactcccagtgatctttcttacatgaaaaacaatgtgcatgtgagagtcatgttgaatttttatgaagcaagctttgaattcctgaaaggaaggttgaagttgcataaaaattcaagcctagacttcgctttaaaagactaaatggaaagcaacacggggagtaaggctgacttcaagtagtccttccattctaggaaggagggttgaagacatatcgtacccccagtgatctttcttgcataaaaacattgttaatgcaagagtcacgttgaatttttatgaagcaagcttaaacttccaggaaggaaggctgaagttgcatannnnnnnnagcttagacttcgcttgaaaagatgaaacgaaaagaatcaaggggagtatgaaagacttcaagcagtccttccattcccggaaggagggttgaagatgtatcgtacccctagtgatctttcctacataaaaaacaacgtgcatgtgaaagtcatgttgaatttttaggaagcaagatttggctctcgagaaggaaggcgaaagttgcataaatattcaagcttaga

SEQ ID NO: 30386 - DNA, 1815 bp, Cannabis sativa
agtaaatgagtgctacgaactcagacaattttcattcacaaccacatattttcactttttcagcaaagttaattagtcgtaaattgggtagttttgagtctcttgattctgtaaaatagcaacatctctgacgctggtaaaagtaaattagtcgtaaattgggtagtttcccacttacccaatgtccaggttgatgtcatacattaatttgagcactggatgtcaacctggacattgggttgtcaacctaagcactagtaacaaaaaaccttcaataaaatatacatatctccctcaatattaatctaactgatgccattaaacttgtgtttcgaagctatttcaatgctctaataagtcatgtctcatactccaatcgcaattctcaagatataaggtccaaattttttcatcaagggagttatgaaattcaactataacttacctaaaaaaggtcccgttgacacaattcaagctccaaaaattgatgacaaacagcctttggagtcaatttccctgttagatcattatcaacagtcaaaaatagcttaaatgtattcctttttgacattttttgaatatttattataattttaataggacctccttccttataaaatgagagcttctctaactcatttttcacgtttagaaaagtgcccataaggtctgagcatctctatctcacgaaatttagggctttcacacttagtcaattcttttctaattctcatgagaaataaaaacttgaagtaaatagagctccattaccatcgcaacatgaggagtgaactactataaattatgtgtatccttttatatattctactcatctcttatttcatctgaccaatctagcgagcgagtgctgtccaattttaagcattaatattttggtgctttcattgagagccgaaacatgagttcttacttcccattcgattaaagtaattcgagaaaggtgggaaactaacctcctccatgagattctcttcacaagtctaatgactctaggccaacccttgacccagcaaagggaaagggacctgcagtcatccttaggtgacgaacctgaaagctctaccatgaaactgaagagtatgagattcagagggtaaagaccaaaaaacagcttcacacttggaaatatttctgtgatgaacggggtgcttggtgtaggtactttgcctgaggtcttgatggatagtagtacgaatactacccatgggtgcatggagacatgttgaacttgagcaatcaatttaactccctccacacatgccactctaaggaagactactttaaaggaaattgtcagtgtagtactacgaggagtttctcacaaagcaaatgctcgagagaaaatcctatcgtcatacaagataatccccacagttgctaggaaggccacacaactaggaaacaattacaacgcccggatcgatcaacatttttgatcaattcaaaagataaaagaacttgtaaagagacaccaataagaagcagccaggtgatatgcacatcaccacacgtcatgtctatatgaatgaatttgatactcttattgccttggtaaaaagtatcactactataaagctaacagattataggctagatcgagaacgattttctcctctctcaaattgaaacgaggctttggagatcccttccaaattaaaaactctagtgtctcatatataaattgctaaagaagatcctctctcccacatgcacaactttgaagtacaaattgacctgcaaagcattcaagacgattctcgttatcgaatctttttagccacactattagaagca

SEQ ID NO: 30387 - DNA, 2612 bp, Cannabis sativa
  modified_base (2560)..(2565): a, c, t, g, unknown or other
gatttcccatctgcgtctttggcctcgccctcccaagggatcgaaacgctgatttcgtacccgggtataatcttcccctttcgaatattgacgtaagcctcgccatcgaccttgtcaacttttttggtcttgacaaagagatttccctcgccgtcgaggatggtgagattggagagaagattagtgagaaagtttcggctccattcgaggcaattggtctcggcccagtgccagttatggacgttagcgccgtctggtctgtcttcgacaatccatcgcttgtcgccctctccgtacttggccatttaatataactatgtttgagatcagagaaagagaatatgggttttcagagataaaggaaaagtctttaaaggcgaatgtttgcgtccagaccagagagaatgagatgagaaagagcgagaaattagggtttgaaaaaggaagaaggagatgggtctggagacttctgcctatgaagtatgaaagaaatggaagggtctagattttgggattaccagttccgttatagaaagatctagaacttatgtgtgtgaaaatttggacttggggattagggtttatgtggatctactagggtttgtttgttttgctctattacaacatatgggcgaattagaggccagccatgtttgatggtaggggggtttttcaaaccgcccataatgcacaaattgtttgtaccgcaccacactacataaaatataaggtttgaaatcttttgcgattgtggtttgtatttttgtcaaatcatacgttgcggtgcgatttgcggctcgtaccgcatcacactacataaaaagtgcagtttgaaatcttttgcggtacgattgtagtttgtatatttgtcaaaccattagtgcagtgcgatttgcagttttaaatttaataattgtggcattatatattacaaaattactaatttttacaatatggtttttattcttttttttcgtataagaacaaatacatataatacatgtgtatattactttattttttagagacaattcaatataatgacttgatgattattacaagttatgatatttaaactttaataagatggtttgttttgcattgttaaagctttattagtttgatttgtaaatttttattataatatttgataataataataatagtgtaaattgcttaaactgtatcgcactacaccgtatttttgcagtgtgatttttgcaattttaaaatctccgttacagtatcaaaaattacaaagaccaaatttgcttaagataatgcaagaacgagatggtatgaggttgtttgcggaagagaatatcatttttcaagccacttaatttccacacttccttatttggagaacacccccataaaccatggtacacctctttccctgtgtctgcctgaacatctattacattctagtgcaaccgcatgcttccttttggaaaatatcgagtttgtatgtatccatgaatcacaaattttttatacaatatgtttaacttttggtggtgatttcaatttccacaaaaacttctaccattgttccattggcttgacatttgattgatgctcttcctctttcaaagttgtggacatcttgtacccactactaactggacattacccatgcttattatagtgccataaaattttatcctccaactcccagtcaccacttggaattttgaggatcatttcagcatcttcgtcattaaaaattatttttataaactctatatatcaacaaccatcaggagctttcagatcaataacgtaaaactgatcaggaaggaaaggccaatcaaaaatattgaaagtaacacgccgaggcaaccaaggatcttctaggacccttacccactattcttaaatgtagtttatcaaaaatgtgttaaagtagttcctttctttcaacagaaaaatgtgttaatgtagttcatttctttcatcattgtatttgacttgtagtcgtcacgccgctacattaaaagtcctacaccgtatctcacttgtagtcatctgaacattcaaaattattgtcatgactgtatcttacttgtagtcgtcactatattcgaaatcattattatcactgtatcaaaatttgaccaaatgttatcaaaatctaatgaataaaaaaaaaattaataaaaccttcatttattgttgctaccacactacattatcacatatacaatattattattttttttaacaaaatcacaccaaattagtatttatccaattatcaaaatcttgtcataagattaagagattatcatggggaatataaggatgaaaacactaaaaataaaaaactttgtaaagagactcacagaaagagaaatatatagaaaactcaccatagaatgccggatttgaaattcataaaagtgaaaaaaaaaatcactatacaatgttaaatctacaaaagaaaagagatttaatataataattaagctaattagatttttttttcccgaactttgacatgtaccaaatcatgtcccctagctattaagatcgttaaaaatgccccctgaactannnnnnttgttaaatttaaggacttttatccaattttagtaaaaaaattctaa

SEQ ID NO: 30388 - DNA, 2918 bp, Cannabis sativa
aaatcaatgcaaaactcaatctccttatccggtggtaaccttggtaaatcctttgcaaacacatttggaaagccactgatatccaagggaactggtctaaatttctagacccatccttgaatgcaaatagattcccacaatactctaaatttctttccctacctgaacatgcttttagaatgagatttttactaacgacaaccttgttggctcaatatacaatgaaatcactagtgggagttaaataagtatcatgttttcatttacatcctataatagattggtatttagaaaactaatccatttcaagagccacatcataccattcatcaagtaacactaacaagtttcgatacaactcatgttccacaaacacaatttaaatggatctttaaatgacaaatacctcactatgtcctcccataagtacactaacctataaaacatgattaaagtttttccaagtcaagcccatcatactcaaataacaatgatataaaatactttggtgcactggtaaaaaataatacatatgatctacaagagtgtgagataagaactatatcattaacaacttcctggcctgcaccccatgtatatcattaacactaagagcatatgtttaagcatagacttttccttctactcttactttacgttggctagattcatatgccaaatttcccacattagtaacctcactgagacttactagatattacaagggttagagggacaatcctaccactacatgcccaaaacatggatgaactatccaataaaaagagtgatcaataagacataagttgaggaaagtaatctcacaaactttatgtacaattcattgtaatatcctcttacctcaaccatcacatgctccaactattgtcctcttgtgaggcaaaaataaatattgctccctaaaatcccttaaaaatatttgtggtatctattattttggtcaaggtatcccagaaatctgctgcaacaattttaatttggacacaaaaaaagtaatatggtacttcttaggtgtttccctagtgttaaggtttacttatctaccttttctatctttcagtaactaaagaatcttatacaccgataaacttaggcattcagactgatgaaagagctaaaaataaagattttgttgagtatcaacatccatctactgagcaagaactcctcctaacagtactataattatggattttagaggctgtttttctaccccttttataaaaaggaaagctgaaaagtgtaaaaatacccgcttggatcaaaattgacatttagaggaagttttttgtaaaaattgtagctatataatttgttgatacaatttagagacggttttggaatcaaattttggatatttatgaggaacccactatgacttcggttatctgaaaataatcgatgccatatcaatgagagacaggtgtttgttctttaccatatatcgttagttattttcaaataactaacaccatagggttatataaataaaccttgttcagccttcctcccacttcgtcttcttcttcctcaacacgaaaatagaagccagcagccacataacccacgaaaaaaaccctcgcaaaacaccttttaaaaatcatatatgtctaccatttttacaccatttgagcctattttttttaaaaaaaaatcttctattttcgatacctaaacttatacaccaaaaatattttgttttttcccgtatttcactgtaaactgaagctattgaaaaaaaagtggtggttataatccagccactgattttagtggagaaaacatgaaatctcaacggctattaaggtataaatatgatttatattcattttagtaatgtacattactttatattttattatttaaaattttcttgaggtttttttttttatattattaacattatgttattgtgtatgttcatggtggccgaacttttgtcgaaattggtcatcaaattgtgcttgtaaagtaaaaatttaaaccttaatatatagtatatatgtatatattttggattttattaaatatttacatatatatactttgcattgtgtattttatttataaaaatattataattatattgtatatattctaaggaatatatatgtattgtgaatgagaatgagataggagaaatttaattagtttagaaatatgtttataaaattttattagtgtgagatataatttattatatatatatatatgtatatttaaatttcttaagaatttatgtatataatctactaactagtaactaattaataactagtaagtagtacttaaataattaaaattgtaattttgttgtattttattatattgtaggttgtgagctaattttcaaggttccgaataatttggagttgatcgtattttagcttgcttcaggtatatgccttcactatctttttgttattaattttttatcaatacttagtggaatttgacaatcttaaatatttatccgtagtgaactaggttctgtgatatattatactgcggtcggatgggtagaataatattatgtatgtaagttgagtttgcatatcttaaatattaaacaatattaaaataggttctgcaaatacatatactgcagtcggataggtggataatttttgtactgttaatattattttgtttgttttgtattattatatttattttgtttgttattttaggcatgtttaaaaattttgggaacgcccaattacaatcgttatactgtcaaaattttgatagaattaggataaattttcctaaaagtacataaatattaaaggaaaagtgtaacgcataacacaaataattggttaactactagctagctataagaaactagctagttaattacaacttatataaatagtaactatttacaattagtt

SEQ ID NO: 30389 - DNA, 1639 bp, Cannabis sativa
ttatatatgtaataaaaataaaaggtttagattttagggttttttaatttttgatatattatatatgtaataaaaaattaaattttggtcgggttggcaggccagtttgggtccaactgaaatgcgatggctatagaaaatcaatccatgaacccacccaaaagtgtaccgcgttaaaccctatccgcccgaacataattagtttttaaattttacgggttaaccaggtcgaatctggacgggttggacgggtttgggtcaaacctggtcaaaatgttcaatcctaacctatgcagtgattttaggagatgcttatgtatgtgatggtgagcaccagaccaaacatagctcatactctaagcatcctaggtcaattcatgtctaatctgggcattgaacattagaaaactcttaaatggttattaaggtaattaaatggcacttgggactatggtctaatctatgaaaaagtaaaaggagaactagaattgaaaggattcgtaggcattgactatactttgaatagagatacgagaaaattaatcatttcttacactttcatgacaaaccggaactgtatatattagaaggcccaattataatctgtggttaccctttccactacagaagcagaattcatggctactacagaagcattgaaggaagcattatggcttcggggaattctatttgaattgaaacaaataaaggtggagtgattgtgtactcggatagtcagtcatccattcatctttgcaagattctagtttatcatgaaaagagtaaacatatagacataagactctactggattagagagaagatagaggagggattgattgaattagagaaggtcagatcaaaagataaccctgttgatgttgggactaaggtcttaacggtaaataagttcaagtattgtttgaaattgatcaatctcataagttagtatactgagatatctagaataccaaccatggtggatgcattctttcttcatcaccgttaatattttaatttaaagaaactatgtagaatttgtggtatagttcctccaaatgaaaagatctccaaaagttgtcctggttatgaaaagttgaagtctaacttaaccatcaagaagaagtctcgtggaatgattgatgtcatccgaatgggcgttcccggatatctattgtgtccactcgtaaggagtcttcaggatagctagtattcctctagaaaggagttctggatgggtaggtgttccggatggaagggagttccagatagtcgacttcagttattgcctttcttattcagaaaatcccttcagcgtattctttgatccatcttttgagaagcgtacatctcattgagaagtatttatcttatggctgacgtacgtgggagataatattgttacgaggagtttgttaagtttgttaagtcgtaactaacttaacaacttagcacttgcagccaccgactttaagatttataccttggacctataaataccaccaacacttattatttttagaaaagaacgagatcagacgagttttaagaggtgatcttgagaaagaaatattgaaaggtacagagaaaattgagagattgagtttggattttgtatgaaaaatcttttgtagatgaa

SEQ ID NO: 30390 - DNA, 3661 bp, Cannabis sativa
  modified_base (27)..(39): a, c, t, g, unknown or other
aaaaataaagattacattgaaatagannnnnnnnnnnnncataaaacccaacacaaactactttggagaatatccactcttcctcggcagttagtgatgctgatcttcagtatgcaaaaaaaattcaatcttctctggatgctgccctttataaagaagaagtctactggaaacaacgttctagaacttcttggcttaaggctggcaataaaaataccaaatactttcataataaagcctcttctagaagaaggacaaactccattactcatattacccttgatgatggtacggttgtccatgatttacaacttatttgtgacaatttttgtgctttccacacaaatatttttacctctcaaggctctgattctcactcaattaattctattctttagggtgttaataatttcctttctactaaccaatttcaattcctcaaccttcctttcactcgtgatgaagtcaaatcggctctgtttcaattggctggtgataaagcaccaggatttgatggtttgaatacctatttttatcagaagaattggtcaagtgtgggcagtagtttatgttctgcggttcttgatgtgttgaataatcaaactgacatctctcctattaatgaaaccattttaattctaattcctaaaaagaataaggcttcttccattagagactttaggccaattagtctttgttctactatttataaattaatttccaaagttattgccaacaagctcaagttggttttaagcgatctgatttccaataaccaaagcgctttccttagtgatttaatcatttttgataacgtccttattgctaatgaagttattaatgcaataaacaataggaaaggaggtaaagttggttgggtggctctaaaacttgatatggaaaaagctttcgatagggtggaatggaattttattgaaggcatccttaccaagtttggctttccttccagtttagtctccctgattcttaagtgtgtctccttggtatcctttatattatccattaataatgttctcctaactttcttttctccctctaggggaattagggagggtgatcctttatcaccctatctttttctccttgttgctgaaggtctttcagttgctattcgcattagaaccagaactagtggttttagtggcatttccaatggtagatctgctcctccaatttctcatcttctttttgctgatgacagccttttatttactgcagttacacctagtaattgcagagccattcaagacatccttttcctttgcaataaatcaactgtcaatctgtaaattttccaaatcttccgtccttttttctctcaatactaatactcatgataggaatctgttttataatactctcggtcttgataataaaccttttgtgtctaaatacctaggtgttccggaatgctttggccgatccaagaagtcttccttcaattaccttcttcagaaagcaagtgaaaaattaaatatttggaataataaatttttctctaaggctgggaaagagactcttattaaagcagttctccaagcaatcccttcttatgcaatgtcttgcttcagaattcatgtgtccatttgtaaagagctcgataaactaattgctcaattttggtggggttctataggtaatgaggttaaaatccattggaaaaattagaactccctttgtgtttctaagttttttggggggttaggtttccgatcttttgtcttccacaatcaagctcttcttgcaaaacaagcctggaggatcttcactaatccaaatcactactctccagaattcttaaagcaaaatattttaagaataatgactttcttgctgcttctaagggccataatccttcatattcttggagtagtatcttgtggggtagggaccttcttaaacaagggcttatctgaaaggttgggaatggtaaatcgatctccacccttcatagcagttggatccctggtttcaagattctcagctttgaagacaacatttatcctcctaaaaacacggtgtcttttttttataaatgatcctggtttttgggatcttaataagctccatgattttttctctgagtatattatttatgccattcttactatccctattgaccccaccagagaggattcacttatttggggccatcattcctctgggatcttaactgttaattcatcctaccaccttgcctcctcttgagatccccacaatagttcctctccttcctcctctaactcaaactattttaaaagcttgtagaaaactgtttggaaccttaacatccctccgaaaataaagcacttcatttggaaggcttttaaacatattcttcctacttccttcaacctgttcaataggaaaattcttgataacccaaactgctccctttgctctaatcatgttgatacagtcactcatgcactcctagggtgttccatagcagtccaaatttggagtaaaactagattttttcaattttataacgatcataagcttgatgacataaaagattttcttttagcaggtttcgacaatttgagtaaggaagatctatgtttaattttcagcatactttgggccatctggaatgggagaaatcattcattgtttaatgctaatatagctcctattgcagatgtggaaaattggttacttacttacttgcaggattattcaagatctcaaggggtttccaacattgcagtccataatacctcagattctgctcaggagtcacttcctttaccgcaacaggagatgtttatcctaagtactgatgcaacacttagtaaagatgacttgaagattggttttggtgttgttattcaagattataggggcgatgttgttgctggtttctgcttatcaatgcttgatgatttttctcctattatggctaaagctcaagctctctattcagctcttcaatggtgcgaaaatgtgaattttcctttggattcggttaggtctgactgcctggcattagtaaataaaatcaagcacaagtggaaagatagatctccgctttctgacttagttaacagagtattattatctttatcttcttttactagtgtccaagtttatcatattcctagaggcagcaataccattgctcatgcactaactaaaaaagcattaggaatggataaagatttggtttggaacaacattggttcctccgattgtattttctgatcttgtaactgaacatttgggtgctatttattgttgaagatcagttcttcaaaaaaaaaaaaaaaaaaacttttaaaactcttaagagttccaagttcaatcttcatacctacttaaatatttcgaaaaaaaatattaattccttcctctttcaaaaaattagaatttctacccttacattaaacactattttgttatattttttagggacttttttattttaacactttaacataatttttttttttttttgcatcttacgtaatttcatatagaaatctctataataattaacagagcaacttaaataacaactaaaatccgtatagcaattcacttaaaaaaaaatatcggagtaacctaaattgtaaatttatttaaaaaaaaaaaattaaaaaataattatatggagtacttattattattattatta

SEQ ID NO: 30391 - DNA, 4886 bp, Cannabis sativa
  modified_base (4053)..(4063): a, c, t, g, unknown or other
tttttttttttttttctgaaagggcacttatactattgtattgaagcagatttaggataaattttatttttctaaaaactatatataacatcgaattagttatatttctttaaccagagtggccttaaagcgctttcatcaagttaaaaagtacatgttgaatcaattaaaataaaaggttaaaaaatacatgacaaaaagaagaaaaaaaaattacccaaaatgtggtcactaactgtcctttcaaaaagtttaagttttaaagttttataattcaatgaaattctggtcaatttatcaaacacaaaattttgttaaaaaaaaacaagaagtgatatcatttacaaagccctaggggtttatttttattgtgtaaaactgcacacaaacagtaacatctccagtgcagagagggcatgagaggaagacgacccgaaagtaattttaacaatccagactctacaaaaacgactgagaccaaagtcaccaaaccaagaagccattcagttcaacattcaaagaaaatggaagatgacaacagaaactaagtttggtgactggcaacaatctttctgaacaaaaaataatcattaaatccaaaacaaccaccctattcatgtataatctatacatggccctatgactcatctatacacttccaaaaaggccccagttgttgactttaaacgttgagacagcaagtttgaagacctcaagcattggcacacatccagaaagctcagcaggagtggcagcaccagccccgacggcggtagcactttcactcaatggactgaaaacaataaggaaagtgtgagggtgtcggaaatattaacacaacacaaaacagtgttgttaccatctatttctgttcaaacatttgggaactgaaccacaatcggagaatctaacacaaggagggtgcagaggaggaagattatgctctgcctctttacattactaaagcactgctggcaggaaaatttatgttgagaggaaataaatttgtatccttgaaattcaacatcttaacatttggaagaaaaagatgcattaattttacacttgcaactaatatgcataaattgactgaatgttgtaagtatattcatgtgtagatgctcttcttttaggtgttatttattcaagtataggtgatagcatttaatcaatgatttgtactctcagaaagaaaagcaaaaaaccgagaacttgttgcagcagaacacaaactcctagtacttactttatatgaatcggctcatatgcagaaattaggatatccgtgttaacttctttaagacgaacatttgcaacatatacccacaagataacaataaaatattaatagagcacagaaacactaaaccgttattagctggtggaaagaaaatcctaaactagatttaaaaaagaagagaaataacttaccctcacaacattttgtgcttccctaccttgccgtcccttagagatagcctatgttcaagtaaccaaaataatgaattgatatgagcccaaaaggttaatacagtttaaatttgagattcttcaaaggaagtttgataaacaaagaatattttccatgcaatggagaaactacaagccatgcttcaaaagcacttcttgcaatcatcatagttcttcgtaaatgtttctaatggcagttcaatacaaattatttggaaagaaaatattcaataccgataatgattaatcaggtgatgaagcagcacactgtttcactatttctcttccattccatatcagtcatcaggaaaggaaaaggatatattatgtaaggttacttgaaagaaaatgttgaaatatatacatatttgaacacaatttcccttttgttttttcatctttgtccctacagaagaggcacattgaaggaagtagaagaacagatacctagcatcaataatcacaagtttacgacagatacaaggttggtgacatttatgattccacacaatagaccaaaggccaatcatccattacttaaatgtgaaggcaaactaaagaaagtaaaaacccataaccaacagcaaacacaacctaaaagattactatggacacataccatttggcctactgcagttataatgacagcaggtgtgctcctatagcacagtccaggggcctaagtcactgctgactgttcaatcacctgaattttaatttgaggcaaattagtctttggcacaatagtttgaatcatatctcagctactattggggaaacttttctcatatccaaatattgcgaaagctagtatcataatatatcggcatttaattaccatcttacatagatagaaactagagaataagaactgaagaggactaaattaacatgtacgcatttatacgaaacaaattggataaccctttcaaaataaaaccataaacaatctaagacaaggaaaatatgatcaagttagcaattgatagatgaatacacaattaatgagtgtgaacaataatagggaaaaatttaattaccacgcagccttcagattcttgttcagaggcaaggtcttgaagaaaccatgaagcacttccatcatcaccaacttcttccttcaattctaatatctcaaagatcaaactttcatcccgggaaggatccacaaacacctcctttaaacccacaaaataattaagaaaaacaatcaataatgcataaataaacaacataagtgaaagaaaaaaaacaaatctttaatgcccagaagcttaaaatgaaaaattgggtattcaaagaaacgaagtgaaaactagaaagaagcatagctcctcagtcctcacctgatgatctggaacttctcgaatattactttttttgtgagataaaattaaaataaaataaataaataaaaagaaaaaaaaaatacctggaacctttgagggaaggtgctagttaaggcaccggcgaacagagggcgttctaagtggaaaccttcaggcattttatgctattttacgatacagaaaatgttatacagatttaaatcctaaaaaatggaatgcaacgagttaaaagaaacacgaagccaaaaaaaattaattctaaacttgtattgtatgataaacccagcgtgaaggaagaaaatcaagccctatgagaactaataccgagcaataacaaaaattcatacataaggcacgaagagatagacatagaaagaaagaaagaaagaaagaaaggaaaaaaaaaatactaaaacgacatacacggtcttagaggacgaagcaactgcgccgccgccggtgattgggttccttggtcgagagggaaaaagaggtttttggtctctctgactctgttgtgcagtgagatgaggagtggagagtcggatagcatcatttttacactaactgagaagaacaacttttgatttggtttggtttaaggaagaaaaaatcccacatcgacttgttatagcttttttaatatgtttatattgattactttatacagtcctatcgccgggtccagtcacgtgggcctgtaaccaagtggggcaaagtagttgggatgcatctggtgggccgtactccctagtcatatggatggtgctctctccgcccacccttatagggacgtggtaccattcctataagatggttaggagcttcaagtggctgaagtctgaagcaccgcacgctgccaacctggggagtagagttgacaagcatgtgaccctctgagggttcattataaagcaccatctcacctggctaacggtccacacgttgcaagcaactattttttattacatcactaaataatatatttttttttattacacaaagcaccgtataatattaatattatagtttaattttggggctaaccttagggagtagaggtgttggcttattaggaggcatgcatacgatcgaagattcataatagagaaatgctaattacaacttcatagttaatctctatgtccgaaattacatgccgaaatattttgttttaattttttttttcatagcagtgttcgttatatttacagtatcatccttgtaaattttnnnnnnnnnnngaatagtttacagtaccgaaaaaagagttcttgatattacagtttaccacacgcgttcaaaaaacttaaaacgtatattttgttgtacatattgatcgatccgtcgccatgactactggcgctagatataatcaaatttgattaattaataataaaaaaaaaatatagctattatattatcacaaaattaatcaaagttcatgattgaaaaaaaaaatgaattaaagttcatttgtggtatggaattattattgcttcattcgagggtatcgtatattcccgaaaacagaaattacatatgtcctaatcgaattcttttttttcccacctaatatatattaccaaatatattgcaattaatttagtttacaatgctaaaaaaattaaatattttgttgcatgcatgatatttttttatatatgtattaagcaactattttaactttatttttcggcatggtaaaactattcagaatttttttaaaaatttacaggtggtcctaaataactataacacagagaatcattaaaaaaattggactaaaaaactctccaaaatatcgaaacaaataatgggtttaccaaaatactcttttatgttcctactacggattttctctaatttttttttattttatattattttatttaaataagtacatgttaagaatttagtagtagtatatatcttaaaaagtatctacggtgtaacccttaaaaaatggtgcaccaatacaccctttactgctttaatatttagaaatattctttaactatttttttttcataattgtccacattatagttattgggctaattagga

SEQ ID NO: 30392 - DNA, 1271 bp, Cannabis sativa
  modified_base (58)..(61): a, c, t, g, unknown or other
tcagggtattttgggtataatacatataaaaataggtatgtttcaaataaatataaannnngaggtaaatttgattaattgattattaaaaggggtatttttcaactttaccctaaactaaatgtacgccaaaacaaaaggaattttggccattttataaaaagattcctccctcaaatattaccacaaatattgccccctaaattttttatataggtaaaaatactctccaaactattttccttaatagagttttgcttcttcaatcacatctggccaaaaaattgcttatgtgacaatagcacctcaactctatgcgtataattaaagaaatttattttctaaaaaagttaaactctaaagaaaactaaaattggttttggttctattgttcgtgactcttcagattgtgtaattgctgccatgtcaaaaccagcatttggttgttatagtcctcaaatggaggctaaggcgctgttctgtggctttactaatggctcaagatctcaattttgtacttggatttcattgaaacagattctttgctgcttagaaatgctgtgaataatccatcatcttcaaggtcctattttattaggagtattgaacctccttgacattgaagcatgagtaagaaagaggcaaaccagaaatagagagaagatagagaaaaggaaagagaaaggaaagagaaagaatggtgcaaagatatgatgaaagagttctgagattattattgatacagttgaggtatatatacaagttacactgatggaagaaccaagaatagatctaactgacttgtaacagaatgataaccaacctacaactgtatgacagttgttagttaacaaacaagataagaaattacaactgtactccttaacatatttcagtgatttagtcatagatattaaacaacatttatccaatctccctcaagtttgtgttcgtcatgtcagacgaactgctaatcaagcgactcatgaattagcaaaacaggctttagtgctggataatgtttgtatctggcatgattaaattccctctgctattctctctgttgttgtaaatgattcattctaatttataataacagccttttctcaaaaaaaaaaaaaaaaactaaatgcacaataatacacaactaaatcatatcttaacaatatattttaaagtttaatctatgtatttttattttcaaaaaagtcatctaatatatattttttataaattgtattactcagagtttacttttttttttttttttt

SEQ ID NO: 30393 - DNA, 2294 bp, Cannabis sativa
  modified_base (37)..(42): a, c, t, g, unknown or other
ttttatataaaatttcgtaaaagtacaaaaaaaaaannnnnnaaactattttaaaatataaaaataaaaaaactcctacatacatatattattagattttttcccagttgaaaccgtctctttctctatattgtatatattgtaattgtaattaatttcatattttttttaatgtatgtgtggtgagtattttgtggttgtatctttttacaatttttttcaaaaataaatagtgttgacattatgattcaaaacaacttgttaaacagttattatactatttgaatcttgattttggtaccctatattttatgacactgccccatattttagtatactaatgttttaattaagtcaaaataggaggctttcataaagtttggtagttttcttttcataagatctcttgatgaagtcattattttcttcaatgcacatttatagtttactcctaaaggattgttttagtaattttttttatttgtatttggcatcaagaaaaaaaaattagttgagttttttcttttttatgattttgtatgttgtagctatataataccacttgtaaatttttagaaaaattctaatagtttagtgtatcaaaaataagatttaaataattatttaccgcgcgtataaaaaaaaacgtcagttactcatgcaacaaaatatataaattttatttttggtattataaactactcaatttttttaaaaaaatttacagatagccccaaataactgtaacgtacatgatttaaaaaaaaatcttaaaagttctttcatatgctgaaataaatatgtggcctaccaaaacatcactttagattaccctatagctctatatataggttatttaagattttcgtgcccgaactatgacccatatattgttgtgtcccatgaattttttagcctgttaaaaatggtcacttaattattcacaatgctataaattagtcattctgtcaagttttgtcacacgttataaataaaatgatgacatggctgcttaactagttgtcacgtcagtgccatgtcaatgccacatcagtacactctctaaagtgatgttttggtagatcccatatttgtttcggtatataaaagaactttttagttttttagttttctttttataaatgtgatatagttatttaacattatttgtaaatttttaaacatttctgagtagtttacaatactcaaaataaaatttacatattttgatgtatgtgagattattatttttttatacgtatggtaagtaattatttaaaccttagtactataaattattgaaaattttctaaatatctacaaataattttatatatatagctacaacatatacgtgataatatattaaagttagtaatgtatggaaatatataaattaaactacaattatttttataccaaataaaataaagaaatctaccgaaacaactctttaagtccgctacacaaatttccagagctatatgatagagtacatatagtacttgaattttttttttttttgcagcactcgatctcaaatcttgatgcaagatcctctcccaacatcaacaagacctatgcttctattatacaagaagagagccaaaggtgtttgtcaaatgtttccaccaaggatgacaaatcaggatttggatctagttctaattatggacaatttgctggaaatgttcaaccacattgcccaaaaatggtatgtactcactgtggcatcacatgtcacacaatgtctaattgttttagaatctatggctatcttcctggtcacaaattgtagggtaaattccctaatagaaatgataatcgaagcaataatacctcaagaaaaccttctgcaataaatttttcagttaattctaagaccaatgatgggagtaatggagatagttctggtagagatcaagaccttattgttggtttgtcttcagtggagtgttaaaagatcatggcattgttatcctaaaagaatccagaacctccatccaactcatcaaatgagcctcccttagtgtctcatttatctggtaagaattccaaagtttccaactctaagtggattattgacacttgtgctactcaccatatgcgcagtgacatttctttacttcaaaacacatattttgatccttctatatcatatgttaatgtagagaatagtgaatcgaattgtatattacatttcatagaatattatatatttatatacaaagctaggagactaaatgagaaactactaaatacaaataggaaactactaaatacaagttacccta

SEQ ID NO: 30394 - DNA, 2132 bp, Cannabis sativa
ataaaaaatcagatatggaaactacttaactcatggaaagagcaattattctcagttggtggtaaagaagttcttcttaagcctgttttacaatcaataccaacatatgtaatgagttgttttcgattgccggtaaaattgtgtcaacaaatagagagccttatggccaatttcttgtggggctctttagcctcaagtaattccattcatcggaagaattggaattttctatataaagcaaaagtgcatgggggcatggggtttaaaaactttattcattttaaccaggctctcctagccaaacaagcttgaagacttttggaaaatcccaattcctttctctgtaaagttctgagacatagatattttcttcatggaggtcttctaaacactcaagagggatgtacaccatctctgacttggaggagcattgtttggggtaaagaactattacaacaaggtttgagatttcgaattggtatgggcctcaatgtaaactacaaaactaatccatggataccagtacaaaccttttcaaacctcttgtatttaagagaaccaatccatcactaatggttgctgatttgattacacctcaaagacaatgggatcacacgactttacaatctaatttctgtcaggtggacattgatcgtatctgcaccattcctctgaacttatttccctcagatgacatcctcatttggcatcattcttcaacaggttgctataatgttaaattaggtaattataaatttacatctaatttagctgcaagaaataaaaccagtacctctacctctgatgctaattggtggcaatttttttgagcctcaaattaccattgaaagtgcgcatcttcgcttggaaagtcttccatgaaatttccaatttttgttgtcctttgtaaaagacacattgttgatgacccaaaatgcttgctctgtcacaatcaattggaaacaataaatcatgctttgttttggtgcaaccgtgctcaaacagtatggaatcaaacagatcttgttttttatttccatttgtcttccactttgaacattcaagattatctagttcatttttcaaccaagctttcaaaagattaatttgagcagttcataatcatcctctggtgcatctggtttgaacgtaatgctgaaattcatggcaagaaagctaagcctgctgcattattacttcagtttgctacctcctatttagcagactacaggaaagccaaaacaaattcagccacaacatcaaatgctgcacaatctcagcccaatcaactgttaacacaaccttctgtagaggcccctcgtatcagtagtaaaccaaagtggttggctccttcctctggacgtctgaaattaaacacagatgcgacatttgatgcagcaaggggacgtattggaattggtgcaattttacaaaattcagctggcaacatcgttgcttctttcattaaaccaatctccaataattttaaatcagaagaaatggaagccttagccattgtccacagcctacaatggctccttcaaagtaacctggatgtccactttgttaaaatggactctctcattgttgtcaaaggactgcaacaaacggttgaataccattctgcttttcatgccattttaaatgatattcgactttttgtacccaatttcccacgagtacttatgtcacatgtttatcgaactacaaatactgaagctcatgtgttggctaagtttgctcttacggtggatgtagattgttcttattagttggaggaatatccacctccacttatgactattatgtaacttactgtttaatttatataatggtcttttctaaaaaaaaaataaataaattacaattcaaaatctttttttttttaaatttctgtttgataatgaataataaattgataataattcttatagcactgatcctacttactcttatattaaaataattgaaagtgtgtattataataaaaaattaataaatttattatagtaaacaacacaaatgtatgctataaatatatatatttttttttgaaaaggaaaatgtatgctatatttttttttttttgacaaagtgattagaatcactcatgaatttacgacgcccacgtc

SEQ ID NO: 30395 - DNA, 2634 bp, Cannabis sativa
  modified_base (26)..(28): a, c, t, g, unknown or other
aaatatagtgtaattactaaactgtnnnattaccaccctagtaattaccctaactactaattacacagttacttccaaacacaccctataaattttttttaattcacagtccttgcaagttattgacataattgcattcttcctctcataccaaatgcaagaaaagaagaatcctaacttcaaatctaatacttttcttggttgtgttgctcttcaaatcatgaaagcaatgtactcataaaatttacctctttaatgtcatttgcaaactctttaattgttgatatggctactgtggcagcttcttcataaggatacctgaacagtatgcaatagttagaagtagaatttcaaatttacttcatacacttgccaaaatgaacaaatagaagaattcaaaattacatagaattccactgtcaaagtcattatttcattaacaggtccttctttcctatagttgtttaatgagtggaaatagagaatattatttagttctgacttatacttacagtaatttcattacattaatcaatatcttccccatcaaatttcagacttacccatatacaccacatgatatagcaggaaacgcaacatattgaatgttgttctctttagcaaccctcaagctatttctgtaatcaaattaatcaaagcagaaaagatctagtataaggagccacaaaattaaaataaaggagaaacaataggaacgaaaaaaaaacaagaaacatcatgaatacttgtacgcatttctgagagagtctgcagcagtagggttgtcactatagatgggtccagcagtgaaaatgacatgagatgcaggcagcttaaaccctctgcatattcatagtgaaaccagtgtcttaatcaaagtgcttgttgaatcaaatcatcaaacaacatcaccataattttggaaaagcatttgaaaatagaaagaggttgttgtttagtttagtgtttacggggtaatccttgcttctccggtggggcagcgaacaccaggtctaacttctgggacactatagcatgctttcagaagatctggaccagcagccctatgtatggctacaacaaatgaaaaacacaaatttaaaaacttgtaccaaatttgtattcttaaaaattcatttgtgtacatataatttttacctccatctgcaccaccaccacctagcattcgctcattcgcaggattaacctataatatacatatatttatgtatagaagaatttgatttcgttagattaaggtggatatactaacagagttgaaatctaagcaaaataatcaataatattgcaataatcaaaagattttaaaacatagaaatccggaaagttaacagactcttttgttttctaataaaccacaattaaggaaaaagaaaaaagagaaaagatggagtgagtggtactgactatggcgtcggttgttccgtcgatgaaccacttagtgaggtctcctctctgaataacgagagaggtggaggcagacaaagggaagcgagcaactccagctccggcaccatcagtatccatggaaagtttgcgaaaacggtgagttcttgtgaggtgttggtatgggtattggtggtgtgtgaagagtctgagtctgagagttgttgttgtgagtagtcgggaccctttactcaaaatgcccatcactacgggaagaatattgttattttacgacttcgaagcagtcagtcgcacgcgaagtcacgaggaagaaagctgagcaaagctacaaaaactattgggccgaactaaactaacaaccgggccgaccttcatgagcccaatattatatgggaaacctacaaatatactcaaatttgggttaacttttacaaaaatactgtatttttataaaataacagaaacacaaaacaaaataactaaaacttaacacagtatacaatataaaacttatatagtattttttaaaaaatttttaccccaaagtaaaaaagtaaaaaagaattttagtatgcggtgtaattaatcctattatatggacctcattatccaaaattcaattttcattctccaaaattttcatttttttttaaatataaaaaaaacaactagtattcatataaaaaaaattaaaactaaaactatttggatatggaaaatacaaaagtattgtagagtactatctcaatttttacccacatgacgtagcatgtccacgtagacaagattagggtcacattgaatatagggtgtcaataggtgagccaaatcaccatgcacaatacatcaattaacaagggatccaaagacacgatcaagatcaagttacaaaaatggccaactaggaggatttggtcagactataccctggccggccaaggatgcctatgtgcaggcaagccccaagcaaaaggtaggctgaccagcacagataaagagcattaaaggaagcctgattgaatggtagggtccacaaccatcctcctagacgggtcatggttcggtttcaaatacaagacaactcaaacaacccatgaaagtagggattcaaccccaaactatctacctatcttttagggatattagttagttatttttgtaacttaaatatatgataaaagatggttttccctatttttaaaggat

SEQ ID NO: 30396 - DNA, 5451 bp, Cannabis sativa
  modified_base (3786)..(3786): a, c, t, g, unknown or other
  modified_base (5388)..(5402): a, c, t, g, unknown or other
ccaagtctcctactatgtaggtttggtttttatttatttattttttgtttaggaaaatggccctagggccgagacaatggtttgccccgtgtggcacattttttttgtaaggacaaatttgccaggttggatggctaacttggcttttatctttatttaatgtttcgtacttttatgcttaaactttaatatatacttgtttacttgtattttattcacaatttaaataattatattttgatcaaatgcaaaatactttaggccttttcattgctcgtattttcttctaataatatgtatgtagttagtagtctactatatgcgcgagcagtttattatttgccatgattttaatttgcgagtagttatcaattgtgtcttgcaataacgaatataatttgtttcaaacaaacttgaatatacttttaatgattttatcacattgtatattttttattgcttatatgaatagttagatcgtctattcacacactatgtttaagtacttttttcaagacaccttgatgtctcgtttaatactctctgatacaatgtgagacgttagtattcagctccacatgtgatttatgagttgtttctcatttataacttttgattttcctttctcgttggacaggtttttaattgaaaggttattcataatattttgatcctcctttctcgtcagaaaggtttgatcaacaaaaaaatttaaaaaattgtttaattttttttttttaaagtgttgagtgtgcaatatatcatgtatttctagatacattccggttaatcatgcacatatgcccctctagtaatttcaaagagtaacactttgtaattactttgaaaaaatgattaactttattcataaccgaagttcgaaagattacatcagaaatgtgagttacaataattaagttactggtagtaaggtcgcaaatatttcacgttctagtagttctttatcagcgagcctttcaaccaagccaatttataaaccccagttgctactatcgtttcaatcacataaggaccctcccagtttgggttgaatactcctgcagatgcgtctctcatatttgcaaatactcaccttagcaccaagtctccaacattaaatagcctctttttgacccttttggtaaaggatcttgttactcgatgttggttcactgcattagtaatctgggactcagaaaatttttcatcaagcagatccaaggacaatcttaagagttcttggttttcttcttgattataaaactctcagttatgagttgagatgtttacttccacatgtaacattgttctgagttgctgagaatggagtatgtcctgttgctatcttctcaatagttatgtgaccccaaagtacgtgaggtaactcatcgaaccgtcttcctttggtagcgtctaatttcgtcttgatagtatccttcaaggtttcgttaactattgagaagatactgacgagaagctcttaattatttttgttcctcacgtagaacttagtgaataactcaccatggaactgatgtccattatcggatattatcttcattggaattccaaacctgcagacaatatttttgacagcaaagttgaggactttcttccaagttatgtagacaagaggtttagcctcggtccgtttagtgtggaaatcaattgttaccactgagtacttggctcccctcaccctgtgggaagtgccccaatcagatcaatcccccatatagcaaatgggtaaggcgaggtcatcatccttagttctattggtggcacgcgacgcatatgttaaaatctctaacacttatcacattttttgacaaactcgtgggtgtccttgttgattattgtccagtaatatccttttctaatgatattttttgatagactttgccaaccttcatgatccctacaaaagccttcatgaatttctctgatgatctcatttgcttctgctggaagaacacaccgaagtagaggcattgaataacctcttctgtacaattttccttcaactattgtgtagcgaggctctgagtacaaaagtttttgtgcctcatttttgtcagttggaagatgtccgtcgagtagatagtttattataggagtcatccatatgggtgagctatctatcatcttgatgtcttccttttcacatatacttggctcgtttagcatctccactgaaaccaagtttagctcatccaaatcgttctgcgatgccagttttgcaaaggcatcagtgttagagttttgttctcttaggatttgctcgattttaaaataattgaatctttccaagttcttccgaaccctctctagatacttagcaattttcaggcccatagcctggtattccccgaggacttaatttacaatcagttgcgaatcactatgacatatgagattcttgacattcaacgcttctgcaatcctcaaaccagcgatcaaggattcatattcagccttgtcgtttgatgcgcatcaaattgaaatctcaaagcacaatgaaacttaaagccttctggcgaaattaatatcacccctgcacccgagccctgcttgttggatgcaccatccacgaatatcttccaagtgttcgcatctcgccaaacaagcaaattttcttctggagttattccttctattaagaaatctaccaaagcttttcacttgatggatgtttgagggtgataagttatgttaaactgtcccagatcaattgaccattttataaatctttcaacaacgtctggttttgataaaacttgtcttaagggttgatcagttaacactataattgggtgtgccaagaagtaaggtcgtaacttgcgagatgcgtggattaggcataaggcaagtttttcaagagggggataccttgattttgcccgcaataaccttttactgacataataaacaggttgctggtgctttccctcttctcgcactattactgcactaattgcgtcatccaagacagctaaatagaggcgtaatgtctctccaattaattgtttcgccaaaaccagaggtgtcaccaaatgcctttgaatgctttggaaggcctccttgcattcctctgtccattcaaatttcttgttgccccgcaatacattgaaaaatggtagacacttatcagttgactttgaaattaatctgtaaagttcagccatccttcttattaaggcctggacttccttaggcttggttggtgatggcatatctatcaaagccttgattttctaaggattttcttcaatgcccctcgcgttgactataaatcccagaaaatttcctgaggaaactccaaaggaacactttttttggttaagcttcatatagtacttccttaatatttcgaagcactccacgaggtccgtggtatgacttccactttttacattttaccaacatatcatcaacataaacctccatgctccgcccaatctgattcatgaacatttcattcgccagtcgttgatatgttgccccatcattcttcaacccaaatggcatgaccttataccaataaagtcccatgttggttacgaagctcgtatgttcttgatctgggagatgcatttttatctgtttatatcaaaaatatgcatccatgaatgacataagctcgtgcctatccacaaactggtcaatcatgggtagcggaaaacaatcctttgggaatgccttattcagatcagagaaatcaatacaagttctccaagttcctttgggttttgggacaagaacaagattggctatccacgagggatnaaacacctcgcgtataaagtcattgaccaacaacatttccacttcctatttgagtgccccttgtctctcggaatccaagggtctcatcttctgtctctttgctgggtagtttaaattgacatttaaatgatggcatataatattggggtcaatccctatcatatctccatggctctaggttaaatgatcctggttcgcccttaagaaacttattagttgctatttcaattgttcatccaggtttctcccaatgtaaacacactttgtgggatttcatgggtccatgaaaatttcttttaattcttcaattggttttaataagtttccttcttcttcaatccggggatcaagatcttcatccttcttctcgactttttcagtcaagagtgccattagctggttaccagcttttctgtgctgtagctctatgcgatatcactcgtgagctagtatttgatcacctcgcactactcccacatccacgggtgtccgaaatttcagtaataagtgcttaataaaactaactgcccttattctgattaatgctggtccaccaatagtatattgtaagccgatgataggttgacaacaaaaaagtcttacattattgtggtggataaagatgtttccctgtataggatgttcactaaacttctgttttctattaacaccatttttatccccttgttagcgagctggattgtgattactaatggatcgacatgggtacctcacatctttttcatcttccttggagaatataatcggaggttctttagtctttaccttcttggaaggttctagagcaaaggcatactgctcggtcttcacttcctttacgtacctcttttgggcactattgctttctcctacaatatgtggccctctcgagataaccaggatatcctctccttcaactggaggaggttgtaatccctggttgattgggttattggacagattgggttggttatgtccattgctctatcttttcacatattgcttgaagtggcctcgtgcgatgagactctctatctcatccttcaactgacgacactcatctgtagtgtgcccgatgtccttacggtacttacagtatctggttggatctcttttatgcctcgcatgcctcatgggctcaggtgtaatgaatgtaaccttgtgctcatgcgcgagatagatattttctcgagtttcattaagctcgatataagtggtgtaaactggcacatacttgtcgtgcttcttttgtttcttcttgtctttacatgaccccttagagtcatctttcctctttgagatagaggccctgggttatcaactttactcgagacagtgcttgttgaaacaatgctgggtttgcttcccgagccagcttttataaatttaatcttttttcgagcttcttcctttcgttgaactcagtgatgtttttcactaaacgaccctgtaggccatcccacagttcgcctccagcaatggagagatcagtagtgatccctgcctaaagggtagtaagctgggtactatcatccaaattccttactctcgcagaagctgtgctaaaacgacttaagtatgatgggttttatgccctaaatnnnnnnnnnnnnnnntgtaatctctatcatttaaatatcaataaagagacagaagtatttttca

SEQ ID NO: 30397 - DNA, 1610 bp, Cannabis sativa
  modified_base (1158)..(1161): a, c, t, g, unknown or other
acgtggtatgtaatcaaaccccacgatttcaggggataattgttgtaaagatatcagtcaactatgtaattaactgccttactatgtaattataaatagaaaacactcctagaactgtatcagaaatctaataagattcactcgtggactatgtagaattttaactacaaaaccacgtaaaaaacgtttgtgttcttactttgtctttaccagctttttatttttgagcaagtttatctcaatttcggctcaaatatagttaacaaaaatcagcgttaacattccgcaagtccaaagctttttgcaggatccccaaattgaggatctatgtctacttccctactttgggccggacttcattgctctttgccggactcttggtcagagctcttagcaagaattttctcctatttggctttagataaagccatgttgtaatagtgtcgggcagactgttggtctcccatcccttgttggaagctttaagcataggtggtagatggacattactgcattcaggtcgtatagggcaggtcgatctatatagatcctgataaaataatccccgacaactagcctcagagccatggtaatgatttactttcataaaatatagatttaaaataatgattgtgttaatttggatatgttcatgatggtttatgtgcatatttgatgattttatggaaatcgcaattttacaatgataaatatttttagtttcgttctaaacttttcctggaatgtagatgaaaaataataactttaactttttacagaactcaatttcgattttttatgaattagttatgattttttgcatttgggaaaaaatattccaaaattggtgcacacgtgtgcgcgcgcggatggaggtggccactcggtcatgaccgagattcaaacactaccctgtccgaggtttctcggacaagggctgtctgaagcccgtgtaacgccgaactggcttagccaagtaggctgcattgcagcctctccctcgtaccttcacccgtcaagggctgtttgtgatattttttaattcaaaaatcatttttcagtgaaacaaaatccaaattttgctagaattttgtgtagaatctaaattttttttaaaaaatcttcttattagaataaaattaattttttaattaattnnnnttagttttagatattagtagccttcgaatttgaaattttgatttttttaaatttttttattattttatttgttttatttattttagttggataaactaaaataaactgttttaataaactgaaaatttgaaaaattagttggatatgtgaatttcagttagaattttagatatttaggagatttgttagatttcaaatattttgaaatattctctaacaacctaaaattttaaattctagttaagatatattttaaatattttattttaaaatataagtatcttaacctactttctaaatatatgttacatgtttattatgttttttatttatttattcaaaattatttttacaaatctattatttatttgatctaaattactatgattaacttgttcacaaatctaatatctgattttaatcatagtccaattgtcaatagatcttat

SEQ ID NO: 30398 - DNA, 4631 bp, Cannabis sativa
  modified_base (270)..(277): a, c, t, g, unknown or other
attagatgttagattttaccatccgatctaattaatttcagtcatccaatcgatccaacctccattggatgttggattggatcagttctatccgttgagttatttcatatgtatttattggtttaatttaagtttattcaatattttagacctagtattttttttggatcggattggatcggatccatccaatattttaggtgcagtatgtattggattagattggatcaatccaatccaaaaacaaagagtaaaattttaatgttaatnnnnnnnnatacatatatattttacgtataaccatataaaatctaactacccatccaaactaaatgaaaatactaattagttcgattggatgtattggagttttggacacaacatccaacatctattccgattcaattggatattcaaatataacatctaatccgatccgatcacaattggatatccgatgtttggcggtcggttgtaattggatcggtcggttgtcattggattggatgatttatatttaagttggttgagatattcccccaaagtagttaagtgattctctccaagtggttgagagattccctcaatcggttatttgatatttaattcaaacataaatatttaattcaaaataaatatttataacagatccggttataaatatttattcaaataatttaaatatgatttaatttattattttgaattcaaatatttatttaaatcaaacatttattggttttaattatatggtccgtataaacctaaaagcatacgcatttttttagaagcctaaatatgattaaacttttttccatcatcatggtgttcttcctcataaattgagataaaacgagaacaatattatatagtttatcatattagcccacattatacagtttatcatatagttcttcatcatcatctgaggatataacttacaaaaagaaacaaggataccctaataggtttttcaagatgtaaattttctttttgtctatttatttgagatttaatgtatatacatatggtgatcatgacgatgtagtgcgatgataatcaaaaattattattccactacgtacttgatttagtaccacaaaacctacatcatggccttagccctggcctcggacctagattcggactccagccctaaaccggatcctaggcctggaccccgcctctgtctcgagatcagacactggatcgcggccccaaacccaaacctcgtcccaaccccggacccaaacccggatccaacttaaataaaattaaaaaattaagattaactttatgaaacatacttttgttttttgtttttatttttaaaattaaaacataaaactggttataaaaagcatttttctttttcaaaatcaaaatttttaaaaacaaaaattctaatttaatttttgtgattaaaaaattaaaacaaaaatatacaaaggccacctaaatatacatatttatcaatcacttcgaagtatctgaatataatatagatctatgaaagaaaagcatacaacaaactatatacattttatatgaatcctttcaattcaattcaaacagattttccagtactcctttggaattaaatgaactatttttttattcgtgatgagcgatccttcctttgtccaccaagaatacgagaaatctgcaaacctctgctgaatgcttggttaaacaacattcgtgtctgaaattccgaaacgaaagggaaccaagccaagaatgcaacaggaataaagaggatcattcccatgattacttcataataacgtgcaagtgttctaactgatgcccacaatgcagtattttcaattagtggcttacaagcttgcgcaatctgcattatattgagaagaataatgattagcacacggtcaaacaatattttcaaactgtaacaacccatagaaaatgtaagccatctttgaaaataatgaactaaccaagagcaatccccatccagttggcatgaaggcaagaatgattgctacaatgtcctgaagtgtcatatgggggagtgcaattaaggtgatgaaaagagttaaaaatgatagaaaaacaaatcccttaaaaagtcgaaacagtagctgaaactgtgcactaaatcttcgccttccaatagatgcaacctgcaacatttttaccaagattattaaaataaaatccaaagagcaaaaagaatctgcagcaaaagcaaagaaaagcaaatttaatcctctttcttggcttctaggttcccaaaacaggtgcttcttcagatatccaatttgaaaaataggtgcttgtgcatatttctgtgtttattttgtttcttctctttggtattactgtgtctcaatatacaaaaagcgattaatttttcactaaaaactgttccaaaaaaaaaaaacttgatgcaatgaattcaaagataaatattggtggcttaatgaaatggaatgaaaaggaaaataattttcattccatgtgctttgtttggttgtattttaaagtattggaagatcattataataaagtggtcttttcactattttggtagaataattattctattttaaaataaaagaaaaaacaacattccaatgcaagatttgaaaaaattcctaactttttttttttcaattttttcatgtatttcaaattttattcaatttcattcctattctaatttttactcccatttttatttttacattttcattcctccgaaccaaatgcatagtcttataagattccagtagtcttactcacctttgtcaaaagcaaaactgcaataattacgagtagcgaaataccataaacctgcatgccccacacaagaatcatattagtaacttattggtactgcttcatgttgattgtacagcagatatttgagtaggaaaagaaagtgcaggaaagcaaaagcaattaagaaaaacataaaaaaaatataccagaaaacttttggttttctttgtgatgctcaaatgatacacaagaccatattgataaacgaaaaagcggagcgctaacagtatctcagcaatggcaccgcgcatcccagagtgtcgaagatgctgttgttctttttgccaccaagattcccaactcttatcaggagagacgccaatgccaccttgattgcttatccacttattccagtcattccagtcatcgactatcttttgccactcaaatcctgatgggttgaagagaaaaggagcaaaaagccatgttcctaccataaaccacattgatacagtgatgaggacatatgcaactacacccgtatatgaataaccaaaaatgtgataaactagaagcagaatcattagttcaatgcccttgacaaaatgactccttgaatagaatctatagttttcagcaaattttgcatggaacactacaaatccacggcctgttcctctatattcagcccctccatggagcagagttcttccataatagtgcgtctttgttccaagcgaaaatgtgaaaaatacaggtgctagttgtaattgcattaatatgaaatcagttagtgcattccggaaccccctttctaaaccaatttccatcaccataggcagagccatcaaaagtccaatttggacaaaagactgagaagcaagagctacttgaagagacttattatctcgaatagctggctgagttcgcagcccctcctcaagtccactaagaacaagataaagacggccatagagaaacacatagactgtgagcacactcagctgccagaaaagagccaaagagttaaaaaaaactacccaaaagagagagaaaggttgatcatacaaaaatttacttgaataacctaccaaggtgctgaagtagaagccaactgtggtaaagtaacatgacaacatccggaaaaaatcaaatctatgcccaagcctatatatatcacgacttatagtctgctcgccgttcccattagctatctttgcctcaaacactgagatctggttgagtccaacatcccttcctttaccaacttgaatatactcatgatgagttacatttccttcacgcagtgtagaattaaatcctgcatataataaagttgttgtgtaattatgacagaaatcgaatattgatcaagggagagaaatgaatatctgcagaaaaaatatattgcctgcaaatatgtcctcgcttaagttgatgatttttgaagctttgctaacacctcctcttgtcaggtggaacagcctatcaaagacatcaggatgaccgtagtggaagcgaactctgaatgaagatgaaattagtataatgtgacacaaaacaggtaatctctaatgtttgcaaaacctaaacaagtgggctccaatatttgaaaatgtgaaaaagtgagagagacacataggtaatgacaagtgtgctaagaattcattgtctcaaacttttagtactttccataaattctacatcaatttaatgctagagcattagtttccctttgtatgttaatctttagaatcttagttgcaaagccaatatccttcatctcaaactctgacttgaccattccttttaccttgtccactttttatcacttttttaaacaaacattgttatttcaagcataagtgtgtgaagtgaagcaa

SEQ ID NO: 30399 - DNA, 1906 bp, Cannabis sativa
agtaccatactgagccatgtaacatttataagtggttatataagggtttctcatactatatttctttagtcaaaatgtgtgagaatgagatttaataataaattacattaataaggatatattctatttggtacagtaaattatgtcttaattggcatttgtctacatgcatatattaatgtggcccacatctttattacgtcgtcgtagcaatattttgtagaatatatattaatgtcaattataggctcacatgcatttacgtacgtacatttatatatttattatgacatttcatcatcaatcacagatattaaaatcaacaccagtactacatcgatagagatcttcacaaaaatctaagggacatattataacatcttaaaatagactgtactacgtacatatatacttacgtgtatatatatttatagttgatttcgaatcaacgtgagacctacagttcatcaatgattagatttaacatataaaattgatgataacgttattcatttatatggtggatgttgatttttcaaagttccaatatttgttttgatttcatattttttatctgacatgattatatattacatgtgtttgatgaagattaaaagtcatagaacgagtatatatatatctatatatatatatattgaaactcaaactaagagaacttgtatttataatggagattatagaaactatgtacgatcgaaatttgatatagttctcttgtggtgttcttatttttcccattattaattattatttttttctttatatatatatatttatttatttacattgtgattttgtttttgatataaggacaacgtaataaatgttaaatttagtattaaattaataacaaaatgataaaattttagcattaatttgtttttcaattccaattacaacactgaaagtacactaaaattatattctttattattatattattttattaaattataaataaacacaaataataaatatataaaaaaagaaattaaatatatagtgccacactaacaaataacaatagtacgacacactagacaatgttgtaaatatataggatagattttaaagtgtggttagaataaatttagtataaaatctcattaaatttaatattaattttcttgttttattagagttggctaaagcaattgacataatactccaccaaaatctaagtaaaaaggaaaccaaaaaatggctataaaaaatagaacacatatgcacccacctaatgctcaaattccaaaattaatcaatatgagtaattttagttttggaagaaatgagttgactaattttatgaactatatatatatatacactttacatttgtaacaaaaatatatctttaaatatatctttctagctttccaaacatcatacaatatggtaaaaaagagtagtagaatacactgccatcttcaacttggacatcttatacttttggtcacccatctcataagctagttaattatgatgtagttccttataatatatataagtttacatatatacatatatatatatatatatggttacggacaaaaataactgtaaatatcagttttataaatattaaataatttatttttgatttaatgactaataattaaaaaaaaaattgagtttatatgcttaatttatttatttaatcaaaatatatatttttttatgcttatattaaaaatatatttatataaacaatatctaattcaaatttaaatttttcttttatctctcaccgatgaaaaaaccacagccatataatgtaaaataaataaataaataattatattataaaattaaacataaaaattaattttttttttaataatacttatatgcattgatataatgaaacattgtattatagataagt

SEQ ID NO: 30400 - DNA, 1654 bp, Cannabis sativa
gagtaatctttaaaaattatttaagtttatattttttttaataatggggtgtacttatcattttgtggggtgtaaatagaactcccctagaaaaaatctctatataaatagatgtaatactgataaatacaccaaaaacaaaaagagtagattaacacacaaactaacatattatttcacttaatcattttcacaaacacataatattccaattagtccttaaaaaaaaaacaaaaaaactgagaattatccaaaccactcactaaaaatcagtcataatttcaccattctcaaccacagaagccaagaaagccttcttctgcgaattcctaaccgaacagttccctctaatctcaccttccttaccggtcaacacattaagttgacccatcttagtcatggcgatcacaaatttctcgaaaaacagagtctgattcaccgcgaaactcttcacgatctccttagtcttgctgtaagtgtagagatcttgatcggaggtgaaaagtccctgacgattcatgagatcgacgtagtatttgttgtcgaaggtgttgggtgttcggagatcttggaaggtgaaggcgtcgaagtctttagttgggcatatggatttgagattcttggcgaaggtttggtccatgactggatcttgggttgggtagagacggttgtcgaaggatccgcagtgggcgattccgatggtgtgaccgcctgagagggcgacgacgtctgtggggtcgaggttttggttgtcggcgagttgtttgagaatggcttgggcgccacttgagggtggtggaaggttggcattggtttcgttttgggttgcgaatgctaagccgtctcttcttcccaatggtacggcgtagtctgggccaccggactgtaattgattcaaaatcatgaacaagaagaaagaagatcaaaattaataaatttaatcaacattatttttttaaaaaaaaaacgaataatttgaggctcattttaattttttaatttttttaataatggtgtatattatggaaataatttatagtgttaaaaataaattttaaataattatttattataatgtatgtagtaaaatgatatagcataaagggttgtgttattatagcattagcttaaaatgatatatattctcaaataaattcgtttcagataatattattaacttattacttataattagataatcacaacatgatgtacaaagaaagaaacaaagggtcattgttttgtgctaatttttaattatcaataataataataataattgttttgtaaaataatttttttatatataagaattttttcttataataatttccaaacatacacctaacctaaacctaatgcacttgacattctattaaaaagtctgacagtaatggtcttgaaaatatcattttacaatgagaaatgttaaaagatagggtgtatcatctttttacaatgtgtatcgttatagttttttttataatttaatataataaatattagagagtatatatcgtcaattaaaatcacatacatttttataagtaataataataataataataactattatttattaaaaaaaaattacgctaattagcaattttttctcccgaactttgacatgtactaaatcatgttctctgaactt

SEQ ID NO: 30401 - DNA, 3411 bp, Cannabis sativa
cattttatttgtccaaagcctatacaaacccacattggtttcatttaaatatgtccaaaaacaaaaaagatgaataactttagttaaaagcttagagagagaaatgttttttgaaagaatttttatgagaaaaattcttgagtagaaatggggtatgggttgtgaggagtgttgtaaaagactgtgtattttttatttctcagtttcagtaaaagatttgcagcacaaatttcttatcaaatttgtgtgtgtgtgtgtgtactgagctaaataatccaacgacttggagaaaatgaaattcaaacatgaatgactttagggtgacacgcatttgaggcctggccagtacagccagtacgatattacacccttaaaagccacatgggaaatatgccacctacaaatccaacggttgtaattcatcctcgcggtgacctatccaacaacgacccatgtaagagaattggcctataaatatcgcacagatagcacaatgagagggatcctttttttggacctttaccttcagattgaatacttattcttcatcaagaaaacacattactataaccccactattaactcctgaatattcctactgagcttcctcttattcaagaggaacatgatggaaaagtccattgtatttatatttttataaatagccatcgaccgatgagcctaataaaatgggctcgtggtctaaggatagttaacgcctaaaccacgcaaaaatatcttgtttattattttattatttacgccatcattactttcttaagctctaaacatatttggttgctaaaaaactcggtaaacattttggtgctttcattgaaagctgaagaaagaggtatgcaccgaggttaccggcgtgagcctataagaaaataggttcatgcaagaaaagaaggaacacctcatgatctcatgtcgaggtctagccaatggctaaaaatgtaccggttaaggtgtttcttgaaataagacctgatgcgctcgtctgcacgagaaaagtggcaaaaacaaatgcacgcgtccttaagcaaatactacattgatttttgtcccaaaagcttagatctacccagccaaatctctggggtaggattgactgccgatatcgttagattccgatctcccactatatcaccatccacgagcagagaggcagtggggctagaccaagaagctacgacccatgagttgcgacgacaaattcaagaggggtcatcagatgtaatgactctatccagctagagactctgacgccggtgctggcgtgagggcctgatctatattccaacaactacatcccctacctttgcactaggtggcgaagtagttcaaaaatcgatctataatggcgtcggctgagaggagaccatcagtactgtcagcgtctgctgggtaaccaatgagcctggttatggtactattggacggagcagaccaccgttggcaaagttcactcaatgcccttcttgtgtccttatatggctgtaatcttggtgttgcatcaggaagggcagctcaagacataataagccagtaaagaatccttgatgatccactacttaacctacttggagtccgagtgcttgccccagaaaccataaattgccttgcacttcatcggaggaaatagattgcccaagagatcttgggtgtaagcatgcacctcctagagacttccatgactcgggagacacatgcgcactgcatgtcagggcgtgaaagatcatttggtgtgctgcacgtattcaatcctctttcctagaagggaagaactacatgaagtgtgctttactctcagtaagtctttcacccattgatcttttcaagcaaagtctaagcttgaaattttatacaacttcagacttccttcccaaaagctgaagcttgcttcataaaatctcaacgtcactcttccatgcacgttgttctttgtggaagaaagatcattgggggaatgatacgtcttcagccctccttctcttaatataaggacttcttgaagtctattcttctccccgtgatgctttctctttgatcctttcaagcaaagtttaagctagaatttttatgcaacttcagtcttccttccagaaagccgaagcttgtttcataaaaattcaacgtgactctcgcatgcacgctgtttttcgtgcaagaaagatcactaggagtacaatacgtcttcaatcccccttcaaggaattgaagggctacttgaactctgtcctacttcctgtaattatttctctttgatcttttcaagcaatgtctaagcttgaatttttatgcaagttcaatcttccttcctagaagctgaagcttgcttcttaaaaattaaacatgactctcgcatgcacgtggtttttcatgcaagaaataacactgggctacaatacgtcttcaaccctctttcccagaatggaaggactgcttgaagtctgtcctactcctcatgatgcttttctttgatcttttcaagggaagtctaagctttaatttttatgcaaattcagccttcctttccagaagccaaagtttactttataaaaattcaatgtgactatcgcatgcatgttgttttttgtgcaagaaagatcactaggggtatgatatgtcttcaaccctccttcccagaatggaaggactgcttgaagtctatcctactccccgtgattctttctctttgatcttttcaagtgaagtctaaccttgaatttttatacaactttagccttccttcctggaaggcatagcttgcttcataaaaaattcaatgtgactctcacatggacgttgtttatcgtgcaagaaagatcactgggggtacgacgtgtcttcaaccctccttcccgaaatggaaggattgcttgaagtcttttctactcccaagacgctttctctttgaccttttcaagcaaagtccaagctcgaatttttatgcaacttgaaccttctgtcccgaaagccaaatcttgcttcataaaaattcaatgtgactctcgcatgcatgttgttttttttgcatgaaagatcactgggagtacgatacatcttcaaccctccttctcggaatagaaggactagttgaagactatcctactccccgtgatgctttctctttaatctttgtaagtgaagtataagcttgatttttatgcaacattcttcatgaaaattcaaggtgactctcgcatggacattgttttttgtgcaagaaagatcatttaaggtacgatacatctttaaccctctttctcgtaattgaaggactgcttaaagtctatcctactccctgtgatgctttctctttgatattttctagggaagtgtaagcttgaatttttctacaacttcagcgttccttcttaaaagccaaagcttacttcataaaaa

SEQ ID NO: 30402 - DNA, 2411 bp, Cannabis sativa
gtttattttatgaagatagtgctggtgaagctcaagagtatactttaccttcaatgtgggataaggtagctatgtcttcaaaatttagtcaaagggctcaaatgatagaagagttcaatatgtgtaatagatggaagaaacgaggaatatctagagtaccagttatggtcgagatgacggtcaaagcaactccagctaaagtaagcatattatcagatggatctgttgctgttgaagtagggggaattgagctgggccaggggctttggacaaaggtgaaacagatggctgcttttgctctcggttcaatcattgctgatggaactgaacacttcttggataatgtgcgagtcatacaggctgatacattgagcctgattcaagggggattaacagcaaaaagcactacatccgagtcaagctgtgcggcagtcagaatgtgctgtgatgtcttgattgacagattaactcctgttaaagagaagctgcaggaatcgcttggctctgattctatcaaatgggagatgctgattgctcaggtatctagttagatttcattgtttctttccatattgataattggaaacacaagtctttttcttgacttgtgaacttactaatcatggtactacttttttttttttttaagtggattaggtgtagctttctaatggttctgccattctatttaaagtgtttgtgttattctcaaatttaatcataatagttttatgtccttggtctttgaacaatgcagggttactcagaatctataaacttatcatcaatttcctactatgtccctgatatgtcctccttaaaatacttgaactttggcacggcagtaagtgaggtaagtctcttgcaaaaacattcatatttcgttgaagaattgcttacataaaataatttctcaactaaacctataactggtctgaactattaaacatcaaacatttcatttatcttactaaaaatctgattatcagcatgatagttcagtctttagctaatgaaaaatatttagtctgtgactgttttactgaatacatctcatgacaggttgagataaatcttctgactggagaaacctccattctgcaatcggatattatctatgattgtggacaaagtctcaaccctgcagtagatcttggacaggtaaccctgattccatgtgctatcttacgaagtttctgatctattgttcattccatagatttatattggtattttcagtattataggctgaaaaggtttcatttatactatgaatgaaagaagcaaaatagttcattccaattgtacggggtgagataatgttacactggcatttttggctgtaaatctgattatctatataatcttttgtttcttattaaaaagaaaaacaaagagggaaaatgttaattctgaaggggaaaaagaaaaaggtgtttcttaagcctaaattggaacctagatttttgtagggaaaggaatagctaaggaaaaagtgaggaaagaaagggtgtagaaaaggatatatggagtgggaaaaaaatgatttccatgaaaaaattctcatattttggttctttgacaaaagtaaaggtgtggtctcatggtggaagagaactctatatctgacccaagtttttctcagtttacctctaagttgtacattttaaaagtaattggtattggttaccaaatagtatatcaagttgtcttatttagtattagattatttgcggctaaactagccaaactttatgttaatattttcattacaactacatccactaagaagaattatcgaacactttctgtttaagcctatcaataatgactttacagtcatttcaatatgtgagatagacaaaagaaaacgcagagctccactgaagtgcaatctgcaaggctttagcttcgagattatggagttaaattttccatgtccagaatagccaagccacctagcaccactccttaagaatctctcacaacagaaaaccatgtcttgcctttatcagctgaagtagcagcatcaagattcatttttgagacagccctaaggtggtgtattccaagcaatgcccaaacgatcaaccttaatagcaccctaaattatctaaaatttctaaaaaaaaaatgtgtaaggtcataacttgtctctgtgtatgaactagagcacccagtttgtactaattcagcactgtaaccgttctctaaaaaatatgtacttatttattatgggcctatatataactcccaaatctgtgatgacttttcaagaaaaacattacttggctgttgacaatatatttgtgcagattgaaggagcttttgtacaaggagttgggtttttcttgtacgaagaatacttaacaaattctgatggactagtcactgctaatgggacatggaca

SEQ ID NO: 30403 - DNA, 1788 bp, Cannabis sativa
cttttttttataatatttttacagcattttataaaaataataagaaatttacataaaaatagtagaaaaataacatccaaataacaacaaaaaaattacatacaaatagtaaaaattaacaataaattaataagggtacaatataaaatatatccaaagaccatattttctataaataaaatcataaaattgtaaaaatatttaaaatttggtacaagtatttttgtaattttttttattatttttgtgtatgtgtgaaataatcccaataaagtttgtattggtttgagtgagcccaatatgagaagcccaggcccagttatagcagcccaacttgtctctctctttctctctctatcactaactcatctcatcaccggtaccatagaaattttatcaaactcgttcactgactggtcggagatcggagatcggagaggacgagttccgtttcattggccgccggataaacaactacttctacttcactcacaacaggtactgtacttacgcttttgaaaattaattacagagaaagagacgatggaaactttgtctggttgtttgagttttctcaaatgattctctctatctgtttcgtggtatggatttgttctacattgccattccacagggatatgattaagctattatccatttctcttttctttgttttttttttcaataagagtgaggtttgtcattattagtttataatgtttagtagttttaatttgaaacgttactacatgttctggtatcttcatagtcctttacacttgaactatgtgtatacaatccttataccaggaaccctctcatacaatcctctacgagattttgttctaatttggatgtttcagaagagattttgctctcaatctttttccgtttgaaacgtaataaggggtcagggctaaagaaattttcataattttggttcaataaaaataattctgtttaagtttgggataattctatatctagttttgggtggaaagtgatcttaagccaaaacagaagcttaacaaaaggaaaaaaactaaagctagaaagaaacagtagaagttagttccagtaacaagttacctgtgcctcattcatcctcaacctcaagcttcttctagttctagccaaattatgtgccatctcattgtttgttctcacacagtgtgacacaataattttgtccagctcttttattactctttgacagttttacacaattaaccccatataagaactaggaagagctgtttctagttaatcgccttaatatctaggagacaatctgaaaaggcctccactttttgaagattcagcattgaacacagtggtaatccttttttagagaagttgtggacacttgtggtttattcatttccatctcttcagcattgctgttagtatttgacatgtttctgttaaaactaacagaattttaaaagatattctgttaagccacaagaaattctgctatataggcatttattatatagataagagatatattattagtatggttttgtttttcataattagattttataatcttttgtttgtatgagtacactggaatcttgatattgattttttacacacttttcagatttatcatcagttttggagtgtatctctttggttgataaatttgattttttcacaacctactctgctcaaaaaattgcataaaactgcccaatccgccctaaaaaatggcagcagtgaagctcatgtcctcttccctgtaagtaattttcagacatgtttgcctattaatagtttcaa

SEQ ID NO: 30404 - DNA, 1885 bp, Cannabis sativa
aacattgggtacttatgccactaaaaaaaattattaggtttatgctacttacaaacctaaaactttgagtacttatgccactatttacccaattctttaataagatatctttcaacaggttaccaaacattctttcaacacaacttttttaaaaaataacttttaactttttcaaaaattgtgccaaacaaacccttaatgtatctcacaaaagttaaacattagtttaaaagtgaacatctttttttgtatatataaaaaaaggtttataaatattgcaaccaatttttcacattggcaaaaaattgaataaaattagacaaaaatccttaaatccgacaatttaaaaaatccacaacaaaaattctagtttgctttataattataatttgtacagtcttgcctattagttaggcctctagtagttgaactcttcatgaatcataataggatgtcttattatttacaatacaatacaataaacaatattaataatatacatatagccagtagagtgatgaagtactagaataatagagttattattaaaaggaaaatattaatattcattaatttttgtacagtaacaacggtaatattatggtattgaattgatgagtgtgtggcaatagtgtatcacgtgattttgtatattatataatatggaaaatatatattgtatgtatggaaaatgagatgttaacgttaggcatggctggcatggcagtggcaattacaattcttttttttttttttttgaaatataattacaatatattctttttaattatatattaaccatacaattaacacaaaattaaaaataactcaaaatctatacctatgccgccggccatccttaattacttattttgtaatttaattactatgtcctaacactaacaaaacaaagttatattccattttgttttctttaaatatttatcattcaaattgtaagaaaaacataatgtatattatttggcttaatttcccatcatcattaatttcaaaacctaatgatgatttgattttgaagatagaacataataaattgctctaattgtggttatttggatttggatttggagcactttcaccaaatctcaccaccctttctttctaatctacctaccaaataattaaaacacaccattaattaatttattattaaaattgaaacatcaccaattacatatttaacctttttttctttcttatatctactaataaaataaaacccctcagagtaaaagcacattaaaataatacaaaatctctatggccaacaataaatacacaattctatttatattatttatatttatgttcaaataaaatataccaaaatagcactttccataaattacaaatctctgaaccatagtttctctctcttttttcgagtgataaaaaaattcaacaacaataaaggctggaaaatatttacttaaattgaagaagaataataaaaaaaaaacgtttatatatacaattttacaaccaaacccaagtagagtacacagcaacagatataaaaacagggacattttggtaatttgacaggcttttcattttcttttttattgtttaaaagcagcgcgcgaaaaattggacatctcccgcgttatattaacattcccacgctctctattttatttggctttcccacactcatttcactcccgctctaactttctctctctaaaacctctctctctttctctctctatacccatgcaccaatatcgcagccgccagccccattttccggcagccggagaatccgtcgccgcctacacaccgtccttgagcgagcagaagcgtggaaagaagcgagggagttacagctgtggccgttgtggtcttccaaagaaaggtcaca

SEQ ID NO: 30405 - DNA, 1061 bp, Cannabis sativa
agatttgaatgaccacttattgcaattagctaagatcctaactgatcatctaatagttttttattatcaaataaatgtaagttacttcagtaacaacacattccaaccaataaatgaataaagtgtttaattatcattcaaattgtgtcaattttatatatgatttcttgcaaaattctagtaatttatttttaaagtcacaaaactatataacatgtgtacaaacaggttcgtccaagtataaagtctgaacatgtaaatataaaatactctggctatttgtaagtgaccaagagtctaaagcttgttcggtcactcaggggacacctgcacccatacaacattggtatgttagcatggaaatacttaagcaaaattttgaattttaaatttgaaaaagctaagtatatatgctctgattaagacacaaaaagtctagattaaagttcaggattaaaggttgcctagtcagccatgtatctaaacaaaagaaaaataaaactaaatttaaaagcttcttagtcggtcatgatgtcttaaaataaaggcccaaaggccgaacagaaatacataaggataaaaaaggctttttatcaagaatatagattaatccattagagtgatcgggctcaggccttcgatggtcgcaaaaccacagcagattgatcgacatgctttgtcttttcagcagccttggcttcttctttagatttcatctggtggcatcttccgaacaacatatcaggagcctccggcttcatataatcatagttaccttaaggattagccttccaaaactcgtaagagatctttatgttaatctctgaataagctgtaaaatgttcagcacgagcctcgatctttttgtttaaggcttctttcttggcatctatgtcatttttctccatggccacatcgatagttaaatatttcacttgctgatctaagttttgaagaagtttttgaagagtgtgcctttctccgagcagtccattagcttgcttaaactctgcttccagatcagcttccatcttgtcaactcaaggcatatcagttatctg

SEQ ID NO: 30406 - DNA, 1441 bp, Cannabis sativa
tgagctctcatttgacaaaagctctgatcaattggcgacattgataggtgcagagcattggctgccatcgtagaccaggaaccaaaaccactagcgttcgaatgacaaaaacagcaaaccccaccaccattgaccacaaacaaagttcaaacaactagatccacaaagaccatgggtgtttagaggcaaagaagccgtcgataaaataaaatttctactttctctatataaaataaaatgggatatttcaagaaaaaaaaaacacacacacacacaaaaataaccccaaaaaagttactaaaatacggatgtacggaatttacagaaaatacagtcatttgatgtatttttatattgtatttttgttaatttattgatttttagttatttgtatattattttttgttgttatttgtatgatattttcatattacttttgtgtaatttttttgttatttttatagaacaaaattaaaaaaaaaaaaaaccttaaaatgtaaaaatataaaaattttacaaaaataataatattttacataattatcccaaataaaattttgtgccatgtaaagtatgtttgcatgttagagacatgcttccttgtttctctaattttatttaacatcctttcatgatttacaacttattcataaaaaaaatatcacgacattattttatgcattttgaatagatttagagttaatattgttttattttttgcaattttttaaatttgtaaaaaatcgattgtgttcaatacctagctcaatgaaatgaagatacaaaatatacttttctcaatagttctaaataaatgttcaatgagaacttgatcaatgatcggtatcatttttattagggtaaatatcattttaaatcttgtattttacaaaaattataaattgaaccctctattttgttaaataataaaatggaccctgtatttttcaaaatggtacaaataggatctttaactgatttttttgtagaaataaaatttaataataatctgacctagaggtgttatatgacaaaactagttaaatttcctccttctgttcgtgttaggaattgtcttcaagttgattatatttaaaaaaaaatgtcaaaaattaaaatcatggtcttatttgtaacattttaaaaaatatagggtctattttgtcatttaacaaaattatggatccaatctgtaacttttgcaaaacacatagtctaaaataaaattgaccctttttactatagacataattttatattttatagggattagagattattttataaatactggaaaataataaaaagtttatatatattttacattttatggattttaattttttatttaaaaaaatacagagtaagtgcatatttggcatcataactaaaaaataattttttgtttttaaaaacagaaaattattttttgaaaataatt

SEQ ID NO: 30407 - DNA, 1470 bp, Cannabis sativa
attatgtcaattaaaaaaataaaaaaacttatcattgtattttaaaaaaatatatcaaaaaaataaactaaatatatgttgagggcatgacagataacctggggattgatcttgatcatgtcctcatgtgaccaagtaaaaatgtcttgatttctctcgaggcaagccatgagcatctcattcaagacctccgtcaaatttgttccaatctggataaccttggtcgggtgtgttttgttgagggaaagttctttgagttcctcaattagaccaactcccgagtcgatttccctaaaatgggattcaatgtcatcctcatcttgggcacaccttcaagtggctttaagtttcatctctgtcttctctgtagtttgaactctagaggtctttgttgtctctccagcttttgtaggagaggtcttgcttgtcccccctaatgccatagcaataagggaggccttgctcgtctcctctaaagtcatagcaatagaggaggtcttcttggcgagtgataatgaagcgttatgacactcgagagcaattccttgattgcgaaggagacaactgatactaggcgtcgttaggaacttgacgggcaaatggtacactaacgagatggctcaaagattgtagagggctggcctttcgagtatcacgttgtatggatactttacatacaccactatgaacatggccatgatggttgtctgcttcgggcaatgctaacagtgagtggcaatttattcttgccacatggagcaatactaactccactaaaaccatacataagctatttgcatggttctatgtcttttaaggtcaaacctattctaactagggcttgcttgaatatgatgttaaaggatgcttcgtcatcgatcatcactctagccaccatcatattagctatttacacctcaacaattaaaggatcgttgtgagggtagctgacatgataagagttaaattctccgaaggtgataggttcatgtctgtagcgttgagactttggaggacgttctgcaacctctaagactttggctcttggttcatgttgaagtaatcttgcatacctttctaaggccttgaatttccagctaggtgaggacatccaattacgatctcaagcctgcctgcaactggtgcatgctggagaggtgtattgcccccagctagagcttcaggtcgtacatactgctaaaaagtaacatgtttttgtctgatgggaaatttatctcatcccgcaactgattacacccattagtattgtgaccgtatttgttgtggtagcgacagaatttgttcatgaccctcttctctaactctttgaagggaagaggtttgtggtacagaactgatgactatgtagccttatagatctcctctcttggggccaagagggtggagtaggtggtgaagcgaggatcatactctcgtaaggttctgccccagtcttgggcttttttccgt

SEQ ID NO: 30408 - DNA, 3751 bp, Cannabis sativa
tagtcacaagtaatattttgttgtgactaaaaatcacatttaatcactaaaaatagcagttttttgtagtgtacataaaactatatgaaactgatactaattaattgaatcaataggtatattgaaacataggaaagatattaaatattaaacaattaggtgctttttatcatttctcttaactttaaaagtatatataataaatatatataaataaaaaaaggtgttaaaagatataaatatatatagctgttaaaaaaagttatatatatatataaatatacatataataaaaattatgatacatctatgaaaatcatgagccctttcttattaatgcatacatcttagttatgtttttttttcttgagtaattattatagattgagttggaactaaaacgaaattaattaaaaaaggataacaacaaacaaactcaaatccaaataccttattgttatttttcactttaaagacggcagagaacggagaatattacctccttgaaaaaataaaataaaaatcaactggatatttcccatgagaatatccccaatcaattaaaagtagctgagttcttgtagttgacaaacaattaaaagctaagaactttataagcatgcatgcatgcatatagataaattattattttttagaattccaatccagaaccatgcaacttcttctcaactagcgagtccagtctttcagccatctctggtgtcatataattaatccaatcaccaacctcgcctcgtcggaaaaatgtcttattctcctcgccggacgataatcttccactcttattgaccaccaaattactcaaattatcaaaactacaaagctccaagattcgtgccacgtcaccattggcctcttcttcaagagagaagggaaaccctaagaactcagccaattttttcacatgcaaaaatggttctttctttatcttatcatagttcagaaaaagtaccttctcgggacactccaagcttacttcccagtaacccaaagagtggtcccaaaagggtccgtacaagctaactccgttacagaacttctcgaacgactcttccattgtgttcttggccaagttctgtggcctcaaccggttggtaaaatgccagagagagatgaaaacgtccttgggattcctacagagataaacaagtttgcatggggaggttttgatggaatcggggagagacacataaggaagatgagtagaaaatagactaggattactatcgttattattggaaggaatagaagaagaaattaggtcagggattacaagcttactcttacttgggaggaatagattgagttctaagaagggtacaagaacatgagggtttgttgttagtaaagggtggttttgtttggtgtccgggaaagttgagcggttaacaagagagaaaataatggccttgagccatgtggtgcctgattttggtgtgctcacaaggatgatatctttgtcattaagtgatgatgacttgaaatatttttggcaggagagaactccttgaatctgcctggttgtgtgccaaaacccttggtattggtggagataagaagctacccaacctttttctcttggtaaagaaacaaccaagtctttgaattcttcaacgatctcattttcttggagatactccgggatgagatgatcggtagataattgatcattgttttcttttgacatggtagaaatgaatatgaccttcccttttgtttattcatgttatagtccatgggatcttatttatatacaataatcgtaccagtaggatataacaccagtaattaacgtatagcccataaaacattgttcaaaaaaaaaaaaaaaaaaattataacccataaaagcattacagataaatcaataaaaagaacacaaaaagatttgtactttttcatgacccgctccagtatagtagttcattagccggttcaaaaatataattttacaataatattggtgttataaattaattatgctgacttagatattttaatttaataattaatagtgattaaatttgctatctattagtaaatcttcacttcgtggtggtatcgattaagcactattggtgtcttgtatttatagataaaattattaacaaaatacaaaacaatctattgaatattcatgatatatctctattctctattataaaatttttcaacaacacaattcaaatatttgaatgtgattgtgagagagagaaaacaaaaataaagctgcataatattaatgatcgtacgtgatcattgataaacaccatcttgttgggtttggaccacatacattatcagctcgattttagtatatttacaggcacctttacagtaaggcaaaatagttaattaataatgatgttttaatggaaataaagacagtacgagagggcatgttacaataaaaatttgattaaagtgtatacaaaggtactaaatcgtatataatatcattacattttattttatttttcttttatttattaatttatttttgaataaaatcaaacttcattaacgactaaattaaccattacaatatttttgagagaaataattaatgacattacgagaagaaatgtcatttttgtcaccatatttttgtgatggcaaaaatttggtattacgcggtaaaataaaatttactactggtgtattagcaaattaacgttggtattagaactattgccaacacaaaatgaaaagcgctgtcaaaaatgacttttcccagcgagtaaatgcgctggtttcctagcgagtaaatgtgcgggtaaaagttaaattttagccactgcaaatgtgcgctgataaaactttgacctttttgccagcgcagtttgcgaaatgcgctggtaaaagttactataatcagcgcagtagcgaactgtgctggtaaaactgacattttttgtatttagcaaatcgcttaacagaagataaatgaacaactactacaaaaataggcttttatctcaatttgtaggggcattttttcccaatttgctaaattgaaaaccaaaatatatgaagaataaaagctaaaataaaaagccgaataaaaaaatccattaaatcttgattattatagaaaaattagaataaaaaagttctttttatcacggtttttaattaaaaactgggatcgaaagttccattttatctaaattttttcataaaaatcgaaattaatactaaaaaaaaattatagcatttcatcattgttcatcgatttaaccaagacaatagtgtcctttattataaaaaaatttctataatttgatcaaaagataaaaatatgttcatagaaaaaataaaacttgagatcagatctcaaattacaatatcaccattaattaatgaaattatattgaaaccccaaaaacaatacaaataagacaaaccataaatatcaacattacaattgcaatataaatggaacaaataaagttaaaaactgttataatgtcaactcaaaatatttttcattcttaaaagtttcttcaaccatgaaccatgaagcaccgtcgatggagacgaagatgtaggagagacatatagcatgggagagagagctttggggctttttcagaagggttttcgctgacagtgatggacgaagatagaagttgcgaggaagaagagggcccttcatgcgtggctgagatggcggcgtggaatctggtagcacagaaagaatttggacaaacagagagagagagagaga

SEQ ID NO: 30409 - DNA, 1249 bp, Cannabis sativa
gagagaagatggagcataacaaagggaatgatctaattcttggagctatgcaaggagatcagactcaccctaattctaaaaggagcatgcaagactatgtactctctactttgacggaggtacaaaattgtataacaccaccagcagtggaagctaacaactttgagatcaagataactatcttacaaatggtgcagtccactctccaatttagtggattgccttctgaagatcctcacactcacttggctaattttttggagctttgtggtacttttaaatacaatggattgagtgataatgctatcaaactgaggctttttccattctccctaaaggaaagagcaaaaaagctggttgaattctctacaatcaaactcaatagtcacttggcaagatcaggctcaaaagtttttatctattttcttccctccttcaaaagttgctcactgaggggagaaataaataacttttgttagaatgatggtgaatatttatatgaagcttgggagcaatttaaagatctattgagaagatgtcctcaccatggtatggagaagtggatggtggttcaaaacttttatactggtttatgtcctactactaggaccattactgatgttgcatctggaggaacattcatgagaaaaagtgatgcaactggagcttatgaatttcttgaagatatggctatgaacaaccgtcaatggtctgatgaaagagccactaggaagaaaaaagcttgtattcatgaattgatgccattactgctttgacagctcaagttgccactctcaataaacagttacaaaagacaactgaagttgtccaagttgtttaagcctcaattgggtgtgagatttttggaggaccacacacttttgaccagagtgaatcaactgaagatgttgtggtgactccttctcaagtgcaagccatagccaattttcagaggaaattcaataaaactttcttcaactcatttaataatggatgggaaaataatcaaaggcagtaacctcaattttaaagccaagcttctacttctcagtagtaaaatcctcaaactccacctgctcaaacaaatgatctgcaagtttttgttcttactctcaccaatttacaaactcagttcatgactgatacaagagcatccattagaaatcttgaaacacaactagggcaactggctaatatgcttcataacagacctcaaggaaatttgccaagtaacacaaaggtaaatcct

SEQ ID NO: 30410 - DNA, 3377 bp, Cannabis sativa
  modified_base (2060)..(2071): a, c, t, g, unknown or other
aaaaaaagttaaaaaaaatagtaaatgaagtaatttctcttatttttatttttaaaataataataatagctaaaactatttttgctagttaaaaaaagtgaaaattttccaataaaaaaataaataataactaaggttctttttgggttttcaaagtggaaggccgagatatttatagagttggttttttttttttaattttatattttacctgtaaaatgattacaataataaattttaagataagataaagaaaaaagaaaagaaaagaaaagaaaaggtgtcacatttaaaacgtttttagtatttttgaattttggattaacctatttatttggcatagctacaagtcaaaggaaaacaaatgaatataatgtatggcctttttttctgaatacacaaatgaatagcctagacgtaattatggagcttttatcacttttataataaaataaaaatatatttataataaaattttaaaaaattattaaacaatacttattatatttatattttggtatgatagatgaattatttatttattatttttttttttataaaattacactaaacataacattaattcaatattcaaaaatttattatggcattaaagctttgtagctactaattactcacacatggaataaagtataaacacaaatatatatttttttttgataaaaatatgttattttattttttattttttttagactacaattattgaactttaagtattaaaaaattggtattaatatttatttaaggctatttgctgtgaaaatcgttaacgacaataataactaagggccccaagattgtgttacatgggctttggacttgtgatctcttaatcttaagcacgatcaaagaaattgctgaattttttgggaatttttacactagaaattttttttgcagatttttttttctaagaaaagatactataaaaaaaaaacaatattgtgtaagttttatactgtatattatgttaagttttcactgttattccacggttgttttttagttgttctactgttgtttttaattgttctgttttgttgttttaggttattttataaaaagacagtatttttgtaaaaaaattatttgtggcaataaaattgtaaatttatcaaaaatctagtatttttgtaaatttggctattccacttcatccaaatttttattagttcctgcttttagttatggatgaactgaaatctattttgttagagaagtattttgtcagtttgtggagaatttgatttagaaggaatacctttatgaatcaagagtttggcttgcctaatagacttgttgttgttaagtggagtatgtgtatggagtatctggacagatttcataatgctaatgctaagacatgtttggtggatcatagatgcagcaggataatgttaaactcaattgtgatgcttgtattaatatggatgagagtataactagtttgggtgctttagctttggcctttgtgttagacttggttataactgagtcaatgttgagtgtgtgtgattgcttgaatgttgtaaatgtgattaataagcatatttttttagggttaattgcggtaaaattcctaatatttttattttactagcaattaacttttaaaattcaaattttagcggtaaagttccaaaaatcataatacagttagcaatttacaattcccatccaaatttagctgttaagtgctaggttggactatccatgtgtacatattgtacacgtggcatagtttcactggcccacgcaaataaattattattttttttaaaaaaattaaaataaattaatttaacataaaaattaaataattttaataattttttttttgtttttctttttctcagtgacttttattcttcaggtgtcttttctttctctctctctctaatatgtagaagcaaccaccatcgacaaaaaaaaatgccacctagaaagaagccattattgttccttcgccttgaccaccgacctagaccaccgcctgttctctctcttgctcactttctcctctctctctctctctnnnnnnnnnnnnctctctctctctctcgtgtttggctcgatcctcttaacctaactgcgatgggctacctccagtaccattggctcaactggaggccgtggatgacctcgccagttacgaaactcgctaaacctatcacaccctcatttttctctctctaaattgcatcacacacccttttttttttctctctctctctctctctcccattctggatttctcctttgtcgttactcctattcttctcagtgggaagcgtcgacaggatagtgggcagcgccgatgaacgggatcaatggctccaatgttgatagatgtaggttcgttttggatctgagattttttttttcaatctgggtttgttactttgtttcttccatggatttgtgatgcaggtatttgtttgtttgtgtttatgagatatgagtttgtttaaatttttttttaggtattttcagatctgagtttggagctttatatgtatatatgtgtgttggtttgttagattgagttttgtgaaagttttatttgtgtgatttgggtttgaaaaataagttatagtgatggtgttggtgagtagtggtggttttggtacctatattgatggtggtcagtggtggtggtgattcggtttgtggatggtgatggtggtggtgatgttatgaattatgaaaatgattaagaaaaataaaaactcaagaaaaaaagaaatgtttgagacaaaaaaaaatataattgggaattatgttttttttttctaatttttatttgttttaaaatgatttattttaaatttaaatttatttattttatttttaataattatttacgtggaccaataaaattgtgtcacgtgtattgcgtatacatgtggaagatacacgtagactgccattctgacacttaacaactaaaattggatggaagttgtaaattgctaacaatattgtggttttgggggttttactgccaaaatttgagttttagaggttaataactaatgaaatgaaagtattgggggttttgcccaattaaccctactttttatcattcttatcttgggtgcatagtgagggatattgttgcttattgtatattttttttcattttcttattgtcattggactgctaatagtgtgactcactttttaacaaaactaacttttatcttcgaatgatcagtatgtatggtgaccgggctactctaattttactgttgcctctttgcagtcggattttattgattaatatattgttcgacacttttttccctcttgagattttgctcattggatttactcaagaggtttcgatgagg

SEQ ID NO: 30411 - DNA, 2232 bp, Cannabis sativa
aatgaaaaataattccaagtttaatactgcttggtcagtcactttgtcttcaaaaaggccttatggctgaacagatatataaaaaaagagatagaaaaataaagtattcaaacggttggagtcctaggctctttgtacgggtcttctgggtcagttggagctggtggatcgtttctttgagcgtggagcacttcaacattttggtcaactggagaggtggaagtggtcgcctcggagtccccaaaagtgagtactcgagaaacatgtctctggaatcgcccaagtaatcaaagtttgcttggggattggccttccaaaagtcatagaaaatcttgagaccagctgtctctaaggcattcactttccctccgagcctctccacttcagatctctactgcccagcctctgacttatacttctcaacctcagctttaagctcctcctctatggtcttcttctcttcttccaacattcggaaaacagctcggagaacctccctttcttcctgaaggatggtcacttccttggataaagaggaaatggcggcttcaagctgatcggtggcttgaagatctttaattattttggccaccttcttctcagtagcaagaagcttcttattgacctctgccagctccatccgaaaagacccaagttaaaccctggcttcatcggcatccttcctggccaagtccacttctgcctgcatagtgttggaaatggcagcattcttagaggtagccgacttagctcgggaataagcataagtcatctttatactggtctatacaaagatagaatattaaaatccgaactaagagaaggacaaaaggaaattgtcaggaaagacatacacttgtaaactccttcaaaactcctcccatcaccagctccaaagaaaggtcattgtctgccccagcaagctgctcgttcacctaagggactgaccgagtcacatagtgactgagcctttctatgtctcttttggtctatgggtgcagtatcggacgttgggcaggggccttgatcagctcgaatccgtccttcgactgctctggcctgtttgagctacctccacgagaatcctttgacttagtcatttttgggacaggagggtctgcaatgatttgctcctcggagaggtcaatgaccacttcaggttggtgccttctctttcgatggggttgtctcaccgctcttggacttcttagccagagcttcctcccactctcttcttcatagcctcaagcattttctgagatatgtctgcatgaaatgaaagtaacatggttagaaaaaagcatgagaaatataaaggcatgataatcaaaaaggttaaaaacaagatggagtaccctgcactttggcaggggcatctgctcgaacaagtactgaaggaacattgtcatccgacgagtctactttctcctccaggatggctttccactttccttctataggggtggatggccgagcagatagaccgggctccctgatctggatcgaatgtttgatgggcctgtgcccggtcggaagtttcgtcttccttttgagcggtctttcttgctcctcctcaacctcatcctcctgctcagaatactcttgagcatgttgttcgggcccgactcctcccttcaacttagcctcgcggttaagttgaataagctccttctccttctcagaatgctcctgagcatactgcttggctcctacaccttccttcaacttagcctcacgcttcagttgaatgagctccttctcctgctcaactccctcagtccgactagcactagacttcctctttttccccttcacaggctgaggtacaaaatctgttggatgaagcacgtattccacaaagttggcctctgaggtcaacagagtaatattctgagcgtcatccgacagctgaacaatcctttgagctttatccctaagagccaacgtgaagggtggacggtaatatgtagggatcgactgaaactgagtgtaggtggtgcccatgccttctaccatgtaatagtcatcaaaaaaattcccaatttggctcacaaccttatccatggtgtccgtcaaccacttgaagtctggctaagagaagtagaagtaccatgacttgccttgcttggggtagacttcaggtgcaagaaccaactgacctcgtgtagagatggcacgacccacatctcgatggcgtagaggacaaacagggtagacaaatacttaatgccc

SEQ ID NO: 30412 - DNA, 1492 bp, Cannabis sativa
ttagtgtataatttaacattacttatttatatatgaaaaatactaaaaagtattagtggtcacttaccactgcaaggtgtaagcttcacatattaattcaatattataaaaaatcactaactatttataaaatactaccaaaataatattgtagtattaaagcactagttactaattggcaatgctattgtacatgttaccatgtagttcaaaatgccttgctagctctttttctttttctagtttctttttatatgcatgcttccacaacagaagaaccctttttaggggttgttcttgggactcaaaaattaaaaataaaagctaactgttgcgtcagactatgaactaatttatgcccatatatatataattttctttctcaaaaattgaaaagaaaaaaaaaacaaaaaagggaaaagaatactcaaataatgtcacatataattgtaatgataagtacttttgaataaagctaaaggaaaaaaaccccatttgggttctctcataatcaatcctttcataagagaatcaagtaatatagtgctctctctctctctatatcactttcattctttctctttttctctatccatccaaaatgcatatttaaaccatctccctcaaaccccatttcacctatcacaattctctcatgctatggctactaccaatttagaaactagtactactactactaccactactactagtagtactaacatcttcttcttctcatactatttcaagtcttttttacaaacaccacacagactaagaaagagaatgctagctacttggactccagaccaagagctaaaccaagtgcgccaaagatcaggagctgacatgaaaagaaagctcaaatggtatgatctaatggctcttggtgtaggcggaatgctcggggttggagtcttcgtcaccaccggccaagtcaccaagaactattctggccccgccgtcttcatttcttacatcattgccggcgtagcggctcttctttcttccttgtgttactccgaattctctgtccaaatccctgttgctggtggtgccttcagttatttaagactcacctttggtaagattgattcgctctttattattctgttcagacaattttttataataattattaaattaaaatatatgatataggagaatatatggggtattttgccggggcgaatatactgatggagtatgtattatcaaacgctgctgttgcaagaagtttcactgagtatttgtgtattacatttggagaaaagccagatagttggagaattggtgtagaggaatttatgaagggctatgataagttggatttcacggctgttgctattgttctcattctcactctctgcctatgccacaggttaatttgttaattaatttcttaattttcatttttgttttgatatatattaatactctatatatgttcgatcattttcttaattgattattattaattagtatatatata

SEQ ID NO: 30413 - DNA, 1143 bp, Cannabis sativa
ttaactggtgtacttgtactatagatttttctattttataataaatgctaaaatgtgttgaagctattatattattgtaattggtataattaagtattaaatttttcataatttagtataataatttttagttgtgccatatttggcacatgctataaattagttcaaaattcgatataagatatagtattatattaaatttaattaacaataaatattatttttttttaattatacttttgttattaattgctaatgatatactttaacacatatattttaattataatattttcattgataatttttttaaatatttaatttatttacatttattaatgatactttattttataaaccaaattgtattgaaaatattattgtatattggagcacaattgaaatgttatgagagctcataaatataacatttgtttattaatgagtattttttgcaacaattttttttttataatagtatttattatagctacaattttatcctagaaattttttaacaaattttgaataatttacactaccaaaaatatagttctttattttagtttatcacacgtgtttaaaaaacttcaaacatatttttggtactgtaaattatttaaattttttttaaaatttacaagaataatggtaactataacaaatacgtacactctcataaaaaaaatattctaacatatgtttttaggtacagagaaactgtaatagcagattgacagtaacattcttcttatttattttttgcactaaatttagcacatcttattatattaaaaatggtcttctcgtgctcactattattaagcaccaatagtaactaacattacctaaaagtaacatattactattaattagtaatattttataaaaattattacataaacacagcacatttgtaataattaataaaaatggatattgacggctaaactacctgaactttacggtttgtaataattaaccacaaaaactgaatttttggcgactaaactacctaaaccctagttccgttttgctctacacacttccatccaaaaattacagataagtgtcacggtagactgtccacgtgtacacacttatacacgtggcaaatttttagtggtccacgtaatattattt

SEQ ID NO: 30414 - DNA, 1587 bp, Cannabis sativa
gaaaatttgaaagatacatttatcattatttttattagttttgacttaatatttattcaagccctcactcaactaaatttctagcttcgtcactggttagtgactagtaataacaagttttttacggcgaaaagaattgttaataatgcaattacgtatcttacacaatagttgagtgctcaagctacgaggttgaatatgtatcttatgagcggtgaatgaattagaatatatgtgttcttaaggttaattgtgatgttgcaattttttttatctaaatttattttttagtttttgtgtcaaattaacaatcagagaattaggcaactgattattttgttcgttttttaaattaaaattctagtcgtatctccaacaaagagatttcacgattagattgcaggatattatttaagtcgattgccattaataaatttctatgatttattaaaaaaattacatctatttaattatatgagaaatatggatttatctagattataaatagtttttaattgagtttaatttattttgttataaattattcattcatcataaatattgaaataaaaaaaattaacaaattaacatatgaaaaataaatcattttgtaattttttaataataatcatttcttaaatataagtttggtgtttaccctaattgatcctattcatttcttaaatatttatttaattcactataatgttttttaattattttatctaataattgaatccacaaattttctgtattattttaaggtataattgacctctcaaaaacaccttttagcaagacttcactattcattgtggactttccttttacatataaacatcattaataataatcattatgagcaagatttaataaataaaaaattaaacaaagcaattagcaacccactacattttcagatttgagtaaacaaatagctagtggaactggcctaaacaaaattataaaataattaacatatatacattttttttggtactttgttgtcttaattatatataaacaacatgatatatattaattcattttagtcttaaaaataaatataactcttttcataaaaaatattataaaagcttttacctaatagtaaatttatttaattaatttaagaggacttaatagctataaataacttgtgtgattatttttactattttagtaatataattattaaattataataaaatatttcattttttaaatttttttttttttcagtggggctacagtccccataaactcttacttgggtccatcattgaccagttttctagctaattttaatcatataaataaacaaattaatttatatataatattgtttatacattaataaattacataaatatatatatttttgaaagcatatataaatatatatatatattattgtgactatttttagaggtctccatcaaatcgatctaatctaatgataattgattaatttaattataatcgaccgccaaattagatattcaattatgaatgatcatatcagataattagatgttatttttgaatatagatcagatagactgttagatggggtgtcaaaaaatc

SEQ ID NO: 30415 - DNA, 3406 bp, Cannabis sativa
ggtaatgataaaagtgctcactcaaaaaatgttttaattgcgggctcgaccgatcgggctcgccaatcatcatgagtattttaagttagaattgccacgggcttgggaacccagggagttttcaattctttaaagatatggtttatcaaacaaagcccacttttatttttctatgtgaaaccttatgtttgaaaccaagactggagatgttatcgactcagcttggttatgagggaatgttttctgttgatgcgcagggcatgggaggaagtttagctatgttatggaaagataaaaatgatgctaaagttagaggcttttcccaaaatcatattgattaggtggttcataatgacaacttacaagattggaggctcaccggtatgtatggtgaacctaatcgtgctcttagaaggaacacatggaatcttatgagattgctataggaagaatcggctctcccttggtgcattattggagatttgaacaatgttatgagtcaggtggataaaagaggtgaaaatccctatcctaattggcttattgagggatttcagcaagttgtttctgattgtgatttagtagatttggatcttttgggtcaccaatttacttgggaaaaaggtaggggcactgatagttggatcgatgttcggttggatagggctcttgccaactcagcttgggtcatgaacttattcccgaattcccgattggttaatcttgttttcaccacctctgatcattgtcctttatttttagaccccagattttggcttcattcaagctatttgaaattgtttcattttgagaatgcttggctctgagaagagtcttctttttctattattcaggagcagtgagaaggttgtgggtctagcaacatttttgataagtcagtggctttaggaacatcttagcttgtggggaaaagatttgactggtaattttaaggagaggattcaaagttgcaaaagaagatttggtgctcttaaaggttgtacgaatactgagtcggtttctcagtaccatgaggcgaaaagattgcttgctgagatttatcaccaaacagaaattttttagagacaacagttgaagcaattttggttaaaggagggtgactgaaacactaaatattttcatgttgcggccagctctcgcagaagaaataattttattcaccaattgaagaattagatgggcgattgggttaagtggaaaactggtttaccccaggtaatgattaattattttgctaatattttccattccttgaggtcccatggtgatgatattcttgattcatgaggataatgttgctctgcttcagccggttttggaggaggaggttcgttcggttgtatttcaaatgcacctagataagtcttcgggccctaatggtatggcaccagcgttctatcagaagtgttggcatattgttggtcaagatgtggttagacttgtccaaggcttcttttgggataatgtaatgcctaaagatcttaatgctactaatcttgtgcttattccgaagaagaaatctccttctgtcatgggagatttaaggcccatttctctttgcaatgtgctttataagttcatctcaaaagtgttggctaacaaacttaaaaggtttattgtccaaggtaatttctaagtttcaaagtgcgtttattccgagacggcttatcaccgacaatgtacttgtttcctttgaaattcttcattatttaagacataaacaacaaggtaaaaatggatgcatggctctcaaattggatatgagcaaggcgtatgataggatggaggggtctttcttacaatctattctgcttcgaatgggtttctctattgactgggtaaggatgataatggaatgtctgcggactattacttataacattgttcatggaagagatgttcttgggcctattaatccttctaaaagaatctgccagggggatccaatttcaccatatctctttattatctgtgcgaaaggtttcttggctctaattcgtctttacgaagagaagaaatggattcatgggtgtcgagtggttcgtagggctccttttgtcactcatatgttgttcgcagatgatagcttcttgtactgtactgctaccagggaggaggcgcaacgtgttctagggttgcttaataagtttgaaaaggctttgggtcaaaaggttaatttgaataagtcttctatattttttagctctaacacggatgatggggttcatcatacgattctatcaactcttcacatgagagctactgatgaccacaatttttatcttggtctgccgagtgtaattggtggaaataagactatggcatttggtttcttgaaggagaaggttaggaaacgcattcaaaattgggatagtaagttactttctagggcaggaaaggaggttttattgaaatcagttatccaacctttaccttcttccactatgagtattttcctaatctcccttgaaatttacaaagatattggttgacttatggagagattctggtggcattctaagtcttcatatggtagtggaattcattggaaaagttgggacaagctgtgtctccataagcataaaggaggtttgggttttcgtaacttgcagaattttaatttgtctatgttaggcaaacaaggatggcgactactgactaattcatcttctcttgttgttcgagtttttcaagctagatattatacccaaggtacgtttcttgatgctgagttgggttctaatccgagttatgcttggaggagtgtttttaaagcccaggaggttgttgaattgggagctagatgaagggtagggtctggaatttctatacttgttcttaatcagccctggctttcttccaaggataattcttatgtggtttcttctcatgaggctctttgtgactgtagtgtttttaatcttctacagattgataatatgagctgggatgaggagcttttggaggacttgtttgttcaaagagatgttgagctaattcgtagtatacctctgccttcaactctgaatatggacacctggtattgggcatatgaagcttatggaggttgctctgtcaagagtgcttatccagctttgcaagtgcgtaacgagagatggaatttgcaagataattctggtttttggaagaagttttggtacttgaaacttcccctaaaagttaagaattttctgtggagggctcttactaattgtcttccaactcttgtatctcttcaatctaaacggattaatgtgtgtaacatttgttctctttgtaatggagagttggagaccatatatcatattatggtttgatgtcccttcaccaaagcttgtatggatcgagggctgggattttctcactactaaaaaacctggaattc

SEQ ID NO: 30416 - DNA, 1495 bp, Cannabis sativa
  modified_base (903)..(904): a, c, t, g, unknown or other
  modified_base (1262)..(1262): a, c, t, g, unknown or other
aaaaaatgtgaaaaataactctaatttctagagttatcaagtcacaactaggtatttcgggccgaactgggtttgaggccgaaatacaattctgtaatgatttattggcatatgatttatgtgaaaataatctaaaatttgtttgggtttatttatgtgtaaaaattacttaaatgcccttaattgtttatgtgtatgttataaggccctatgggcattttgggtaatttggcttatgtattattgttgtaaattggaattaattgcatgatggaaaaaggaaatttctagttttgcttgcacctttaaccccacccctctctctccctaaacctcttttccaaactttgattttgttggatatcaacttgaatttgtgctaactcttggagcttggaatttagaggattgtcttgctatattttgaggtagtaattgtagtttttaaattaaatttccttgctgaaattgctttagaatattgtttatgttttctttaatgcatgagggaagaatcaatgtggattttgatgagttttggcttagattatatggatgttgtttgttgtgctctagatgagattttggagtgtttttcaagcttgaatccatgtgtatttgatgttttggttgctggaaaaaaataaggttgaacctagtttgaagttcaagtttttgtgagctagagttttgatggtgtatgctcatgtgagaagcttgttattgtatgatgtttaatctgaattttcagggtatattattggatttttaatgcatgaaattgtatgttaaactcaccggataattacttaaatctattaggtgatttgagggttttattgagttttaggctagatttggggtgtgaatgcatgtgaaaattgttgctggtttttgagtttnntgggttttgaacccaggtgccacggaacagcttttgcatgccgcggcccgcctccttttgagacctgggagttggccccaggtgctgcggccccttgtgggagtgccgcggcccaccctcgtgtttctaggcagattcgagtgtaaacatcaaatgttcataactttgtgattcagactccgttttgggagttgtatatatcgttggaaagctctttttgagctctatgtgattatctgtgttttgaatgccatgtatatactttataaatgtggaattaggggttaaccctatttgtgtaaaccctagaatttgtgactaggattaccaacacttggtcaggagcacccggggattnggaatctctactattgcgggacattaagtaagacagtagtttgcatgtaaagttatgtgcggtggcacttatgctagaaacaatatatgtgagtaaatagtaaccgagattaaggttactaccctaacatgggtggtttaatagcctagggttattaccctagtgatatatgttgtgtaaatgctatgccatgttaaatatatgagtatattgagattcagggttatgtgttc

SEQ ID NO: 30417 - DNA, 1739 bp, Cannabis sativa
cgtatactgggccgattagttgaataattctttcagacaccacacctggtgtgataggcgtgaagcgtcccacagtggctcccggtgttaaagtttcaccaagatgactggtggtttttagaaacaagttgaggggagtgacagtggtacatcccaatcttctattgatcgtgtcaataggtgtcgttccattacctgggagtggaacgttcattgttccaacattgaaagaacctatgttgttatctccatttgtctggtttccaactattatgattttcctctgaaatcaacagtaaaattctttcccacagatggcgctaaatgttgttggaggaattttgacaacaccaaataaaatattaagatagaattataaatgaaactatgtgattactccatctagaatgacgtgtattcaaagaatgaacactcaaacgtactggaaatataaataacacaatggaaatatagtagttcagtcaaatcacggtcttcttagtccactgttgcaagggtttctgtcttcttcatttcatattggatcacttctttatatacaaagcaagtgtcctttgattatacagaacttgattaattatcaatccatttttacattgaatatcaacatttaaatcaatagaaacgtaaacataataaatggagaacagtttcgacccaattcactaactacaacaatgtatgcgaccttggttgtgcgagttgtctgttcatattctcacataagcttgcgggcttaagatgcgtacaagactaatcgagtcttacgtgtttaagatactacattctatttgagtcacgtatacgaatatcctgcaaaaagtcgataacttaggacatgcgagtccttatcaggttatagagtgcgttaggtcatccggaccagctccctgagtaaaaaatcgatctttacttactcatacgaaaacctttatggacatcgcatatatcttagtatatgcgagtcttgaaacccggtcttctgtcctgcatcgtgcgaggcgtaataatgaaactagactctgtcagggtcacctcatcttgttaagtctggttcgggcgaggtttatactcaattggtctccttctgacagctcagcactcctcgaggagagtaagtccacgtgtcatatttatgggagcctagtctcgagtttctaggtgaaaaatttacattataacacttattagtgtagtggtaagaatcttttcaaatttaagggagttgacaagtttaactccataccttatttcaagcgtaaggtggttgccccacttaaaattagaatcggtcgtaaactatttcgagcacaggtgtaaataattatttttgggtctttatacaaatatttttctagttaaaataataataaataaggttgcttagtgtagttgtaagaatcttttcaaacttaaaggaattcattagttgaacctgttagatttaatatatgaaaaataataaagcatatacatcgatatgaattgtaaaataatataaacatatcaagtgtatatgtgaacaatgaaagaaattgtaatatctccagtcattgatctttgagttttaatccccaatgtagcttcagaaatggaaatcgggcttctaagtccactaggaagaatacgcaaacccttcttctttgtgtaaagatcgaatccaacaattaagtctttttcgggtaattttgatacaatgactctgtgagtaacataac

SEQ ID NO: 30418 - DNA, 3466 bp, Cannabis sativa
  modified_base (462)..(462): a, c, t, g, unknown or other
gaaacaataaaactaaattcagaaggagtgaaaagagaactcgaaatggcttgaaatacattttacttttgctcttaacaaaatcagtgtttgtttattggactacatctaatatttttaagcttatctaaatctgatctaattatatattaaatgttagattttatcacctgatctgatctaattaatttcagttattcaatcgatccaacatcaattaaatgttggattgaatcggttatatctattggatgtattttatatttatttattagtttagttttatctaatattttagacttagtatttttcagatcggatcggatctatcaaatattttaggtcaagtatgtattagattgaattggatgaatccaatccaagaaaaaaaatagtacaattttacgtataacaatataaaattttaattactcatcaaaactaaatgaaaatactaattanttcgattggatgttagatgtattaaattttcagattaacatatgaaaaataattaaataaaactaaattaaaattttttaaaatattttattttcaaattaattagtgttgacgtgttaacggtatatacaactatgtcatcattctgtttatctgataaaaacttgataaaaagactactttaaaacactgaataattcagcgagttctcaagtaaaaaatataaataacctttaatatatgtcatataaatagctttttaaaataattttttactattaaaaaatattttttttaaataatttgcgtcataaatacttaatttaattattgattacaaatagatacttaagtttaattttttgacagtaatactaatagtacctaagttacaattttgaaacttctgtaggtacttaaatattaagtgttaaataagcacgtgacagtctttgattagtctaggtcattgaatttctattatttatttaaaaattaatttaaatatattataagaaaatgatacacgaataatgacttgacacttataggctagatacttatataaatttagaaaatataacttaaatattattattgtaaagaattaaacataaatatttatccccaatcgaaaactaaacttaaaagtttttattttctttgaatttagcctattctaatacaaaaattagaaacaaagtcatacatatttatagctatttatgaatttatcctttgtttttttttatatatatttctcatcaatggtatttaaatgagacccacataaagatcaaatttacaaattgaccccaatttcattaatgtttacatcatttgcaagagagagacccaactaacttttcaatttaatcctccaaataaatttcagaaaattctcccaatttttctatctcaaacatttccaacttcgccgagaacgtgaaattctccgatctccggcgactgtttacgtgaagtgttcttcgctcactttctttccttaccttgatcgatcatggagaaacttgaatcaagattatcttattcgtccgatccataactttttgttattgtttttggaccttgaatctgcaaatccaagttaaatccatggcgtcgaggaaccggactttgcttttcaggaagtatagggatgctttgaagagcgttagagcaccaacaagcttatcggcttctacgagctctggcggtggcggaccggtgattgagttggccaatacgtcgcttttgaatccgaatcggtcttatgcacctctcagtactgaagatccgggtaattcaaggtgtcgtcttctttcaatttttttagtttctgtcaaatttcgtggaagatttgtttcaaaaatttatattgaagatatgaaatgtaatgctagtaattcattcctgttttgctcacgatgaggacatttgagagaattagagggaaaaaaacctgactttgtgtaattaaatggtgcaaaaagtttttaagctgagttatgcttaataatgcaatttagtttagttgtatatgagtatgcataatgccaattcgaagccattgaacattaaaaagtaactccacatcgaaatatgtttggatttcctgaagaatcaaaatgtatggagttatttattagaaaacattattaaaggcaatgagaaggaagaaaacattgtgtttctcttcccaaaacattgtttttttttttttgggtataatagtgcttcatattttggtaaagtctgctgttgtttgcacttgctttcctttcaagattgtagaacatgtgataattagatgttgggaacttaggaatggtgcaagaaattccagtccttgaaagggtctccatgatcattcagacgattcaatttctttgtccacatgttcaatggcagccgctgggacatctcatttggaactttgttctttaatggtgatatgtcattttgattcctatatgaaagatgttatctattgaataacatccaaatagcctgtatttgggacaatccttttgatttcaagtcgattgtaacttctacaaaccctttctgcatcagtctagtcaggtgccagatgttcatctggaggatggtgcttgaacttggatgatgatatcttattatcaggacatttcaatactcttctctataagaatgaactggaatgttgaaatgtacaattgctattatagattacttcaaattaggaaattcctttgatggggactagtgtttttattaatgcagtaggggtgcgcttactgttggtctacctccagcttgggtagatgtatctgaagatatatcagtaaatgtgcagcgcgcacgtgtgaaaatggtcgaactgacaaaagcccatgcaaaggccttaatgccttcttttggggatggtaaagaagatcaacgtttgattgaagcacttacacaagagataactggtttgataaggaaatcagagaagagactacaaagactttctgcggctgggccatctgaagattcaaatgttagaaaaaatgtgcaggtataactttgtttcaagcattcaagcaatttcatttaattaaaattagttttggcagaacaatattaatttttctttggctcaatttcatagtttgtggggttttaatttttcacgtatacctgctttattgtaaattgtttcggaccctgaagtagacgtcaccagtagtttgtatggttcatagtttttgttttcctgtcatagttattgcagttgagttatttatttacaagaaacaatcaattgagttatttagggtcaacttgtctaattttacaagttataaaattgtgggcgctttaggtaatagatatttattgaatctttagcatgctagtagtctataaggacttgtagccatatttatattatccagaaaaaaactattattaaaataaaagttacagataccttcatgtctggagcttgctgaataaatttggctccattccaggggtg

SEQ ID NO: 30419 - DNA, 4106 bp, Cannabis sativa
cctattaacatcgttaaatttaaacagaatattttttatttttaaggtatattctgttaaaccaagaaattccgttagataggcacttttaatatataaagatatattttataaatttcactttttcttaaccagtaatttattttatttattttattggtgtaattaagtatcacatctcatatttagcacaaaaaataattttgtggtaaatttacactaagttttaactttgtgctccaatgcacaattacaaaattttgatgtaaaatttaatatctaattattgttttattaaaaaataaatctaataactttataatcaattttactattattttaatatgtaagacaataaaaaaataatataaatgtttcataatttaatgtgatagttaaatatactaataaaataatataaatgacataaatgtaaatgaaaaagtagtacattcattgtggtgtaaatttttcatcatagcaaatgttgtgctaaatttagcacaaaatttgctatgtgccaaatttacatcactttttggcacaccattggtcaccattggtcgtgaggtttcgcagtgtttggcaccattggtcaccactggtgcctaataacaatgttcttccttaaagagaaatcctaaaaggcaccaatagtgcctaacatcttcctatatgtcaataccgctatcggttcaaattaagtattgggttttacataatttaatgtaataacttttaaggagtattgctaattaatcgcaagacgacatatctaaagatattagacaccactaatgcgcaataacaaaaataaaagtattagcaatgcacttcttttaaatatataatatgggatatgattttgtcccgtgatgtacttttatgaaatgtattccatggtatattagatgggtctcagggtacatcaaatgagtgtcaaggtacatttctactttttaaccctaattacccctagatcaatcttagccgtcagatcaaataactccctcatctgacagttgccgtacatcacaaattacaatccgtaaaagtacaataacggaacaaaatgatatccctatataatataagctagagagtgattgttgggttgttaaatataggtaggtacgaaaataggtggtacaaattgtttttatgaaactagtggtataggatttaactaattttgatatttgagggggtaaaagctggatggaatggtttcagtagtgtgcgtttcttttggtgctactctcctccaattaaagctcagtactaccctacactcactcactgactactttgatgtgaatcagtaatggtaatgattaacttgaaacgactctgattgattatatatttgtttctaaatttacctcatttctaattattttctaaatatacataccactgtaacatgttgtaaaattaatagagatttcttttcaaaatatgaaaaaaaagaagtatgctatagtttcttcaaattttatacattatatatatatatatatatattcgggtattttattttttttaatatatatttgacaatttgtttgaaaatttattaacaaatccacaattttataaaataattacacaaaatattatttttaatttttttttttttacaattttactttcatttttttttttttgttttacattttagactctaaggggagaaaaaaagaaatgtgtagtttccaattttcatgtacttaagtatgagttagttgcttttgctcgtcacacacgtgctgagctagaaagcatgagactcattcagggtcggctcaagagtggtgcactaggagcccacatccaaagctccccacacaagactaaaaaactctttaataaaaagatcctaaatttattttgtaaaaatacaatttttttattttactattatttattaaaaatataactattttaaaataaaatgcttaattattttttaagatactatatttaatattttatttaaaaaaaaagcccaattatatttttaaaatactaaatttaaaattttcaccattatatatataaaatatttatataaaaaaacccaattaaattttttggcccaagacccccaattggcttgagactgacaacaaacatgcatcacatatgcaacatatatataagcatacacaaagaagtttggacaaacatttttttattattatatggccttgatagggcaagagagtacacacctaagttcctatcatgctggtgacaaggtgcttcataagtcaccaactcctcttaaagagcttaatggcgtttcaagagatttttaggaataaatatgatattaactctgcttacatatgaaaaggaaattacaaacatagataaatacaaaagtaccaccaccaaggtagctctcaaccctaatgaggtgtttggtgcaagatttgactaatagtcaagcaccaagaaaatgctcatgttacaaaatggccccgtgtgagtgtgccatggagcagcatgtcacattattcccttcttaattattcgacgccctcgacaaacctgctacatgatctccattctcctgcaaaaactgttgtaggccatttgccttctcccaactgatctcatcatcaacgaggtcctactatttgactagacactcttttctcttctttctctccacacaaagagttcttttggcaatgatttcttctagttctctgttgttacatctttcgaggttgatgtcgtccctggtagactagttgtgagttggatcttcatgatacgacttgaggttactgacgtgaaggactgagtgtatcttcacctatgtagatagttcaactttgtaggaggctagtcatatttggaggtgactggaatagggccctcatatttgcacacgagttcgatgttcttgacccctcaaaatctcagttgttttggtcgtagcttgatcaacactaagtcaactgtcttgaactccaacggtcagggtttttgatctgcccacttcttcattcaaaataaggctttctctaagtatgcttgggcaatctctttattcttcttccattattttgtaaaattgaaggcccacgaattccatccgtagtattcatccaccgtgtgggggtaataatggttgttttccattcataacttcaaattggctcttgtttgatgaaaaaaaatcttatgagagttgaaacaaaattaagataaattttgaaactgcgaccaattcttatggttggtgatgaaaaaatatcgcaagtactccaccaacatcttgctgaatcgatcagtctgtccatctgtttatggatggtagctcgaggagattttcatttatgacccgagaagcttgaataatttagaccagaaggtctcaatgaatattttatctcggtcactcgctatattctaatgtattctccaatactttactatatgtttaaagaaaagttgtgttgtctcttctgatggacactactttgacactggtatgaaggttctctttactcaaaattttattaacaataaaagattaactttaataaaattatggaagaaataatatataaaagaaggtaatttttacgtgattttgtagttaaatctacatagtccacaagtccttatttctgagtgttttgtgttacagaatatagaattcaaagaatacatgcaatagaggatgaatttcttatagtgttatccatagataatttttgtcgtcccttgccccgtaggttccatccctatttataagaatactgggattggcgactatttctcttgatcataactaaatatctgctcacataatatgaacaatccacacgtttcatataactcgaatgtgtggataatatgtataactatcaaataactatttatttgaccttatcatatacatgttattttaccaagctgctcttctatttatcattttaatgcttcacaaaatacattgttgaattcgcatgcatacttgtccaaggtttctcgtaaaatgaatgatttgtcattctttcacggacttgacgattcaaaatgagattttggataattttttttataaattcttgaaattatatttt

SEQ ID NO: 30420 - DNA, 2358 bp, Cannabis sativa
atttttgcataaattatgtaaaaaattataatttttttttttttgaaaaatgtgatctggatcacattaggacaatcctgagaagacttcaacaatcggtgttggaacctttttataccagcataactcattgtctagcctaatggcatgtttagccaaaccatggccgcagtgttatctttgcgggacacatgagacaaaactgccatcggaaatttagacaataaagctatgatatcctcaaacagcacacccatctcatttgcgaacaccttcctgttattgatagccataactacgaagagagaattagatttaaccgcttttaaggaatcccacacgaatgagcccaatttagtcaagtcagcggagcaaaagtttcagcttgaaaaataataatactacctataaagaaccaaacaacagacaaacaaaccacattattacagtctagaaaacaaactattcacaaactagagaaaagcaataaagatactaaataatcaaataaaaccctctaaccccaatctaaaattacagtaaagcaataaaagaaaaaacaactctaaacaccccatactaaccaaagtccaacactttggttagtaactaacaaaattataattcgtgtacaaactgagcaaggagactaacataatctatactcctctacttagaatcatttggttagtagtagtctttagtgcagtgtaattaaattgtcaaactcctcaaacttttagagatactattgttcactacctgaacacaataaactttaagattaatctacaatattaacatcgtaatgttttgcttaacgcagccattattgtaagatttgctgacataataatggcccctacaccaaataacttagattcctctaagacagcttcatccaccaacaaagtggaaccagtgattgtgaaagggtccccttgagcagaagagtagttagagaccccctcctcactcatagtcaaacttttctttactagctcattcgttaaatcaacagagtcacaaaaacttgtgatccaaccaattatttgcttagcgtattttggaagatcaccgtgagtcatcttatttctcttcgtccataaaatgtataatttttaatcattcactaatatatatgtatatatatatatatatatattcattcagattaatacatgcaatggaatgaggtgtggagaaacatttgtagggccaaactctcctaacaagccatctctttggacagaaaattggacaagtttgtaagtaaaatttaaaatttatataaattaataacgtctagattagatgaaagtataatttaatcgagatcaaacaaaaatataatttaatggaaattattaaccaatattttcttaaagcttaatttttgttttggttttaagctatcaagcatttggtgatgaagaatacattagaccagcacaagatattgctttccatgttgcactcttcattgccaaaaagggtagttttgtaaattactatatggtaagatttaactcaaatgtggtatcaaatcaaaattaatcaaatgttttttgtcttatgataaaatgttgttcaaaattttagtatcatggaggaaccaattttgaaagaactgcctctgcatttgttacaaccaaatattatgatcaagctcctcttgatgagtatggtaagtagtttcttaattctttttttagtaattgatatgagatacttattattaagcttgtttttactttgacaggtttaattagtgaaccaaaatggggtcatcttaaggaattacatgctgtaataaagttatgctcaaagactttactttctaaacaacaaacttcttttcctttagatgacctacaccaagtaagatcactaaatttcggtctcttttgacttaacttctatatttttttttttttatcttttaagattaaaaaaatattcctacatgtccaacacttttccattaaagaaaaataataaatcagaacttttatttttaacttagattttattgtctaatttttctggaatatatatttttttatgtaaatgtaagttgcaacttttacattgcggcccataaattacagggttaggcctgaactaaggtgggctaggcttgtgcctagggcctactcaatctaagagcacaaaacaaaaacaaaaaatattttaaaaataagcatattttaattagtaatttttgaaaatatcgtacattttttaaaaaaagcaccataattttgttgttacctaaggctcaataagtctcagggtcgacctgcataggtgtctttgttattataacctttattattatcttttgtgaaaatagta

SEQ ID NO: 30421 - DNA, 2276 bp, Cannabis sativa
  modified_base (2111)..(2112): a, c, t, g, unknown or other
ggtattaacaatctccccttaaaaagttcgtttttagtaaaaagtgctttttaataattatagaggatatttttgtcataatcctttttggaaagacgtgtcctttaattttggcggttgtatggttttgagggtaattatgaattgtctcgtcatattctgccctattcccaaccgttagatttcccaatccttggccttcttgtcactagactttgtgtataaaagggcggctcaagctttccattttcacaaacttatagtttttggtgagatccatcttgagattggattatctctttcttgctaaaatgtcccatctgagtttagaggttcacccctccaaattcataacaccaggatgcaccaactgtttttcttctccattcattcccaaggtcttcaaaccttaattgaaacggaaatgatggattccaaggttgaggagcttccaactaatccaaaccaagggaacccccttgattgttaccggcgatcttcacaagtgactcttgagagtaagtattgtttcttgtgaatggtgctttgagtcggatcattattattttttgaagatggatctcactaaaaaccataacaccaggatgcaccaacaatttttcttctcctttcgttcctaaggacttcaaacctcaattggaaccggaaacgatggattccaaggctgaggagtctctgactaatccaaaccaagggaaccccgctgatcgttaccggtgatctttacaattgactcttgagagtaagtattgtcccttgtgaatggtggtttgagtcggatcattactattttttgttgctccatcgacccgcccccttttttttgtctccgcagaaatagacatagatcttttgagtgatcttagaggtcctcctcaggctgacgaggaatctcggaggataattggtgtggtctcggatgaatccgggaggaaagttggcatggtttctatcagagaatccaaccaacccaagaccaaaacctgcaccggaagagatttgtgccaacttctctctggtatcgaggaatttcctgaggctgggaataaggtctcaactgcaggaaatgggatcttctaatgaggggaatgaggtctatgtagagtttgaggccctctacatgtagacggtctttctcaaactacgtgtagccagtctttctccaagctatgtgtagacggtctttctctgaagtatatgaagacggtgtttctcgagtttagcaaccctccccttacattctttttttaggaagatgacttaatggtttgcccctagtggcatttttgtgaagacttttgtgaagacaagtttgaagacaagtttgagacaagtttgtaacccaacttggattttcttatcttaaataccttgtactcttttcatttgaacttaatacaattgtgtttgcttgcatttttattcacaacgtaaacaaatatattttgatcaaatgtacagtacttttggattttttcattactcataatcttcctgtttaagtagttagttatctaccaaacttttttattttggagcagttgtcaattctgcctcgctaaaactgttataatctgcctgaagcaaacttaaatatactttaatagttttatcactttgtatatttttaatttgcttgtatgaatagttagattatctatccattttctaggttcaagtacttttgtcaagacgccttaatgtctcgtttcatactttcctagctcgtgagaaccgttagtattcagttttatacgcgagctataacttttgattttcttttcccgtcagataggtttttaatcaaaaattatagttttttgatcccttcttcgtcaaaaaggtttgatcaagatgttataacaattcgaccgctctctcgtcaaaaaggtttggtcatggagttataacagttccacttctctttcgtcaaagaggtttagtcgagaacctttaaatttcaatttttttaaatggcgggtttgcattttaccatgtattttcagatgaattccagtcagtcatacatagatgccccttaagtaattttaaagaataaaactttgtaattacttaatataaatgattcnntttattcataactgaagtttaaatatcacatcagtaatgcgagttaaatcatttacttattggtagtagggtcacaaatgctccaggttccagtagttctttattagtgagtcgttgagtcgagccaatttataaactcaaattccaactactgcttcgatgac

SEQ ID NO: 30422 - DNA, 2500 bp, Cannabis sativa
aaatttatctcttttgcataattacctttgttaattttttatgccatgcagaccttcctgatgtggacgatgaagagggtgcctctgaagctgaaatggctggtatgcttacaaatttaggaatgtcaaagtctattattaatggctttgataccaagttgaattgattggtgtattctcttcttcttttttcagatgagcctgatgattctatgcacatattcacgggtcatactggtaatacatattactttctttgcttcattttcatttgttaatgaaacttcattccctttacgagtttcataatgtcttttgtgcaacttatgatgggtttggtgtggttagtcttatggtttattcccatgttttttttaacttagcaatatgttgaatcttatgtatctgaagattgttgggtatgattgtgctgagcatattacataatttccttgacaactatgtgtgcagacgagctatactcggttgcttgcagcccaacagatgccttgttagtagcaactgggggtggagatgacaaaggttttctttggaagatcggtcaaggagattgggcttttgagcttcaaggtatgagcatcagaaatagcaatacgctttgtgttctttcttcattgttttacatttgcgattaatttgatttcatattggtttcattgttttaaacttatttgtaggtcacaaggattctgtgtctagtttggcatatagttctgatgggcagttgcttgcatctggaagctttgacggggtcatccaaatatgggacacttccacaggagatctcaagtgtgtgcttgatggtcctggagatggaattgaggttagcttgtgaggcaatattgattgatgtgatactgttatagctattgaaactgagtttgagcaatgtgagtttcagtgggtcagatggcatcctagagggcatctcgtattagcaggttcccaggattccaccgtttggatgtggaatgctgacaaaggcacctatcttaacatgtttcaaggtcacagcagcactgtaacttgtggtgaatttactcctgatggtaatgctaacctcttctcttgttctttgataatgttttccttttcgtgctttacaaatttgctgtgcaagtctctcatttcctttgtctctatccttttgttattcatttttaaggtaaaacaatatgtactggatctgatgatgcatctttaataatatggaatcctaaaactggtgacaatattcatgctgtaagaggtatgtccttgattcttgctctgaaatttccagttctttgttttttgtttttcatagttaaaagtaattgaatgttgaacttagtgaaatctgatagattgtcttagggttctacaaatttaagatgatgatatgtggacttcattggaatgcatcctgtaataatggatttgaaatatgtaactaaaacttccgacatttcgaggcaatgcaaaaagtctttttcatacatccttcactgcatgacaattcgaataaaaaaaaatagaaaattatccatccatccatgcaagtttaccgtctaccctagatgcttgcacatctaatcataagcggtgttattggccgaacattgaatggttttagctggtcttttattcaacgcaactagtgttattatgataaatgcttatctttactgttgggtgtgttttcctcggcctttcataacgtgcttgttcaagtcttctcagtgtcccacctttttctcttattctagttcaaatacctccaccaatttagatgatttattatagattcaataaattcaaatgtttaataataggtggttttgaagaaaatggtactgaagtgggaattaaataattcatgaacaacattgttagctgaaacggttaaaatgaacttcgaaaagatcgacaagtatgaacaaccataccatgatttttttttcctttatgctggataaccactctaggtgtttgtgaattgccatagttatttgcaaattcttcaactatatcaagtttagaacttttttccgcctttcttgcctgtggtgcaatttcggtttgctgagttggtttcttgaacgctaattttcctgtaggatatccatatcacactgaaggaattacatctttggcaataagccctgattcatctcttgcccttactggttcaaagaatggctctgttcacattgttaatatatctaccggaagggtaaatttatcttatcttttcaaaattatattaatatatctacttaaaagtgtgactgcatagaatgatcaaactgattttgatgggtgtttgtaaacctataaaactaatatgctaaccatttcaggttgttacttctctggtatctcatacagattcaatagaatgcctcgcgtttgcaccaaggtactgtgaaattatgaaccctataatatgtgattatcataataaagattgtgtgtgcattttggtatcttcgttgtt

SEQ ID NO: 30423 - DNA, 2401 bp, Cannabis sativa
tgagatattaaagtatctagcacccaatatgagatggtgcttataaatgatattaataattttttataatatttattaaagtataataagtggaatacgatataaattacactaataataatattacatatgataaaaggtgttagttgtgttttccatttctcataattttaccattaggttagttatgaatggcaattttaaaattttccgataagtaggcacaaaaataataataatcccatgcttaattataagaaataaaaacaccaatttgtatcgtttctcaacaactttgataaagaagaaattaatatataataaggaataacaccatcccaaattttggatttagcaaagggttagagtctagtggaatgttcagtgtgtagtccttttccaatttggttattatattaatgctaaaacttgaccaatcttaaaaactctagatacattcacatcaagagacttctgcaatatgaaaaataaataaataaataaattatagtaaacttaaatagaagagaaatgtaattttggttaaatgataggccccttttctggccttgttgacattttgaaacctgaaaaatgggccaaataaataatcatatgatgcatgtggatatctcttggactactctacaagctaaactacttacccaactcaaggaagtgtgtgtttgtggggaggggaacttaaccaagtagaaagagagcattgttatatttgtccgaaatttggattagtgcaatttaatatcgaattctatattatctattttaaataatacttgtattataatgtgtcatattcgatattaaattacattaatcactacacattttattgggtaattgtatagtacacccttgaaaataacgttctagtatactttcaatatgtttcagcaattaatttttagtctaattttttttcataacgaagtatgttctgttatagttatttaagaccatctatgaatttttaaaaaattctaaattatttacattgttgaaaagaaaattaaaatattttgtgtaattattttttcttacgttaaagagtataccaaaacggtcctaccgaccttcagaaaggtgtacgttaaatttttcatttttattaagtggtattagacatgtgtatcatttatcaatatatatacttatatataaaactcgatattaaattatatcaatcagtatcacgtgaatcatattaactgatattacacattggtctccttttccaataatgaccaaaactagggttaaaatatcaagactagtgttaaaatggttgagtcaagtgaacattcaggactacccacatgacatggacctaacttaaaccctagctatgtacctaggtagctatagtattccatgccaaaaaaaaaattcaatggatggatagggtataagcttaaccctgtacagttgtataaactgtgcccactaagataaagaaagcacaagaagcaaaagaagcaaaagaagtttttttttttcttttgtatgtaggtgtttacaggtgtattgaacctataaatataaatatatatatatataaatgtgtgtgtgtaggaatataggatggtccaaaagaatttgtacatacttgtcacttaatatttttggtccagagcctagtgaagtacatctagtttgtgtggttggagaggccagaatcaatctagtgaatgtagttttaggcaagtcccatgtgaaatgcctcatgagatttcttttggggtgtttggtttttggatcaattcaaaacttcatattttcaacccattctgtcccactttcatttatgactttaactcagtcaacattaccttatttatgtccaaactcttaacccatttattgcctcaattatcaaaaccagttggatttggatatttaatcagaacatacaaagcaaacaaaatagaatacaaacaaatttcattttttttttaattgaatggactccaattccaagtctttagatatggatgtgtaatattaaataatatattgactctatttatatgtattacacagattatgattcttgtttattttctttcccgatgacaacgtagtctcctcttctgaaagattaggtcaaaatcaattgtgatgttaaagttgattgtgattcgatgtgcgtggtggctttggctagggatcacaaggagacagttttgtgggtggcttccaaagtgctcaacttctctgaccctctaattggagaagttgtggcatgtctgttagctgcggaatcaacggtctcgaagaagcataattttgtgctgattaagagtgactctgagaaggttatcaatgcgctaaaagaaacttgctcctattgggtattggtagctatgtaattcagtgtaaa

SEQ ID NO: 30424 - DNA, 1036 bp, Cannabis sativa
gaaagccataccaaactatttcttaacgccccatgacccatttcatcaaatcaagaaagagctcatcgaagtctcatgtgccaataatcatggagagttcctgaagaaatatgaccatcctttattgaaaaatcaatagtcttcatgagccttccttttaagcttaatgaagatttaaaccctacaaatgctagtaccccaggcattaatctagaacatcaataaatggcgtccactgaatgcaaagagttacatcaacaaggtttaatagagttaatggcctctccatccgcatgtcatgcattttatatcgaattccaagatgaaaatctcacaaaagtttaagtgcaataattcttgggcatcatcaattatttgcattgttccctgactttttgtacggacaaggtcactcaacaatatgctcaagaagaatagtccagaatcgtcacatgaccaaactgtggcaataagaaagctaaaggaaaacatgttcttcaaatagacgccagtgaccaacattagggtgttgtccttcccgagcaagattgtgatagtaaaaagtcccatgatccgtaaggggaaataccgagtaagttgtacaatcacacacttcctggggatggtcaagtgtgaagaatctgagactatgtaggtatggggctacacccttgaagcgagctttaatggattgattggtactgcctatatcaacaaggtgcatcttgtttttggtagcccatcacgaaagaacttcacagttaagcgtgctgttgggattttatgccctaaataaaacccatttcaattcaatctaatttgttatcaatagaagattagaagtcatttatgtatacatgtagtttttatgtttatggtttaatgtgtacagaatatgttaaatccaaaacatatagttattcataattatagtgatgtcaacgtagtggaaggtaattttaattatatgcttcataagataatgtccctcgattcatcagtgcactggatttatactgatgtgatagtcagcgat

SEQ ID NO: 30425 - DNA, 1403 bp, Cannabis sativa
gaccaacgaaagttttgacgctcaagctgactacgattgtgtaatcgactgggatcaacattcttgggaaaatttccatgacaacctctccttccaaactcacacaacgagtatgtatcccaacgctttgttgactgtttgctattttctatctaagatagaaataattagttcaagctaggtctaggatgtctctcatgttagagtggtaaagtgttacccgtagagtttcatttttaggacagggttgtgtgggaacttttttttgcaataaaaatgtcggtactatgtgaatagtttaggtatggatgtttgtgctccatagacattagcatacttttagaattttggaattacgacagaacaatgcaagatatttttaaacgaatactaggctagtgtattttcttcacacccattcggagtttataggactctgaggggctttaatttctagatttctgcttttagattatgttttggtaactttccatgggttcccaatctatcgctttgagttctcttggaagaaaagatttctgggagtgataggtctggtggggacctctccaagaaactttaggggaggcctcccttgatacccattttttcatttggatagtgggtgtctaatatcttggcttttcattttccctttgactttccaatgatggatctgaatcaagaattccaccttgaggctgtggaaatcaaagaaaatccgacagttgcctccacagaggaagcgactactgaagaggtgttgattgaggccctcctcttggaactttagcaaggtggaaccttggaaaccatcttggaggttgctccgtcaaagaaaactaatgatccaaaggaaaaggggaaggctacgactctgcctcccgctcaagaactcaagaattccatttaggagatcgaatagaaagagaattgtttccactcgtacatactgtttgaaatgtatgcctcaaaggctagactttgcaacatatcaggactgatgtggcataggttgtctatcacgaaatagtctgcatccgtgagctctgattcaacacctggagctgggctcacatctcaagcggagcacacctccctctcaggacatacttcacagattttattgcgacgattgagatttctccattccagctaacacctccggcttacaaaatttttgctgaatggtacattttttgtaaaatttacaaatttgaggtgcccactctaaaagaaatcctctatttttacatcgtgaagcctcagtcgatgcctgccaactgtgaaaaggtgggcttcttcaagttggagaggtactcagactctcactatcccactagccatacgaagcatacccatgacctaagggactattggttcttctccattggttttccagt

SEQ ID NO: 30426 - DNA, 3896 bp, Cannabis sativa
caaatgtttctttaattcattataacctgtttttttttttttttttagctaaaaataaacttcattgaaaaagacgaaaaaaaaaaggttgatgcttacaaagggaaccatctccctaaaaccagattagctagaaatgatagtggtgaacacatggggattcacgtcccataagctaacaaaacccgaacacgaattatttaaaccccacttagcaagggtgtgggcacccctattagccgatcttggaatccaatggagagagaactcagccccctcaacagcttgcaggaacttggagaaagaagaagccatggaccagttaggaaccgccttggctttgactgccttagtaagagcttgacagtcagagagaatcacccccctgttgagccccagcagaagagagacctctatccccttcaaagctgccaatagttcgccatgaatcacaccaacgagcttgcacttgctaacatacatcgcgaccaattgcttggattgatccttaacaaccacccccattgtcatgttctctttgccaaaagcagcatccacttcaatgataaaaccatcagatggttcgtgagagaacccagcaattggatgaggaggaggaggagcccgattatccaaggccaaattccaatgaaactcgaattctcggccaatgagtttagacatcatctctagttgtaaggagcagccactatggaaagcttggtttcgaaaaaaccaaattttgtagagaagcaccgctggatatacattctaaagtcatcaaccgcccgagcctccttttccttagaaaacggggcattgaatatccaattaagcactttccttccgttgctcaagtcaaaagctccgatcctaataccccacttagggagaaaccagagtttcttgaccacatcactgtgcccaaaaagatgttcggttgaatttgcagacggggcatggcacatacagcacagaccaaactcattgccaaatatagccgccaatcttgaccctgtaggcagggcatctctatataacttcaaaaggaaaagttttacacgagggtgaaaacaactttcccacaattgtttataaagagagttatcaacggagaacaggtgcttgttaagagcccagtaagcagattttacagaaaaattactactagaattaggagtccataccagggagtcatgagagtcgagatctgagggaacaatcgattgaagattagccactgccccaggggaaaacaccacagaaagtttggccaaattccaatccccactatcgcaatcaatgagctcattaataaccagacgctccttcactaaaggattcaagtcgtcttttccgatcctcaaaccatcataaatcagccagtcacaatcctaaagatttctgttagaattgagaccgaccctccaagcgacattctcctcgattaaatatttaaacatcccaaattccccttgccacgaaggaaatattccgtttcttatcagcctctaggaaggaggaatgagggaagtatttccctttcataaccttaatccacaaggcatcactctccctagctagcatccatgccagtttggccagaagacacatattgttatgcccagactttctaaattcgaggcccccacaaatcttgggtttacagatgttttcccaagtaaccagcgacagatatcgtcccttcccagtatccccagtccactaaaatcgtctacatagacaatctagatttgcaagaatggccgaagggagtttaaaaactgccatagaatacagaggaaccgtctggattacattttgaactagcaccgttctagccgcttgcgataagagtttagctttccatccctcaagccgattagccaccttgtccaccacaaatttgaacttgctcacattgtttccgtgaatgaagaaaggatttcctaagatctgctcatctccattcatcatttttagcccgaacgagttaacaattttcgaccgcaagaaatgacagtagttattagagaaggtaatcttagtcttctcgagatttaaacattgaccagaccaagaacaatatttgtcgatgcaatcccacaaacagctcaatgagttaagatccgcttttgcaaacagaagggtatcatcagcatacatcaaatgcgtgatagaaggcccttgacgagacaccgaaacaccttccaacgccccagtagcctcattggctagcagtaaccttgaaagcacctccgaagacaaaatgaaaatatagggggacaagggatcgccttccctgatccctcttctaggaacgaaggttttggtaaggcctccattgagcagaacttggaatttaaccgaactaatacaccacatgatcatgttaataaatcttgcatcgaatccattagcatgcaggacagcttcaataaatttccattcaaggcggtcataagctttagacaaatcgcacttaattccaacaaaggctttcttgcccttctgttgacgaaaatagttgatcacttcatgagcaattgtggagttttcagctatccatctacctttcacgaaagtcgattggataggggagatcaacttatgcaacaccttacgaatcctattcgacagcagcttcgaaatgatcttgtaagaagtgttacactgactaataggccgataatcatcaaaggtggccgcattggaacgcttagggatcagcacaataaaagtacgattcaactcggccacgaaccttcctgtgcgaaagaattcctgcacagtattcaccacttcacctccaacaatatcccagtaatttttgaagaatttacctggacaaccgtcagggccaggggatttgagagggggaatttcccacacaactttcttgatctcctcagaagaaggaagagcccgaagagtctgattctccgcttcactcaccgggttagggaacatagaggacaaatcatcaggaattaaaggcaaagaagattcaaaaacctgatcaaactttctgcggatatgctcatcaatcgaacgtctatcatccacgaattcaccctgatcatttctcataacccatatgaagttgcgtttttgccgaatcaccatcgaggcatgaaaaaatttagaatttctatccccttcattcagccagagctccctcgattgttgacgccaaattgaattttgtctcgcttctatctcctccatctctaggagaatagcttcttccagcttcgcattctcatgggacgggcttttcttttgaatctcccgaaagacattttccagcatattcagtttcaccttgcaaaagccgaagtattcgacattccattttttcagcgcgatcgcggtagaagccaatttctttgacagaataaagctatgatatccattaatagtcgtggcccaagcatccctcaccacctgatggcacttctcatcccgagaccaagcatcaatataacggaaaggcacccgtatattatctctatctctcatcgtgtcgagaacaatggtcgagtgatccgagtgtctagttgcaagagttttaattccggccttcttaaaatgaattacccaatcagcagaacccagagcccggtcaagtctttctctaatgagagtttgccacttttggccattagtccaggtaaagaaagcaccacattatgtacctgttgctttcacaattttacgatcgtagttttgtgaaatttattattctgcctaatgtttattcaacttatttaactgatttttgatttgaataaaactagttttcttcaaaaaaaaaaaaaatctataacaaaaagttaatacaccttttaaatatatagatctaaaatccacattttgagtgagtacattgtgag

SEQ ID NO: 30427 - DNA, 5485 bp, Cannabis sativa
tattggaggttgtcttttttctttggccaggccgtcgatcttcattgggcttaggtgcgacttggttggggttgtattttgcaattgcaattcgatttttgctactgcgattagtattgtctctatgacatagttttgagtattttagtcttgtctctgtgacatagttatgagatttttcgctttgtcttttgtgacatgattttgagtgttttagtcttgtctgtgtgacatgcttttgttttgttttattgttggttcttctttattcttctactactcgccattaaattgttattagtggttgtaaatagcaagttctctgcaactgaagtggttgttagtagtgcatctacgtaccttacacaatagttcagtgcacaagctacaaagttaaatgaacttgttgaaatagtttctactattgtgtcttctaggcggtggataaaacagaatatatgtgttcttaaagttaattgtgatgcagcaattttttttatttaagttgattttaatttttttgtaaattaaactactgattatttaaataattgttataaaacatacccttgattgtaatccaccctctaaaaatttctctacatgtcaagtcgagcgtccgtacgtccgtctatactttgtttgtgtctaaataagcaataaaaaccagttcaaataataaaaaaaaaaatgcaataaaaagtccccacccaaacattcaccgtcacaaatacacgtggcgtgaattcattcgtaaccgtattaatcgtaaaaaataacaaatccaaatacactatagaatatgcgaacctaaccggagagactgtgacttatttctttcttctcacagaaaaactcctcttccctacatgtttctctctctaccagattattaattctatttctatacttgtcttcccccaatcatcttcctcattctctctcctaatcttttgtttctatttttattttatttttatcattttttttttctaaaaacaaaaattcatttcaatatttttaaaattcatttgattaataccaaaacacaatttctttgttctccttctcctccctcgtgttatacaaagatacttatcgctcttttgggtcttttcttttgattttgtaatctcttttagagattagggttagggtttcgtctggttcctgaattcgatcgatctacttgatagtaatttatatatataaagaaagggaagatattatgggtgccgagggtgattcaagcgatcctaaggtcagtggcggtgattcttctggtggtgaaggaggagaatcagtggcggtcaacgttcgctgttcgaatggcaccaagtttacgctgaggacgagccttgaatcaacggttgaatcattcaaagcattgttggctcagaattgtgacgttcctgctgatcagcagaggttgatctacaaaggtcgcatcttgaaggacgatcaaaccctgcaaagttatggtaagggttcttttctttaaatttgattcttggttcgtttttatgttttcggtgaatgtagattttttatggtttttatcaaccctgttttagtctctgaagcatataatttcaatgattctgtctcgaattagtgatgaacagttttctttttggtgtatgagtttttgggtttccatcgtgaaactactttggatgcttattgggtgtttcttgggaatttaattgacatttgttggatgttgatgcatctgcttgtatgatgcgtgctcttttatggagatgcctatggtggatttaataataattgcatcccctctgttaaagaatataagtcttgaacttgatgtattcagtctgtatcaaagtttgtgttagttccatgggaatggtggcgtttttttttcttttgaggaattttcggtgcactcattctaatggcttgttattttccgttttctaaggtttggccgcagatcacacagttcacatggttcgtgggttttcccctgcttcatctacacctcctgcgcccgctaattctgaaactacgggtcctaatactacacctggtgttacacgaggtgttggttcaactgaaggtgtggggcttgaaagtgctggactaggggcttctttattccctggactgggtttaaatgctcttggcggtggcggcggtggtggcggtggagctggtttgtttggagccgggcttcctgaatttgaacaagtacagcaacaactgacccaaaacccaaatatgatgagggaaataatgaacatgcctgccattcaaagccttatgaataacccagacttaatgcgaagtttgattatgagcaatccacagatgcgtgagataattgatagaaatcctgagcttgctcatatacttaacgatcccagcattctccgtcagacattagaagctgcaaggaatcctgagctcatgcgtgagatgatgagaaacactgatagagcaatgagtaacattgaatcatctcctgagggttttaatatgcttaggcgtatgtatgagaatgttcaagaaccatttcttaatgctaccacaatgactggaaacagtggaaatgatttaggttcaaatccatttgctgctcttttggggaaccagggagcacaagtcagggatgggtctaacaatccttcaaccactgatgctgatgcgactacaggacatgctgcgccgaatacaaacccgcttcctaacccttggagcagcactggtggtaagcttctccaatcatagttttttttcttttttttttttttgaaaaaatcatagtttttttcttcaaaattatatttatttgatgttactgccgttaactcaatcttaaattatgcaacataattggatagggagtaagcgcacaagtgtttttcctaacacccgctgctgtactagtgttcatattaagaattttgttaccaatacttgttttcttgtgatttaacgagtattcattataggagttgatgttcccttttctagctgcttctaaatgcattattgctttttattcttcctcaatttgtgtttgatgtcaatttccttttgtgaactttcaggagggacccagacaaacactaccagaccaaatcgagctggggaagcaaggacacctaatgttgctggtctgggagggcttggtctccccaatatggagcagatgctctctggcggcatgccagacactactcaaatgaatcaacttttgcaaaacccagctatatctcagatgatgcaaagcttgctttccaatcctcaatatatgaatcaggtatgagcattatagattttgtttccttcatatttctttgttgttttttcatccttgtattcaaattgttctttaaattgtagatgctgaaccttaatccacaactgcgtggcatggttgatgtgaaccctcaacttagagagatgatgcagaatccagaaatactgcgccagctaacaaaccctgagacaatgcaggtatatcgctattttggaagctgaagaactgtatccatgaaactgatttgtatattgtgtatctaaaattgtgtgtgctccctaaatattcatgcatgcatgcctccttgaggccacaaaacttgcttctttgtatgtttacatattgtaggaattgaagcatgcttgcctttgtgtctgtcttttctttctgattctacagagttgatagtattttaatttgtagaaccactgtggttggcttattttcttttcttctttttctgattgtgtattgtagcaaatgctcactctacagcagtcacttctttctcagctcaatcgacaacaatcaacccagtaagttcaaatgcatttttctttcctggtagctgataattgaactgttatttgttatgcatttcatgaaattcaatttgtttatacagtatttatatctgttgcttctttatctgataatatgcagcataagttttctggataatttatgaagacgaatgtgtcactgtggttggcttattttcttagagtgaatgaattgacttgctgtctgatgtgtgtctggatacagcatattgaagctttatatagtaaatatttaaagtgtttccgttctctttggcaccatgttgactgattaagtttcttaatcaaaactaattcactctaagaagttgaagcattaggtttcctcccgatcccaccgcccaccttctttttctggatgaagcaattatggtgttttcttatgagtaactgtgtatttaattaagtgcacttggagtttctaattttctaatttctgtttttaaattagtgttgaccatcatttgttgataaattctttaatatcatttctcatcgtgttgtgtgtaccctctcagggattcaggtcagactggtgcaactacaggtattcaaaacttaaattaagttgattttttttttcgttacagccttcaatttcaactttgactgatattgttgaatgtattaggaacacctaataacaatggactggaactactgatgaacatgtttggtggtcttggagctggcagctttgcagcaccaaccaatccagatggttagaacttcccaatttatctctaatttttccctcatttcttcaatggaaaattacttagtacttaccttgggtaaaattataatctttgtttgtagttccacctgaagagctttatgcaactcaactatcacagcttcaagaaatgggtttctttgacactcaagagaacatcagggcattgcgtgccacgtctgggaatgtccatgcagctgtggagcggcttttaggaaatcccgggcagtagacataacctgatttgatttgtgtctctttctttagttggacatttcttgtggacatgtaaaacacagacacgatttggactttaggttcttgcaaatgatgcgagagaaatttacgaggagcagctgtagatttcattttgggcgtgtgaataagcaagtacacaccatgatagagctgtgaacttgtggatatataagcatatatgcgtcaacattacaggacttctctcttctcccaccctcactctatatatcgctctcgcatatgtacattttaattacatcttttttaattttttttttcttttttaagtattgttttggtaaaatgttatctgcttattcaatgagaaatacgaaaaagaagaaaagaaaaacattactgtttcggtccatctgcgtttccctttataatagtcgagtattgtatggttggttggttgctggaaatttcaggtctctagggctacgtttggtaggaaccacaaatatagactaaatcttttttagctttgttacctacatattgattcatcccaaacgtagcctaaatgaaaagggattcaactacatcaatcttgcttatcaccacaatacgtgtggccattgcgtattagtttatgactttgtgagaattttaatttcttattcatttggttaatta

SEQ ID NO: 30428 - DNA, 2225 bp, Cannabis sativa
tacaagttgtcactaatttagtattagtcacaacaagtattgtgattaaaaatacatttagtcacgataaattttaatttttgtgactaatacttttagctacagacattttagtcgcaattgaagaatgataatttataattagtcacaatttttttacttttagtcacaaattttgttgtgactaaatgtaagattttttgtagtgagaataaggtgtcaattccactattcctgcatcgtcaatagtggaaggatcgatgatgatgacacattgtggatcgacaatgatggcgaagagatgagaggtcggtggtggagtgttaattttgctcgtttcaattagtggcgcatttccagaccaaattgacggagtttggtttcgtgagttttgtatgacataattaatttataaatatgttatttactctttgtatttatttatttttttttattaccatatataattttattattataattttaatacctatatcttattcttacaaaaatgaactagtttattttattttactaatatgaagtcaaacttttgatttaattatataacaaatcatatattctatttttattttcattgttattatattgtcataattatttgtatttttctaaaatttaagcttttaagttaggatttgtatttataaagttaggccaattaattataattaactttttaggtttttaattagcctttaatattttatatacactttattagcattttaatatttttttacttttatattagcttttaaaacatttttttcaattagtaatttaatttggatttattttaattatattaattcattaaatttatattaatttaaatttaccactcatactctatggcttttataatctatttctaatttataattttattaatacaatataggtttagtatatattaatatttaattgtaattataacgtgtttaatattgaatatttatcttatttataccttatatagagtttgttgtgcgtttttaattgtaagatttttaatattgctatgtattcattttaggtttttacgtgataaaagtcaaattgattaagtttgtttgtgtaatatcctcttttcctaatttttttatttttatatgatagttatatttagagattattaatgttgtttagacaattcaaatttgtgagattattaatacttacttcaaatattttttttttacttttattagtactttattagctttatttttgcaccatttttttgatagtttagatgccttttatggcttttgtgtcatctttaaggcttgtctctatttgtttagggtagatttgtagtatggtcaatgggtaagagaaaggtttcatatttagtattcatggcttcttcaaacgacttttgagatgtgacagataagtgtttgaagtcttgacattattatatgaattgtattgtaatttttattcacattacattttttttcattaaattgtgtggtaatagattttattgttgctttgtaactcgatttttgtggaggacctactattacagagactttgctgataagtttttaaatataatttatttgagagttattatctttttactattgagattttgtctttttagtttttaatataatcgttaggggttactctacttttctttatcctttttattttgtagacattttgtggagcatttgatatgtaaatgagttgtcgtgtagttttcaatgttacaagttgaagctttagctattttggtgtgttgtttgaggacgttagttttattgtctaaatttttggaggtagtttgtctcatgttgctcgcttattttagcagttcatggtttgacaagcatgcccttcggttagacgatgaactatattgctttgaggagattcctgcgcaatatgttaatatctgcatcatatattcatgagtgattctaatcactacgtcaaaaaaatataaatatctagatatattttgtagtattaataaatttcttttagatttgcatttactacctaatacaaaaaggacttcaatgtgcctaagtttaattattatgttagtactgttaatttggcgatacctatactctaagtctctaacaaatctttgtgttctagaaattaagtttcaactattttttgatataaatgatacattaatggttttaattatgctttgatattaagtttttttt

SEQ ID NO: 30429 - DNA, 2638 bp, Cannabis sativa
tttttttttttaaaagaaataatttttagaaactttccataaaaaggttattggattattaccttattaatttttttagttcccatcaatgggtattacccgttccatatatatatatttatatataaattgaaagattttaaatggcccattttacattacaaaagattaggtaatttaaccaccaatccagcttcttatgaacgattaaattcctaaaattttgagtaggaagaacgagaaatgggggtagctgcccagttaaaaagtgaaaagaaaaaacttcaaggcatagcatggtgttcgaacgagacagcaaaaagaccttcaccctcagataggttggccttttggtacaattagatcttttagccacatgtaaataggcaccagcacatagtacatccctgccaaggaccccaacaagaagcgtagaaagaacacaaatggatttactggcttttcttcttcttctactttcggaccaagctgcaataaacaacaaatcttcatcaaaaaaccacaccacttattggtaagagagaaacaaggcacaaggcaccagacttttggaaagaaataaaaatgaattgatttacacacaacctgttttctagtgatgaaagatacaccactattttcttgtgtatatacatacacaagtgactatattattatatattagtattaaacagaaggtaaaacaagccactttgaatatcatggagaagcaaataagatagcataagcctctgtaacgtttccacgaaacaacattggctatgttatttatactaatgatttaacaaggtatggaaagagaatcaatatcattcatagtgtcaattaaggttagcgttgccatgagacatttcatgaacagaggtactaggttagctctaattgctttgtgaaaagaatgagcatgttaatttggagctgcaaacagagaaaatcatgaaacaaaggaattctaatattaacgaataaagcaacgaatacctgaagaggagaatctccggatgcaggtttaacacctgtaacagaacatcccatgatcaaaccatggcggcgaaccccacgataccactttgggccaatccttttcagttgcacatccttaaaacctgccttttggaaccaatcaatatactcttcctcctttggaaagagcatccacacatcagcaaagaagcgagataaccagaatgttggatacacaggaccaatcaagcatgcttttcctccaagtttcaagaccctgtatgcttctttgattccacgctgtgggtctggccaatactcaatactgaagaaaatacaattttgttaacccccagcattagggataccaccacaatggtcagtttctaaacggaaaaagattacacatatctacaatataaatagaatgatattttaactcaagtacatcactacacaaacatgataagggtttgatgataaatttgagagaagatgttatccaaaaagttttgagatgtaccttcctgcagatacatatctatcagcataatcagtacggaagggtaagtcctcagcatccccctcaataatcttgcactccttcaagggctccttctgcttagccttagcaagctgatgaggtgactggtccaaaatggtcacatttttggcatccacatgcttaactatacccaaagtagtgaaaccagtcccaccaccaacatctacgacaatcatattcctgttgttcaaatctgctggctcaagtgcgtcatctctcatgtcctcagtccaatggccagggtttataacatggtcatacacaatcgagagaaacctatagaaccaaaacgcctctttcttgttctgaatgaacctaggttgtgaagctggcctagaagctgaaaggctgcatttgggcacaatggctctggtaccagatttggagattctagtactacaaaccaaacccagcttgggaaaatgtttcccatgaaaatctgaaccccgaaaacccaatccatttggggttattcctcttagcagagtgaggttctcggctccattaagcatcgcagacgccataatttggaaaaacaaagatcacccacaaaaggaaaatggaatatctcaactgggtctctcaatgatttgaagattacgatgaaaacccaatactcgaacttagtggttcttcaaaataaataaatgaaaaaaaaaataaacgatttgtgaatactcaatagcctcagcaggcttaaaatgaaaagtgcgaactttggcttaccagtttgaactttgaagtcggcggtgtatattggcactggcaccacaggatttggccggatgatacgaacagaccaaagatggttgtgagaagtgactaccacaaaccaagtggtcagtgttctgcctacgtttcacaaaatattgtggtggtagcgttgtgctattgctactgctacacgtggtggaatctcatatttttgtacgtttctattgaattaagccaataataatgctacatattattttagtctaggattaggattccttttgagaaatgttctatctctaccactgaaaattagttccttaatcatcgttttagataagggacaccggatttaattgacaaaggggtaattag

SEQ ID NO: 30430 - DNA, 1324 bp, Cannabis sativa
gttgcttttttttctcacagcacaactgcaactgctgatttttcccacagcacagctgtaccaaactggccctaagactattacaactttaagtaaaatattacaaaatattaaatgagattaaataaactgtcataactgtctaaccaataatacaagtaaataaaaaaattaaaagaagacaagaataacaacacaatatatactcaaaatacatgtaaatataaacaatataagagcacatacatatataaaagagtatatatataagggtgcactattaattggcataattagaaaattttgagtttctatgcataatttttatatctaattaaaaaaaatctcatttttccattacatgtgttaacctcaaaaaatgatcaactgacagcggggtcgtatagatctgatgattgccacgtgtaatacatatagaatgaaagagtataaacacatagatttgttatagaggttcacccctttatgataacgggtaatgacctacttctctttttggttgtatagatacctagagataatactattcagatcactataggtgggatctaatatagctctctataaggatacaaaacataaatcagtaggcagatctctaatgagagagtggcgtatgagagagatgaagagaggaggccctattggatttgtagcagagagaaagagaaagagagactataggggagtgattttgaggcttaatgacttaggttttcggcctttatataggaagcctaaaatcttaatttacgacaaaacccatacatatacatattaaattgattaaatacaaaatactaaactgcccctcaaaagtagatattttccatcagtttgttgggctgtaacaggcccaatctgtaggtagcttattgtacacattttgggctgtacatagagtcatgcttggttaatcctggccacccatagacctacaggggaggtctggctggccatggtgtcaatcctagccagccatggtcctgccaagacctggcacatcatgtgcttactaggatcctgaaggtattatggctttaccaagaggaggccaaccttttgtaagttgaggatagctttgtacacggtttccttttagaggccaggtttccttggtcgaacgaaagctctcttggtccggaagtcacttttttagccggccagcttctgcccagatcctggccaacctataaccttctcttggccagccaaggatgttgggatagccccttaatggctcaatttactcctttcaattgcaacttgacagtttcgttatatcttgcatggagaccatgtg

SEQ ID NO: 30431 - DNA, 1211 bp, Cannabis sativa
taagaattttagtagtaatacttcattaaactataatagccaaatgggctaatatacaagaatgtaccatagtagcaacaatgctgccattaaacaaacaataagaccaataacaaagactgcgagcaaaaccataaacgattttgttagcaaactgtttaacaaaagaaacacagacattaaccaaacaagataatatttatttacactcaaaaattaaaagaccaaaaacgagggcataaaaattgaactttgaatggcttgaaccaaaacaagtgaatcagtttcaataattacatttgaccacccttcacatttgatccagcttaatgtctccttgacaccaactactttagtaaagactggttgaacatggcctcccttatacacaacaaaaccctccaacaactcaccatttgaatcttgagccaagacactagccccgtatgcaccagcttcagccaaaattgctttgtctacattgattttgatcagattcacctctggtttagaccaatgctctcgctactactggtaccattagaaaccaacaatgacttagaacgatgagcttgagcgtatttccattgagcaagaaccgaacaagccccagaccaatgatggatgtttaatttgcaaagctcataatcttatctcatggggtaaatagatttttaaaataaattttattaggaagggttactttgtgttttgcactattatttattttggacctcacattttaaaaagttagcatttgaaccttatattttgtaaaaagattaaatgtaagtttttagactcgattttttttttttttttttatgaatcaggaatttcattacacaataaccttttttgttacaacctatggctcttcaaagagcaaacaactatacatcttattgtaaaaaacaaaaaactcttataaattttgaaaccattctaattctttttgatctatacattttggcattacacaagtaattttattttttatcagccatttagtttcttgcaagagtgcttgcggttgtgtagtctcctgggaccataacatttgattcctggattgccaaatcttgtaaaccaaggcaacaatgcaagctgtgtaacaatttgccttgaatttgctcagttttgctcgatcaatctatctcaaaatactcggcagggattcagctttgatcttccagtgcagccatgttttt

SEQ ID NO: 30432 - DNA, 2159 bp, Cannabis sativa
  modified_base (1516)..(1521): a, c, t, g, unknown or other
cttatggagggtgatcataatgtgatgatgagaaagaaagtgaaagagatgagtgatattgccaagaaatctattgagaaaggtggatcctcatttgatgctattcgaaaatttatcaataatattataggaagcaactagtgttaattactgtcttgttaatgtgcttatttttatttttgatttcaatgttacgcatgctcatttatgttgtttctttcattttattaacaaacaaatgttatcaattaagtttggatattttataaatatattttcttaacggattaaattttatacctttccgttattactataattctcttaaatataacagaattatcagatctcattcttccttgttcgtcttcttcttcttcccgatctggagtctccctaagtgatggctctcttcatggcagtgatcaactaacgggaaggaagagagtcgcgggggcgagtgggatcagctcgatagttcttagtcgtttctatacgtgcaagaaaacgctgttcttcgacgagatccacggtggttcgccattaaagccagtggagaagaaaaatgacagagagaaagggtcgactgacctggaaatgtctctgcaagagagagaagcaagcttttgcgcacatctctggctcgagatctctgatttgctatttatttatttattttcattcttatttatcagtgaaattagagttttttttattttttttcatacttttgatgtcaaaatttggatcaccgttagttagagtgttgaataaaattaaaagaaccttgtacctgtgacatatgtagccatgtggaggtgttttcctcttcattaatgctcgacccaaaaaaaaaaacagaaattatatatatattgtatatcagtttaatttaattgttttaatttttatttttatattttgatgttctcattagatcgtttagaatcaatatatcaatataggagatgtatgaaacagataaggcattttaaaatcactttagctctatctttttttttttttgagaaaatcacagttattataaattaagacactttagctctatctttaattctctcttttttaattttttattaggttttaaatatttattatttattttttcatattttttattattttattattattaattatattatttaataaatttgttttttttaaaaaaaaaaaacgtggtgtttgttttataaaaaaattaatatatttatatatataaatatagatcattatttattttgattttttttttttaagtttttaccattcttatttaatatttcataatatatattgttgcaacaaatcacaataggaatttttgtatttcatttacatgattttgtagacttttaaattttaaaaaaaaaaaattaactaaatatagcttcaatacctcatttttttttcttaattattctcttatcttttactttttttattacttttaataaaaaaaatctccaattaagttaataataataataataannnnnntaataataataataataatccatccatcaatatctatatatatataaaggaaaaatatgagacggtaatgtgacggtctaaaatctctccaaagctatttttttctcctcaattctctcaattttttaatgttttattagagcataaatttacaaattaatattttactattattttaataaatatttatatctttatctatcgtatagcattctattttctattttaaaaaatttaaatatctattaattcttaacacacaaccttaatatataccgtgtcattctgacaattataaataaactataaaataacttaaaaaacagttcattatttttcactgaagaggtatttttgtaaataaaaaaattgaaagcaataaaaaaaaaaaataaaaaatcgtgtcaatgtatttttgtaaatttgttcaaacctttagtctactatgtaaatttttcacttttttatgactttaatagcaaatttcacttaaaaaaataataattaataaaagtcctaagtttaaaactcccaccctaatatattaaaaaaactaagaaaaaaattatttttgaatttcggtgaggaaacaaaaaagtaaagtaaatgttaggaaaaaaattgtgaaaaaaaaaaaa

SEQ ID NO: 30433 - DNA, 1781 bp, Cannabis sativa
taaaagttaatatcacatataattttacataaaaatgttgcataaaatataatttaatataatactatacaatacaatatggtgtaatacgacgtaccaaacgaattatgttttattatataatatatcacaatttttactctaagttatatgaattttcaaaaaaaaaaaaattataacacctttattgataaaagattatcctttgataaatacacttcaacataaacatgcattaatttgaagaaaaaaaaaaagagaggtgggaaaaagaacaacaaattaaaattgagttcctctgttttattttgcttaatcataacaattaggtactaatagtcaagcctaattagttatcagcaggatacttaaacaatgggagagaacgattaacaacagtgaaacctccatcaacaacgaggttaagcccactcacgtaccgtccttcctcactcgccaaaaacaaggctgcattagcaatatcctctgccttaagcgttgcatgatttaggttcccaaccgagttaaacataccctcaacctcctcttcactaacaccaatagtgtccacaaccaagggtgtcgcaaccccaaatggcgacacacaattcacccttattccaaactgtcccaattcggaagcagcgctctttgtcagcccaactaccgcgtgcttggaggtagtgtaggcgtgcgtgcctatgccgcctatgcacgaggcagcactagcagtcgatatgatgctaccgccacttttagcggtgatcatggcatgagcagcgtgcttaatgccaagaaagacaccggtgacattgacgcgcatcacgcgctcaaaatcatcgatgttgttatcgatgatcctaggctggagagtagtagacatgccagcgttgttgaacattatgtctaattttccgtaggacttaatggatttttcaactgctgctttgacttgagattcatcggatacgtcgcaatggacgtaagtgatgttgttttgggctgtgttggctgcaattgattggcgaactgaatggcctaactcgtcttggacatcggctatgactactttggctccatggtgggcaaagacttcggcagttttcttaccaagcccactggctcctcccgtgatcaaagctaccttgccttctaacctaataatatatattttaaacacattatgcttaatttattaggtgttcaaagttgactattatagtcattgataaatacacaaaataatacatcaaatagtcacaatttttcttttatcaagtaacgtccacattaatattgcttttgagtaccaaaagtagattttaaaagcccaaccaagtaagatcatataaatctataagtattaaatcatatattccaaattagaattgacacaaaaaatgcatatgaaattaagcatgatttaacattattattatgcaaacacataccttcttgagattgctgagagtagtgaagggattgccattatgtttcgacaggagatgacaaaagattttatacaagtgtctggtttttgatgttaatgttctgatcgatgatttgttccaatgtgtggatacgtactatatagatatatttacatatttttataatataaaaatagtcattggtcaaatacagaaatgtcagatctggtggctaatataaataataattatagacagatagttgattctatagccagtttaccaaatggtatatgggtccatatagtaatcttgtacaggttgcatttgctgctcacactacaaaaatca

SEQ ID NO: 30434 - DNA, 2818 bp, Cannabis sativa
agtgagttctggggaggtaatcattacattgaccaagatctcctttaaattctctataaaactcatccttgacctcgtgcacactcgtctttgtccagtgaaagcttttctacttcaagctttgattattgggaagttagcagtgatcactttgaatctccaaagccggtggtgcaacaacatcagtatcctcgccagataagtggagaaggatacagtcaattcatctgagaattgaacaagagttggagacgctatctccctacttcgtggacgcatagggtctaacttggtgttgttgatacattgccagagaggcgaccaacacctttggctagacatactgccttagcagagattgtcgttactgttgcaagacacacttctgagttgaaacaaccgtccaagcataaagggatgacaaacactaaacaaacactgaggaaatctttagagttcgatccctactttgctcgactatttacaatggctggtgcagagcaagctaggcctccgaatgaagatgttgaagtcgtttctagggacgtcgagctccaagaaattgaagactagggtgaggtccatcttgcaagtccttctgacggagtggaagaggaagaaaaagaagaggaagaaggagttcaagttccttcttccttttggtatttacaagaaggtcggagagtctgtctccgagttgggcgatgttttagtggtgggccaagattatgtcgaggaggagtgtgaggaggcctggcctttaaccaccaaaggaaaaaagggtccttggtgggtctctccttcgtccatacttacttacaagagattgacaaatgttttcaacgagggtctcctcgagggagtagagactttcttaccccatcttgggcagctggcaacaaacccaggagaagggttatgcgcatggtctggccccatgccaaataaggtgcaatctttcccttgcatctgtacttcaagaaaatggccaactactacaagatcttcccgacccaactcacttctaagggcattaagtatttggtcgtgttgttcgtgttgtacgccacacagggatggggccagccttccgctcatgataccaactggctttttgacttgaatttaagtccaaagtagaacagatcgagatatttttatttctcccaaaatgaatactagtggctgagcggtactacggacaaggaggtgtccaagatcggtgatttcctcgatgattattatattgtcaaaaacatggatactgaccacatttctttctgcaaatcccctcctactgtcatccttctttcaccttaggattaaggtcaagagcccaggcgattcttaaattgtcagattcatctcgaaatatctcccttctagctaccacatctaattttctttagtacaggctttactcgtccgaggaggcttgagaatccgaacaagtagttgaggagattatcattgagtaggaggtgcaaaaggagaagacaaagctcaagaggcatcaagagccagttgaacagcctattcgaatcagtgatgatcccaaagtggctgtccattatatgatcccatcaatagggagggatattcgtggtagtggaagatgatggggactcttctaataaggatgctctatcttttcttgttcgagagggtgctccccccgaagttcagggtagtcactactttacttagatttatttattcttatttgttcaaatatttaaaaggtattttcttctatgtagccatgtaagagaagatgaaagacactcttagaaagaggattggtgatgcatccgaccaaaaatacaatcaaaggtggaagtttctcttcctacaagcatttctctaagctccaagacacccaagtagaagttgagaggactcagcgactgtcgtcgtagacattcctgaatcctgataactctatggtatagagttatttttagtgcctttaaactgaaattattgtgaaaagagtagtgaaagtgtgtttgttatttaactttaattagtttctagcttcactttgtaaataataagttagctttgaagtcttttaaaaattgtattgttagttgtgttatttctagttaaatgtgcttgtttgttgttgaaaaagaagaatcaagttgttaggaaaaaagaaaggaggcaaggatgaagtgggaacaaaagctgaaattgggccaaatagctgaagcaatgctaaagcgaattcagcatcctgggcagtgacgtggaaagacttgggaacacggatttttgctgtccacatcagcaggagcgtgtttgttactaaaaatcagaccagctggaggttgtgtaggaggaggactaaacctagtgggccaaagcgcaaaaggattgggattctatttttagggtgtgatttttgtacccttttgacccaacaacaaagaaaaagatagccaagtacaccaccatcttgaatctaacgtgagcagttgcaattttttggaaggagaagtaaatgcagaaggaaagtacaacagaggaaggaagagagggggaccaagcttttgtgtttgatttttcttttaccctctcttaatatttttctttctctttctcttttcttgttgcttgtacttagttattaaaaactttgttgaactgtaaaacccggcagcagccatggaagatagctttttaacttggattttagttttttgatttaaatatgggctagactttcgaggcttgaatgactatgaacttctatgttgggtatgattaatttttaagcttactttaacatttttgcctttgttcattcaag

SEQ ID NO: 30435 - DNA, 1261 bp, Cannabis sativa
tgcagctttaaggtgctccagttcattttcattgttaagttctgcactcaaaagcattgcacacactgaaaatcatacattatagtagaaacaaaaataatgaaatttaattaataacattaactcaagcttaattagaattcattataaacctgagaaaaccagcttccgaggagaaccaccacttgttcttcttcttcttcgttccttgaatcttactgaaaataagtaattaaaaattgacgataaatcaatgaagatgaagtcaataaattttattagtgttgataacgaaccttgccgaagaaacctccgacgcaacacatcattgaatcgacgatcggagccatctgtgactgatttaggactcattttccccaattgatcaaagaaatagcacttgcaagcggcactttgcggaaacaaatcgcattgcgatacatctgaaaccaaacaaatttgaaaattaaaaataacgaaaaaaacagatagagaggaaaaatagtatgaatatgaccttctgctagtctgagatcttctctgagtctcaaaagctcttgctttcgctccttcgcctatatctccaccattgcagtagctcaatcaggctctttcagcctcaaaattaaaagagagcaaaaaagaaaccgaaaagaaagatgtgtccgcagttgataaaggtattttaaactatcttggatcgaatccggtgtcagtatttcacatttcggaaatgaaatcggagataatgaaacagtaggaagaagattcctaattaataagtttcgtggactttctcactaaccaaacaggacagagactaaaaagtaaaagtattgatttcgaaagaaataaacctttcgcttccatcggagaacgtcggagtcagaagcggaaggattaggcggctgattttggggaaagaacttggatcggagaagagaaatggctaacgccattctcagcttcggatcgtcccgccctgtattatctcccacttcactttcacttgccatttttctctctctaaagaaagatatagcgggaaattataacgtctattttatgtatttatactttccaacaaaccttttgatgattgctcaacgaaacgacatgcttgtttcttctttaggtgttgtcgttatactgaaatggtccaatgaacattttctttgtcgtttaagtgctaatatgaaactccgtttgtcgtttaagcataaaacgcaaaatctttaacatgattatatcaattacaaat

SEQ ID NO: 30436 - DNA, 2732 bp, Cannabis sativa
tatatacaattttcttcttcaaaattctagtgaggattttccatatatatatatattaaagtactaattttggcatgaaaaaaaacctctgaaaaactatctatatatataaaaaaatgatatatgagttaagtgaaaaaatgatggatggtatatatatatatatatatataaggatttgttgaagaagaagaagaagagaggaaagcttttggctatggatgatgggagagagaaggagggtaggtatattatatagtgatatatatatattagagagagaagagaggaaagaagggttgggatgatgtgtacatataatgtaattatatataaatagttgtatgtacatatatagggtttagtactatatactctaactctactctactatgtatatatagtccttttattactagttaattactacacattcaactctctctctctctctctctctctctctttctttaatttttgattaaaccttaaagaatgaaaaaggaaaaggtaaccaaatagtaaccttaattatatacaatcatgaaaaaccatttgatattatatttggagtgataagataatgatgatgagatcaaaatggtaaatacaaatgtgaaaaaaatagtaagtataaaggaatttttttgacagtggatagagacatattaaaagggttaaaaatgttaaaaacagagagaataatacaattaacgattttgttttctttctccattgattgacaactctcctactatatactaaagctaatttactactttgcccctcttttctcttttttattgaatattagtgctctctaacatattttatagatgttactttatgattatttttaagcattaagggtgtctaaaatattttataggtcagtaagtaatatttttttaaattatatgaaaatttagtacttaattatattaataataatgtaataatgaactaaacgtttatatattacaaccatattttacttaggactcgaacccaggacctttaacactcacacatccacttatagccacttgagctaacctcaagtgattaaaactaacttggaacagttgcattaattagtttcattgaatatttttacatatatatggttggaccccaaatactcaattcttgtctattattacactatatatataggtctgctcaaacactctttgttgcaggaataataatattattatgtgcaacaaaaaataaataaataagtaagatatcttcatcttcatcaatcactttagttttgttatgattgaatggggaagagtaataaagagctacgtctatagctataactagcaatattatatatttatatatatatatatgtatatgaattaatggagagtagaatttcccaatatatattattgtttggcaaaaaatagcctagacatacatcatatataatatatattttcagaaaagttaattactaggtattataaatcattgctttataatttcaatgtgattatacatacattttaaaaagaagtttattaaaaaatagtctcaactattacaatgttcttcaaaaaggaaggagcattcagctcattaaacaaacaacctgacaaagaacaagactcccgagcaagacaatggacagccttattagcagatcggtaaacaaaaaaaattataacattctttaaagtaggtaaaatcaaacgacaatcctccaccaacaaaccaaagtatgaagtcatatgaactgagttgttgagtgcttacaagacaatcaacaaatctgtctcgatgatcacttcctcccaccctttcctcttaatccaacttaatgcttccttcataccaataattttagcaatttcaggcaacaccacaccaattttagactccgaaattgcttccaagagatgaccagcatgattacgcgccacacaaccaaaaccaaacatttatttagctttaaagatagcaccgtcaacatttaccttgatctttccacccattagtttgctccaaatgttgctgttagaaagtacaccagtaccaaaagaggttgttgtgttcttgtttgcaactcgccattgatcaaggaccttcttagctgactgaactactctcaacgcagtgctggttttcttttgccagaagacttcgtttcgtgtcttccaaatgctccatgaaatcattgcggcgtcgacaaccacctcagcttgattgctgtccaaaagattgaaaaaccagctgctgaaatcatccacaacagcagcaattgcagcagtcgagaggtgccagcaggcttgggcaaaacgacacccaataagcacatgaaaaatcgtctcataatagacattgcataaaggacatatgagatcgacattcacatgtttagtgctaagttgtaccttcgtaggaagacaacccgaacaagctctccacaaaaagtgaagaaccttagaagggacatcaagtttccaaagctttttccagtagctttcatcatcaagatggagccaattttctattattatatataacttttttatttagaatatatgatatatattgtagtcagttaattttttatttttaaatattaaataatttataatattcatggaaaaaataaattatcatttctggtacgcttataaaataggttatagaacatttttcttattctttttgtattttcagcatatgaataggtggtgcggtggagagag

SEQ ID NO: 30437 - DNA, 1455 bp, Cannabis sativa
  modified_base (27)..(29): a, c, t, g, unknown or other
aatcttattatattgaaatgggttttnnntagggcacaaaacccaacagggaggcctacatacaagcaccaaagaatttactctcctttttgcaacaaaaagctaagattagctgggttaaaaggggagatgacaacattgctttttttcatgccagtatcaaggataggaggaggcagaataaaatactctctattgaatccaaagagggtataaggtatgaagatccagagcaagtgaccaaagcctttctagagttttacaaaagcctcctagggaagaaaatggagaataggaagcatgttaagaaatccatcatgagccaaggaccattggtaacaagcaatcaggcagagttgttgactagagacatcactaaagaggaagtgaaaggagctttatttggtattcctagatctaaggcccctgggcaagatggctactcaagctttttcttccaggacaactgggaaactataggagaggaactttatgcagctgtggcatcctttctccaaacttgccagattcttaaagagataaactctactgtaatcactcttctcccgaagatgaaatgtccaaacacggtgagtgactatagacctattgcctgttgtaatgtcatccacaaggtagcaacaaaggtgatttgcactaggctcaaacaaatactacctaatctaattggtcagaaccagggagggtttgtttctgggagattcattgctcacaatattatatgtcaagccttaatcaggaattttgggaggaaaaccacctaaccaggatgtgtgattaagcttgacattcaaaaggcatatgatacacttgattgggattacttggaggaaatcatgcaagcttttttgtttccccatctgttcattaagctcataatgaattgtatcagaactccaagatattccttgatgcatggatactttgaggctgccagggggctaagccaaggagatcctatgtctcctttgcttttcctctttggtatggaatacttatcaagaatcgtgaagaaaagagggagcaaagaggagtttaaatactttgagagatgtaaagatctccaccttaatcacttatgttttgcagatgatgtgattcttttctgccatcgagatttcaaaagtatctattgcatgttgcaggccttgaagttggtctcttgctcttcgggattggagccgagcgcttcaaaatctgccatatactgctgtgtggtatggaagaaagagagactcaaagagtggtggacatctcaggtttttgtaagaaagagactccattaaaatatcttggcattcctatatgtgctaagagaatctcaagcaaagaatgtgaagtattggtagagaaaatgacagcaagaattagagtttggagttcgaggaatatttcatatgctagccgagctgtattaataaattcagttcttct

SEQ ID NO: 30438 - DNA, 1914 bp, Cannabis sativa
  modified_base (1730)..(1731): a, c, t, g, unknown or other
tagtagatcggcctaaatcttaagttatcgtgaactcttgttcatgttattagattctttgatttactctttaaagtttctcagaatagataattctcacaacttctgttttgtgaatctaataaggtggatggttaggaacttgatttacaatatagaatcctgactttcctaatagatcaaatattaattcccaagtgttaattctagtactgaaaaattacacgcaaatttgtgatatgatcacaaattaactaccactagagaattaatggtactaaagaaaaaaaaaagtaattagaaaaataaaacggtaatttaaccaattttaattatgagccaatacaaggagggtgaactactagtattgattataacaatggacactataagtaaacttagtaaatataattctacaataactaagagtacaattctatatttatagtggaataagaattaaattaataaatagaactattgtattgatgagactcaataaataatctaatttattggagcttactattatatgtccatggtcctcgagtcgcatttatactacattatcaagggtacagatgtgacaaaataaaagagaaatgagaaatattttgcaagtgcaaaaatttaagtaaataatattaaataaattaggaaagaatatctttgttaagacattaggtggcacctaacactgcctactacatgatgtaggccccagtgggtttaattttagatcaatttattaattcaaaagttaaatatttatttaaatttaaatttaaaagttagttgtagatatttaatgtggttgagatattctctcaaagtggttgagagattctctccatgcagttgagatattctctcgagtggttgagagattctctcatttatttaactaaatattattatttatttaaatatttaaatttgaaataatatgtataacagaattggttaggatatttacttaaatataaaattttaattaattaaacctaaataatgaatttattagttataattaattatatgagtataatcctatccatatttaagaaacttaaaaaggttattggtatgattttctctcctctcctattattgttcttgctcatgatttaagactaaaataagaacatgttattttgtgaatcttattagctcacactaatccttgagtgttgaggttgacttggaagatcacgatatgagtttcatcatcatcattttttacctagctggataggataattgaaattaatacgaaaagaaagtaagaacacttgatgggtgtcaagaggtctttttctattatcattattatttgatttaatatatatactacatcgaggatcctcagggtcggtacaatgataatcaaattaaaatactttcgttgtatacctaatttagtaccagaaaatcaatacatttggtctatgaattgaaattagaggtttgctacatgtacatgaaagacaataagatactgcctgaggttttagtgaaagacagtcaactaagagtgctcttaaacatgaaggcaaatttgagtgtcgactaaggtgaagaggtgtaacgctcgtactttttcataaattattaatttaattacaagcgttaaaatgcggaaaaactgtaatatcgcttttatttataaacataaattattttatatttgagctcagtttggacttaaaagacataataattaataaatnnaaaataattgcgacattaatttaataacacttaataaaataaatggagcgtgccctagaccaccctaagttatatggtcatcagcgagtacactgacaagcctccaaggtctcacttgccaccgactttctaagttttacaaccttaatctgcatatggtaagtttgataagggtgagctact

SEQ ID NO: 30439 - DNA, 1327 bp, Cannabis sativa
aattattttttccttattttacattttgtgcattgaaacataattataaataatggttcaaatataatataaactcaatttttttgccaaattaagcacaaattttaaatcttccattaaagatgttctaagtgtagtgtgaactagtgttagatctctggtggctaagagcaaagcatgctcaagacaaaaaatactatcccactatattttgggccataccatataattaatatttatgtcattttcgttcaaacacatgggtccctcccaatccctgcaaaactttaactacgaccaactctttcttatttaaaaggcctcacttcctaggttcataccaccataaacacaagtactcttctctaatattagctaagtacctttctcttttccactaacagtactctctttagctaataaaatcttctaggccactaacatattattaatggctcagggaagagtcagtgcaatgaccgtagcagctttggtgctgttgatggtgttggttggtcactctgagtttgctcgtgccgccacctacactgtcggcggtaccaacggttggacctttaactctgctggttggcctaagggaaagcgttttaggactggtgacacacttggtcagtatatcttatatcaagttttgtactttaattacatataagtattttacttgtatatgttttttacttagagatatactagaacggttgttccaaactaacttgacaattggtcagaaaaagtgtaaaacaagaacagatttatgtgtagcaaaagggttatcttcaaattaatctttgttttgtctaaaaattacattttttaatagttaattaggaattttactcctaaattattttgacacgtattaatcatgtcttctgaacttttaaggtcgttaaaaatgccactaaactattaagattgttggatttaaggacttttgtctaattttaataaaagagatctaacatggatgaaagttcaagagacatgatttattatatattaaaattcgagtggcatgatttggtaaataccaaagtctggagagcatggtttagtacataaacaattaataattgaaataataaaattgaatgaaattaaacaaaaatccttaaatctaacaatctcaataacgtttagaaaatttcaaaaaacatgatttggtacatattaaagtttgggggtaaaaattttaattagccttttttaattccctcaatagagttttacatttttgcccctaattctaatggatttctatctgatctgcctgcaaaattaattactcaatcactttcttaagctg

SEQ ID NO: 30440 - DNA, 1379 bp, Cannabis sativa
atacatacaaagtgatcaagttgttcttgaacaaatgatgaatcaccatgcttattaaactaggtaaactttgcccatcaaatcccatatttggtaaataagcaatcctaaaaagctttttaaatattattcattaaaaattgaggacgaacaaacccacctttctcagtattagataaaatttatttcaatctaaagaatataatgaagagagtttttttttttttgtgagtatttacaaatcaaatttctttaatacaaaataaaatagaataaagaaaataaagaaaaaaatcccttaaaataggaaaccacgcaaaattaggaaactaattaatgtgattcgatttcctatctgtcaacactccccttcaagctgaactatagatattgatgagtccaagcttgttaattaggaaatcaaacactcgttcatataccttagaattctatatacaacattaagatgtccttgacatggattatgcatatattgactgactagacgtaccacaagagcaatatcgggtcttgtctggcagaggtagataagtttccctactagctgttggtacctctctttgtcaactcgattggagtcttgctgggcttgctaccaagcattcctgtcttctctaagcgatcaagagtatatttcctttgggacatagaaatccctcttttacttctagcgaattttattcccagaaaatatctgagtgcaccaagatccttgatttcgaactcgtttgccaatatttttttgattagactaatcttttcaatatggtttctggtgacaattatgtcatccacatatacaattaatactgccattttctcttttctcgagtgtttgataaaatgagtatgatcagtctgactttgcatgaatccaagtgctttgactacttttagagagcgatcgaaccatgctcgaggagtctgttttagaccatatagagatttatttaacttgcagactttagttgtattgggagattcttcaaaactgggaggttgactcacgtacacttcttctagctcactgtttaagaaagcatttttcacatcaagttgatgcaattcccaatccaagttaactgctagtgacaacaatactctgatagtattcattttggcaactagagcgaatgtttcaatgtagtcaattccataagtttgagtaaaattcttggcaactaaccgagttttgtacctctcaatagatctgtttgcattatatttcactgtaaacactcatttgcaccctattatcttcttgtttagtggtaactccactaatattcaggttccattatgtttaagggcttttatctcttcgagaacagctgtcctccaatgaggaatactaagtg

SEQ ID NO: 30441 - DNA, 2693 bp, Cannabis sativa
aaaaagaagaaaagaaaaaaaagtttgtatttagtttttccttgattatgactcctcgaataaatgtataaaattttctattttcgttcaaaaatctcgaaaaaagctggtttgtggtactcttatggtggtttatccaaataattcataacctatctttgttttaatatttattcaaatatttgtcctaaattgatctatccatttcgagtgctcactttttaatttccaactccacgagtgatattcttagtcatgaataaatattttcaaatacctgtgaggctaatggagttgagacttctacttggtatatttttcgaaagcatttatgtgctacagtttgcagtaagaaggtttaagtttggtgcacacactcacaactctagatatattcgaggttacttgtatagttcttattggcttgtaactaacattttgcttgaaaatttgtgccattttagaatttttgacctagaaaatattttgttgatattatttttgttcgcttgaattgctagagactagcaataagctagttaggagttgtgattaaggctcaaatttatacagtttaagtcattaattatgcatataaattaatattaattaaatatttcatagttttaataataaatttatttttattgaaaatatttattttattttaatttttgtgttatttttcagttttgagcaagaaaatttaaataccaagcccaaatagcaaaaccatcagcgttgaagacatgtcatttatattgggaaaattaatttcatagttttcaagcccagagccaaactcatgtcaaaatttgtccaatatattcagggaaatttacacccattactgcctttttcattttttttttcattggtattgttgcacggtcattttaagttttatactgtttttgatttttaaatatttttggcagtatactgcctttggtaagttatattaataattgttttatgcctttacaagtgtcacgatagggttttgccacgtttttttttaaaaaggaaatcatgccaaaatttttgatttgacggttttgcagcagttgtacttttatattttttttcgaatataaaaaatgtttttataacccactcccccctcacactgttcatcttctccatttttcagtttttcttttcagtttcgagtagtgggtggtttcatccatttgaaaaaattttagttctcatcccactttctcaaacttccctctcattttcccccccattttcttatttttgtctataaataccttcatcctagcttctaatggccgttactcgttcatctccttctccggctaaagctacaaaactcacaaaacaatcacagaaaaccaaacccaaataaaaaatgggtaaaaaaaaaatataaaagacaacccacctagccccacttcccctactgctaaaagaaaagctcctgttggaccttcgaagaacactcgagggaaaaggcctcgaactgtggtggaaaactcagactcagattttgagttggaatctgaatttgtgaggtcgcctatctctatgaaggtattttattatttatcttttattgtttttgatttttttttttaaattcaatttttcaagttcatatatctaggtaattgtttgggtttgtctctgtatttgtatatgtttttcatatcttgttttattttatatatgtttttttgttgatatttgtttgttgttttgttggtgttgtttcgtttaattttagggcaagggtaaatcccctgtcaaggtgttgccatccactggtgtggctgagaaaattactgccaataggattattgaggtgtgtgatgttatattctgctctctgtattttttccttgtttttttgtttttattgttgttttcgtagtgttatatgtgtgttttagcagtgttttttattgttctgtttttaggattgggaatgcaagtacacccgatctcaattctaccattctagagtagtcacatctggttattactctgtaattggagacatcaaaagaattctaactaaaagccaactagaatttttttcaaaacctgtgtttggatattttcttcagattccagagtacattatccattaccaactgcttcattgttttctgttgagggaggttcagcagcctattgagttggagttttggttatgtgtccaaggaaaatatcttaggtttagtatcgaagagttttcgttagttaccggcttagattttcaggttgattctgatttttatcagtttaagcaagatgataatgcattggttaaatattgttttaagggttacaaaaaaattaccaagggtgctattcagactgcctttattgctgacaatctcaagagtaacgacgatcttacagtcaagttggttgtcttgtattttgtgcagtgttacttgttgggtggtcccccgggtaaagttgtttcatttgaggaaatagatgttgtcgatagtggtcgatataatgaatttggttggggcaagcattgttttgatatcactattcattctttgaagggtaagattgattatggtcttaagagggttgttcgtagtgaaaaggatggtgggtattataggttattgggttttcctttggcgattcaattctggtttttcgagtgttgcccgtacgttattgggaaactttctttgtac

SEQ ID NO: 30442 - DNA, 2044 bp, Cannabis sativa
  modified_base (931)..(950): a, c, t, g, unknown or other
taaatgaattatttattacagccaaattttgaataaatacatatatatatatatatatttaaatatataagcgtgggtaataaatacgagtatttaatatttgaactagataagaaaagagtacgagaggctcatcaatcactttaatcaataatctataacctatgctttcatttcattcattaccaaatctgctataattaatctacacatttctttatctcaaactatagtatacatatcattgttagggccgggtcttaataaattcatttaatctattattgaccgatttaactacaactgaatactatttaattgtaattatagatcggattggatgttatttttgaatattcaattgaatcatatcagatattgaattgagtgtcaaaaaattcaatacatctaatatccaatcgaactaactattattttcatttagttttaatgagtaattaaattttatgttattatacgaatatatatataaatattaatattaattattttttaacgggatggatccaattcaatctaatagatacttatttaaaatattggataaactcaaattaatagatgactaaaattaattgaatcggatcagatcgtaaaatttaacatccattaatacataattgaatcatatttagataagtctaaaaatattagatgtggtcgaataaatattttgtagcaaaaataaatcaataaataaatcataatgtaaaaccattcctctagcaaacttgtaattaaacatatactttagaaaattagatatgaactcaaagtttcaggataaatactattttggatcttatgttttataaaaattaccaattagactctctattttgttaaataataaaatgtatgttgtattttttaaaattatacaaatagatgataataataataataatannnnnnnnnnnnnnnnnnnnaataataataataaatactattttggaccctatattttgtaaaagttaccaattggatcatctgttttgttaaatgacaagatggatcttttattttataaaattttacaaataagactctgaattgattttttgtcaaaataaatttaatgataatccgatttagagatgttatgataaaattgattatattttctatatatgttcgtgttaaaaattatcttaaaggtgattatattaaaaaataaaattgttaaaaattaagcttagggtcctatttttattattttagaaaatatagtgtttattttatcatttaacaaaatagaaagtccgattagtaatttttaaaaaacacaaagactataataataataataataataataataatagtgtaacatagagacgttattattttgtaactaaaaaaggtcaattagcatttagcgcgtggattagcataaggaaagagatagtgtattcattaatataagagagtttgtcaggagaaatatgagattggatgagaatagagaaagaaataatagaattgaaggaataggatgagttctacctgctatgtattactgaattttttaatttttttattttttttactgtagagtagaatttttttcaaaaatactgtatttttttttaaaaaaaaaaaaattattatgtaagttttatattatgtactgtgttaagtttttacagttgttttactgttattttacttattttgttttgttattttacagttgttttataaaaaaatagtaattttgttaaaaattccaccacacaataaaagtataaacttttacctaaaatctaatatttttgttaaaaaaaaccccaatatatttgcccccaaacgtgaccttaaccctaaaaatttataattatatgtgtatggccaagtaattttttatagtaattataaaattaaaatatataaaatttgatatttacttcaactaattataatattatatggacctattatatggttgagcccctaattgtttaggatagtttgtttaaattttcacgtttttcggtattgaatgtataagaaaattttgaca

SEQ ID NO: 30443 - DNA, 1918 bp, Cannabis sativa
attgttgcaagaatcactggatcttatagaagagcttcgggaggagtcacaaattcatctggatgcataccaaaggaaagtggagagacactttaattctaaagtgaaaaatagaaaattctccgtagaagacctgatcttaaggagcgtctttcccgcctcacaagaccccagagtgggggtgttaggtccaaattgggaaggaccttatgagattgaaactgaaataggctctgggcctacaagcttaaacgaatggatagatcattaatcccaagagcatggaatgttgatcatctctataaatactatcaaaagttaggagttcggtatttacttccatctttaaatttttaatcaaagaggacctattgtaaaccaagaactttatgtaatatactatcctttcaagtttatgcaaagcgacaaaaaaaaattaaactatttagtcacttggggggtagtaggacataaagcattcataaataactcaaaacatattgctcacaaggctagaatgccaagaaaaaagtatatatattagaaaatagcctaaaaaaaagatagccttggggacaagctaataaaatatctcccctaatgtaaaaaagaggaagccttggggacaagcaaataagaagtctccccaacaaataaaagattgaaaattaaaaaaaaaaaaaagttatcaaaaaaggttatagataagtggcaagttaatcggctcttggaggaaggcaaggacccaaagtctcagcaagcttggcatccaactttttgttcttctcccataaacgggtcaggatgactttaggattgggtaagaaatagagtatgggctcaaattttttggacctcctgcacatgaagacaccatgctcaaaatgcttcatgcactggtcgcaagtaaccggggttgcaagagccttcttggcagctttggcggcctcttgtttggtcttctcctagaaatcacgaagctccttgagctccatagacatgctataagccttctggatatctgcttggtggagttcttcaagttttttcaccttgtcttgaagcttcttgatctcctcctgggtagtatgaaggtctgtttgagctatctttaataaatctctcgccactcacgggtctcattcctcaaagccttctctgctaagactttatccttgagagcctcctctcgcgtgtttgcctccttgagcttctttaaggcctcatcgattctgccatactcagccatatcaaatccttgatcaatcaaggtattggacaaatggccaacttcagcagcaatcttgtcaaattcacacctcaggattagcgaagtaaagaagcaaataaatgaaacaaaaatgagtaaggaattatcgaggtcatagtggtgctcacatcttggatctataaattaggttggaggaggtacaaatgaaaaatctcttggttgggaactagaccatgtcataagcaaaatggcctactatctcagaagcgaataaagccaaagaagaccccaaaaaacttgagagccagctaatcatcgggtccagaataaggtcccagacctggctacaatactcccctcgaaatggaccatcctagttctcaatcaaccattttcgtaaagcctcttcctcaacatttcctttggtttgctcatcaacaacataattatgcttggaaatcctaagctattgatgagcctcatttggatggacaggattcagcgtgatagatgggacgcctaggaaggcatgagcttcggaagggactcccgagtcctcggtgctttgagaaggagttttggctgccttgagcttcttcgaagaggtggagtcatcaacttcattcttctgcttgcattccaatggagccgactcatcctcatcctccatgcacacgacctctagat

SEQ ID NO: 30444 - DNA, 981 bp, Cannabis sativa
taatcatgaataactatatatttatgatttaatagaatctatagattaaacatataatcatgaaagtaattatgtgaaccatgcaacataaaatgattttaatcttttattaactagtaaacttgattatattgaaatatattttattttgggcataaaatcccaacactatgcatggtcacccttcagtctcttcgattgattcatcattagttatcaactttctgtcaatcaatgtgggaaatcgtgtaatgacttcacactttcccttgtttaaactcttggctttgtctttcccatgcaatttttgtggcattaactccctattaaattttttgggagaaaaattaattttcagaacctatataagtatctcactctttttcttctcatttttcacctttaaacttctttgaacttagaaaactctctcaaagtatctttgaaacttagaactcacgtaactttaaacttctcaaaccgaaagcccccacaacctaggaatcctttgacgagctcgattgatgtttgctaaaggattgccattgcctagtagattagtgctactctagcgaagtcttcatagtaggtgagttcaaaaaacttttctttctttttcaagttttttagttctgcctttgttgagtttcaagcttttgagcttctcaattttcatgctttagagtagtctttatacaacgtgatccatgcaataactttaggatgtagaatgcatgaattttaaagattgaatcttgcactttgttttgacattttgaactttgaggtttgaagatcacaaagaattgaacttcaaatgtataaataagactatttgattcgattagggaccttgcctggtactttgggtctgttagagaccctgctcagttgtttagatccatatagaaactttgtttggttcttatggaaccacttttaagctggccggttcttgtagaaccaattttaaactagtcg

SEQ ID NO: 30445 - DNA, 2127 bp, Cannabis sativa
tttttttaattttgaaaataattataaattatttatataacacagtctatatcgtatatatttgttagagtattcttatattctacatttttttttttttcaaaattccaatattaatataaagataaactttaaaaaatttaatgtacatatgcgtattttattttatactcacgtgaaataaattatttaaaaattattttttatactgtaaattatttttttatgtttacaaaaaaataaattgtagaataatttaaatatataattttaccatatataatattaaaatatcattagaattttaactgtccaaaattcgaaaatacaaagtaattgtatgaatattctcatttttagagttgcatatctaatcactccatatttatttgttattgtttgctaaactcttgattgagaagttttactccaaatgaaatttttaataaactatatttttccttataaaaaaggaaaaaagaaaagaaaatgattgatgttttgaaaaagaaaagtaatagtattgtttaataattgattatcatgatgatataaaattttgggtacttcaataatatagaggtgtaccgatatttaattctttttcctaatttttagtccaaatttaaggtattttataacatttttagaaaaccagaataatttacaatataaacagtaatatttaactttataagtcacacatacaaaataactccttaaattttatttttggtgtattaaatttttttttgaatttttaaaaattttacaaaatatcataaataactacaacatacacaattatatatttaaaatattattttaaatgtgttgtacactcatttttaattttaagggatgcatgcatagtagaatctttctaaaactttttccttaaaaaaaaaaaaatactaactggcatcttaatgtgccaattgccaagtattataagagtagcacatcgttattggtatattttaatatcgagtttaatacatttaaatgggtgtggtgttgggtacgctaaattcttaataaaaaaaaaaatagtgtttggtgaataatgaacacgtgatattagtacgtgtcgaggtttgagtgtaagagacaagaacgtcgacattcatggactgaggattttcagaccaaaaattatgggtgagtaattgtttacgatgaggacaactgaaacgtggcctaatattagtggttgtacatatttagatagcgacagaggattcatatcaccctttcacgaatcacgagccccatatattttcaattatgcctctctctctctctcaacaataattcatatacttgaatttaacatttttgagtgaaagggaggtccactccaaatgcttcttttctttcataattgttctaaagaaataaaaaataaaaaactttgaagaggagtgttctcctcttaactttttgttacaatctctttgataatctatacattcaaaaatatatgttggaattttttttttaattttttttttcacggcattattcgttatgcttacaacatcatccctgtaaattttttaaaatttcgaatagtttattgtaccgaaaatacgtttgaagttttttgaacacgcgtaataaattggaatatcaggaactctatttttagtactgtaaactatttagaattttttaaaaatttacaggcatgatactataactataacgaatatccgctatgaaaaaaaatttaaaaaaatatttcgatatgtgatttcggacttagaaattgactaaaaagttgtaatagactattgtaatagacagttgtaattaacacttctaaaataaatataattaaaaataaaataaaataattatttatactaacataaaataatatgaaaatgaaaaatttaatcaatttttttttttaatttttgaattaatttggtttttataatattgacatgtgtttataattttataggatatataaataatattttctaaaaaaacttgaaaaaaaacaatataataagttttttttaactcattgaaataaatcactagaaattataacataagtttcatttaaataatagaaagtggatagtataataattatatatatctttatatatt

SEQ ID NO: 30446 - DNA, 1862 bp, Cannabis sativa
tcttgctggaaacaccaaaaaccaacagcatcctctttggttctcctagcctggggtttttgaagagagagaagggaaagagagaggttctttgatttttggctttttctttcataatttcctttatttttctcaaatgaaaataagattaattgcattaatcttcgctgaaagtagaagctaggtgtcaacatctagggtagccaccaaatcactcatgtggcaaattactaaaatgtcctttcttttatcacttaggcattttcaagactgggtaaaatggtcaaaatccataatcccgctcaaccccggtactctatttccactaatatgcatcccactaagaaataaggttctagacttacctatgtgatcaaactagccatccatcgtattttccgttatcaccgaacaaaaattgtaaaaaataacataattcatatataacacaaataatacacctagagtttaataaaatttccggaattgagaaattataactctaatgcccaattctaacaatgggacccacaattaaatgaattcacaaaatactactaaaatattaataattagtgttaattgcccttactaatccatattataaaatgcggtcattacaatatacatatgtgaagttgttggtcattttcaagttgtctctaaaacatgtaagttgaagatatacagataaaataaggatttagatatgatgtataaactatgaattctcatattctagtattttgcactattctcacacttcgtgattaattattcaaaaatttattttacaaggggtagaaattttaaaatgatagaattttattgtaaatataataattgagtggcttagctgttaaaaaaaatataatagagactttaatataaaaataaaattattaatattaattactaaaaagggtcttattaaataaattaaaattaatttttttaaaaaaatagttaatcatagctaatttaattctaaaaaataaatttttacatgttggtaatctattattataggtcaacaaaaatataaccatcatggtatataactattatggttacaataaaaatataacaattgagtaattacccatatatatttatatatttgtcattgataatcaaaatccataataaaaagtatatatcatatgctttaatcatgaaaatctaatggcggtagtgaactggtaatcattgtgaattataagtgtgaagatattttcttctcgattcttagtttcatctttatttactttttaatttgttgggagatttgagaggtatgccactataatactatacttgggttatacatttttgtttttttttttcaaacttagagacaaatgtattttttatcatctaggtgtttttttttttaactttgaggcagatttgtcttttatcttttatgaattatgaagacataatcaatatttgttagaatattagtttagtttaaatttaaaagtttttttcaattattttaaagggtaaattgcggtaaaatctccaatagttttactttgcttgcaattaaccccaaaatctaaattttggcggtaaaactcccaaaactacgataccgttagcactttacaatttctattcaaatttgactgttaactgccatgacggattatacacatggatacagtgtacacctagcacaattttattagtctatgtaaataattatattaaaaaattaaaaaaaaaataaaaaagatatatatatttttttctattgtatcatgtttttttttaaaaaaattattttttcttaatgttttttttttctttgtgttttttttcattatctcatttacctctctctctctctctct

SEQ ID NO: 30447 - DNA, 1271 bp, Cannabis sativa
ttgatgtaattaaatattgagtcttgtataatttaagaaaatacgaatatcattaactaatcgtagggcgctacctatagaaagtattagactattagtgtccaataacaatcctcatttttaaattacttggcatattatgtacccttagtaattctcattaatatattttgtaatgattaagcatggataagggcataattaatggtttcatttcaggtgtctcaaaatggagtaattggaataacagtcatgagtcattggatgataccaaaatatgaaacaacagacagtcgcttggctaccttgagagctcttgatttttcaattggatggtaaatttacaatttctcccactctcctttttcttattatattagaaaaaaaaaataacaatgaatgtattctcttactaattataaataggattttggatccaatcatgatgggagactacccagaaagcatgcgatcgttagtaggaagtcgattgcccaaatttagtaaagaggaatctaccattgtaaaagggtctatagactttgttggtttaaattattatacaacaaagtacgtagaagatgcttctactaccaactcaacaattcccaatcttagttattcgactgatagccttgctataacctctagtaagtcctttataacataattatttatttatacagttatataaatatatcttatataacaaccaaaattgaaacaaaaataattaatagttaatgatgtatatatgtacaaatttctactgttagtgcttattagtgtccaattagtttatgactgttactgtattaagtgctcaaaatggtaatataatatagggatattattaataataaattatgtagtcatatttgtagaacttaaatccttaatactagtttcttcttaatttttctttttatcttatgtggtatgaacacgtagtattctattaaaattagtcttacattattaaatgtatgaatataaaatgtcatatacaaaatgaatagactatactattttcattgcctaagtggttttaagatgatatgcaccttaactttaaattctaatacattactataaaatagttaacaagagaccaacaacacacttgctaaacttttttttcttaatacttataatgtgctacatatcattacaaaagaactttggccagaattttcattataataatatttgtacttttattcatttttcttacagatgaaaaagatgggattcccatcggccaatcggta

SEQ ID NO: 30448 - DNA, 4525 bp, Cannabis sativa
cactggtcataaatatgataccaccaaggtcttgacaccacagtttgatcttaatgtgaatgcttataatagttatggcaaactctaccttagccccctttttgctctatcgattggttcgggatttgctagatttacagcaactctcactcatgtggcactctttcatggcaggtaagctgctagcttcctaccattcagactacagctctttgggataggtgtaaattcttcatcactcactagatgtttttttttatgtttggcttcctttttattagagatataataaagcagagcagatcagcaatgaagaatgcaaaattggacatccatgcaaagctaatgaaaagctataaacaagtgcctgaatggtggttccaaatcttgttagcaggaagcattgttctatcattggtgatgtcttttgtgtggaaagatgatgttcagttgccttggtggggaatgttgtttgcttttgccttagcttggattgtcactctccccattggggtcattcaagcaaccaccaaccaggttataaaagcaattttctgattttgaagaatcctttttcatcttcgtactttttttttcaattatattggtatttttatgagctattgtttttgaacctatgattcttgtggttatgctgcagcaacccggatatgatattatagcacagttcatcattggttacattctaccaggaaaacccattgcaaacttgctattcaaaatttatggacgaattagtactgttcatgccctctctttcttatctgaccttaaacttggacactacatgaagattccacctcgctgcatgtacacagctcaggtactttcatttcagaaactcagttccaactttaattgcttgcattactctctctgactcaattcttcttgtataaccagcttgtgggaactctagttgctggaacagtcaacctttcagtggcatggtggatgcttgagagcattgaaaacatatgcgacgtcgactctctccatcctgacagtccatggacttgtcctaaatatcgagtgacctttgatgcctctgtcatttggggcctaattggtccaaagaggttatttggaccggggggactgtaccgcaacttggtgtggttattcctcattggggctgtcttaccaattcctatttgggcgctgagcaaaattttcccagaaaagaaatggattcccttgataaatattccagtcatatcctacgggttcgctggaatgcctcctgcaactcccaccaacatagctagttggctggtcacgggaactatctttaacttcttcgttttcagataccacaaacgctggtggcagaaatataactatgtgctatcagcagcattggatgctggcactgctttcatggctgtcctgcttttctttgctttgcaaaatgagaaagtagaactcaagtggtggggcacctccctggaccactgccctttggccacatgcccgactgcacctggtattaaagttgatgggtgcccagttttctgagtaatcatctccattgacattgtcacagtgctgagaaagagaaaagtgggaaatggtgtagccactgagggtgagagagagagagatcttatgatacggtatttgtttaatattaaagaatagagttctcattgatgctttggtggaagaagaaactaatagtatagtttagtagttgttggagtgaaatctatgctgttgataataataatactatattgtaacgattgcatagatagttaataattagtagtcatcactctctatcatctacagagatattagactagtaaccactttcttattccagaaggtgcatctatttcaaactaaacctctctttttcccccaaaaaagtacacctatttcaactatgcatgttgacttttggggaaaatgaaatttgttactaggatttcagtgcaactatgtctaatcttactgctaattaaccctaagtcatgtccaatctaatcttgggtatcgtagagttcaaacaaatttaatgctcccgtgagtatcctgttcaagtctttcataaaataaataaatccaagaacaacgataagcatcagcgaggttgcccaaaataatttcaactctctttatgttattcctttcactacaagactaactattgccttcaccacaagtgtcctttaccatcaagtctagtacagctgaagacaacgtgtgtactatgtagtcaccaaacaaccaattaggataaaaatgttcgcaggatgaatggtcaagaagcaattgcattatgtgaaacactatctccaagtttcaacttatactccttccgagctttataagccattacagcatcattgaaagcttaaaattgtattaattagctagataaataaatctactttagtcctcacggatgtagtcaagattcacctctgcaaggacttgtagagcaccaccgtcacatacttggcgagaaaccgatgtgttgtacctagtgcaaccacggatgggccgccaatcctccctttttgcatgtaaagatggttgaggaccacatgttgaggacgtgacataggcggtggaatctccgtgtatgatgacggtgcaggcaaattaagcaatgtcatttgtaggtggggaggaaccattggtggctcctttgaaaaatcatcggctgcaagttgcaggttgttgtaacttgaatctggggactggggtggttcaaaaccagatatgctttcaatgtcttccggaacataatcctgggacaaaattagatgtcaaccaagatggtcacttttagccaaacaaagtagtatgaaattccatgcagaggagtgtctgttcaattcaagaatctaaactgagggacaaagattaaccacaacagatgctaaaaccatttgagacactagaaaatttaggctcatgttaaagaccattcatgcaagtgctccataccatgacacacatgtcagctgcaaaacattaaaaccaaaatgagagaatttacctgcaagtctaagatgttgtagaaatttccggcatcatcttgagcgcagggcaagtctggggtgtacttccactgaccatcaacgataaatctatattgataaacaccagatggcagcactttcataatggtgaagtctttccctgatctctgaagaggcagtctgaccaagaaaatgtcttacgcagtcagcaatatattagtcacaattcacatagctcaaactcaacaaaagaatcagcacaacaaaccttgtcttccaattgtcccatgaaccctcaacagctacatcattgccaccgtatgcccatgtaatcattgttggaatagcttgttcacaagacatttcatcaacccctgaaccactttgcatccacgaagggcttgggatgtgaatctcatcaggtctttgtagtggtacaacagggacctgagaaaaaaaggtgggaatgaaaactaactgatgaagatccttacaaatccgaaattgaatatacataataaaaggaaaccataactcattaaaaaaaataaaactaactgattagtacattacaatatacagcaaaagttaatgagttaaagctgcaaatacaccagcctagtatgaaaacttaaagttaaaacctcatcaaataattatttttgaataatttactatctaattcttcctcacttcttccaaaaacacaaccgtcacatcagaaagaactgccaaaccacaattcaccaaaagaaaatgtaaccacattgcatgaaattgaagctatgtcacctcgactaacttgcagacgaagtggcaaacaagaattcaaccaaaaaagacataaaatcagagatcgaaaacccatatattctttcgggacttttaacaaacacctaaagtgtgtaaaaccaaacaacccaaaaagatgatgaagaaacagttaagtgataagtactgtgcagagagaacaaatcaactaaaacatatttacaataacaaaaataattatgagcaattcacaacctgcaatattgtaagacacaagatctcgggcgttcgcaacaacagtctaatcaattttaggaaaccccgaaaaaaaatgtcggtaaacaaaaaatctttcttctacaagggatcaaatcttcgagactgaattattatcaaataggaaagcgattagcctgaaaaagcaaaatcaaaagaactacttacttggggagtgaacaacaaaggtgagtgggtccttggggtttgaggaggagactggcccatcatctccggtgccccatcaggcacggtgggactctgttcagccatgccttcttgcacgctaccgccgccgccgttgccatcgccttcttcctcaagcgcagacgggctactaaccccatcttctcttccattaacatttcccattccgttctttaatactattattggctactaataatctaacccaaatattctaaagccaaaaaaggagaattatacaaaaaaaaaaaaaa

SEQ ID NO: 30449 - DNA, 2017 bp, Cannabis sativa
  modified_base (1143)..(1144): a, c, t, g, unknown or other
atcatagtaaataccactgtggtgcgcctgagagtggtatacatgggaacatttactccacgcacggactccatggtggctagctttcaaggacaaattaaatagttgatagacatttaaataacgcaacaaagaaatccaatgtctacagacatattatcagccacatttagaaaaatgcttataatattttgaaaatgactatgcataccatgtaaagcaaataggctcctgaaagaggaagggtatgcctcacggtctttaatggcacaagagtcatcccattatccggagctgtcaaggattcgctgaccgtgaatgaaattaatctccagcgtcttaaagcataaagaaaacaacatgaacatatcatctgcagttgcaattaaaatctccggtgttcaaattgctggccacatgaataatatgaagacactactacaatgtatggaaactataagcattgacaacttcccaagtatagcattgcatgaacaatctgtgagtatatgctaattacttcaaaatcaaaatggtctagctaagaactttgaagctataaaaaagtcaactttgaagtacataatgaacaaagatttttcatgtgataattatgataaaaaaatattaactttcacacaaaagaataagaaagacaacaaacaaaacccttgaacgaaagaaagaaaaaatcagctggtttgggatttacctgaaagagagtgatgacatttgcacaagggaagctatacgaagaaagagctgctttgttgaaaataaccaataacactgcataaacagatacatgaaataaacataatcaatctgaaatgtccccatatcaatctgattccgaaaacgaaacgaattcgtcgaatttgggtaataagcattcataacccgaaagcaatccaacaaaaaggggaagtattagggtaattgtatacctgcacaagacatgtaagaaatagcagcataagctccacgcctggtcatggatgatcctctgaagagtttgtcatcggctcggaggagtctttctctgtcttcgtccctgggaggatcggatatcggcagcatcagattcttttcggagattgaacccttcagagacataatctctctcttctctctctctctctnnctctctctctctctctctgagttcaattcaaggatagggaaggaagactgagatttgcaaatggcgatgaagtcaagttttcccaactggttttttcgtaaatatatgtattttctttttttattttctatttaattaggatttttactttgaaattttagtatataccaaattatattcctaaaagtccgttataaattagaatttttacactacatactgaaaaaaaaaaaatttactgtagagcaaatttttttttaaaaaaatactgtgattttttaaaaaatattgtgtgagttattttttaattattccactgctgttttaattattctgttttgttgttttacggtcgttttataaaaaaaaatagtatttttgtaaaacattcatgtgacagtaaaattgtaaaattttacccaaaatctaatattttataaaaaccccttaaaaatattgaaaaaaaaaagtaaaggtaactttttcatcattaaactttgtgtaacaccttaattaaaagaacaacgtgttacgattacaatatatcaatcacgttgatcgatgtctaatacgtcaagtgaatttaaataaaataattaataaattaaaacaaacttataataacttaaactttaaaacaaaataatatttacataactatgatcctgtaaaatttaattcaaaatattacaagttgtttacacaaaagtcgaaaaaagcagcaaaaccaaactttttcacaaaaagtcttccaacaacctacactacaagtcacattgcccggaacatgtacatcctctacgcaagccctccaactcatgactaactagagacggccttatctttgtatgtaccacagagagcacccatgag

SEQ ID NO: 30450 - DNA, 2134 bp, Cannabis sativa
aagagtatacaccttacatcatataataaccacatgatctaaaatcaatggtgaaaaaaagttccctaccggtaggaaacttttgctaggtcctaccatagtcttgccccgtaagtagtatgtattgaaaaagagagaagaaaagaataataatgtttttgacagtaattataaaaaaaaataaataaataaataaagataatattaaatatggacataagaaaattattgactgcaaaaataaccaactaacttgaaatctaataatcgatggttaatcgctaatgaagaattgggaacaataaataattaaatagaacacattgaattatagagattcgactcctttatatgtattatttatgagataataccgggtagatctaaggaagacaaaatgaattctaactatggctctcgaagtgtttacaaagaatatcttttaacaaagtgattttagatgtgtgagtacaaattcaggtctaagtccctttccctagtgaattcattcactatttatagggggaggttgttatatttggcttcgtaaaaggagtaaacaaaaaataaatatccttatattattttagggtgcagttacgatctattgaatctcctatattctcggatagatttgttggatttaaatttgtaggattcagtttatgatatttgtgaaagcttgttgaagaagaaatcaaggctcttgtaaccttgttcagtatccctggcagtatttcttctggccggtatatttactacccggccaagccttccacaagacttgtcttctttatgggatttacttgtagaatcacccttgccaggtgttgctcccatcttctctggctggcagattggtggtctgtcaggtgcttcacaaaagaccatctgcagcttatggatgtcaccccccatatggacctgccagacacacttctgcctggaggttctctgccaggtcaaagagttggctagattatgccacatgtaagtgtcatgtcaaatgtgcaaattttaagatagcagaaacaatgacacatattaaaaaaatgactctacataaagacatttttaatacctctcctgtagcattatcctatatatattcatatataatactcattacacaacgatgtaacaatgttatgaattttctagtacgtaagtatgtagtcgattcaagtaatttctaaataattctatttagcaacaataataagaaaagatgttcaaatctattgacaacgaatataaataaataaaaattcaatttaacaatgattaaaattagggtaattaattttaattgattctactttatatggcttagtgtaaattcaattcctaagtttttatttttatgtgatagcggatttatcaaggaaatttatattcgggctaagacatataaatcttaacctatatgcaaattttttactcttgtgataaatttaaatacatagaaggcattaagcacaatgctacacaaactatataggtactctcgttctatattaaaatctgtgtctatttcattatatcataatcaatactcacttctcatattttatattgatattataaacagttaattgatgggcagacaactaaaagaaattaagtacgaataaagtagatgcacacagaaaatgaaaaagaattgtatcacattaaactaaaataaaattttaaacaatcccaataatgccctaattgaaagtctgctaaaaactcatatttactgtaaataagtgacaacaattaattaagaacataggaaaagagtaaaagaaaagaactcgtcgaaaaaatattgataaaagtctctagagctgctttttccttccaattttcgtccctccaattgttgcttccaaagtgtcaaaagagtccattatatagccttccaagtatggtttaaactctaatttttgctaaataaatgaggcgggtcgtgatattgaccttccatgttgcagctcctagggtctatttttggacagcaagcttcctaatgcaacgaaaaataattttttggccataactctctcaatattacttggaattggacgattcaagatgttttagaaagctgaaagagagatcgaaaacttttattcacaatattttt

SEQ ID NO: 30451 - DNA, 1626 bp, Cannabis sativa
  modified_base (956)..(958): a, c, t, g, unknown or other
tatgaaggaaactcaattatgatataataaataatgtaggattcgtattattattattattacctgcaaattcatttggatcaacctttctaaggctttcgggaataagaccttccaattcattattggccaaactaattgtctttaaggtagtctgagtaaaatttggaatcaggccattaaacttgttgccatcaagcctcaacacaacaagtttaggtaaagtggcaagggacgaagggatcttcccttgaaactcattgttggacagcaaaaccttcttgagaaacctcataccaacgaacacatcatctggtatctcaccagaaaaatgattgtaagacaagtaaaccgacctcagagtgctgagccgcttcaagtcagggattggcccggccagcgtgttgttcatgaagctcagggtcttaaaatgaggcaacgacaccagcaaatctacgtccgccacccctttaagccccatgttctcgagctgaagcccgcgaacctttccattgaagcaaaggacgcctatccaattggccctatgaccgttgcatggtgtgctcttggttgggtcccaattggccaaagatttgctgttggataaggagttcttgaaccgcattaaggcgtcaatggcgtccggggaaccggaggccatggatgaaaatgaggtgatgattgtccatgatgtaaggaagaagatggcaaagaagaatgtttctggggtttgtgcgcgcagaagcctgcccacgcgcacacccattagctatattgtgtatatagcaaatgaaacggcacctactccctcaaattgtcttgatgccaaacaattttaatgactttttggaagatttgagtttcttggatttcaatgtctatgtgtttatgttttgttggaattgatctttctttctttctatctctctcttctttcttcttttttcttttctttnnnttttttttttttaattttttggttggattattttgttattttctttccttttttggatgatgaacaaggaaatgtgatttggatggtgaataaatgaggtaaaataagcatcaaagaataaaatgaaattggtaaaattgacaacaagttttgcttagtttgcattggccacatagatacatggaggaaggagtagctgttcattttttatttttttaattattaatattctgaaatgatttttaagaggtcgagctgtttaggggagagatgtaagcgtggccattaaattgaagaaagtgtaagaattaggtttaataattttccatttatagcattaactttttttttgtcttcttgcttaagaattgggacctatgctctgaccaataataataaaaataaaaattaggatctacgagtactaagttactaactagtgctaatttcttttgacaaattacttttatgatttattaataatattattaaggggcattccttcattgtttttttaattttttttttcttttcaaattcatagtttgagtttctaaagtgcttgaaacgctagttgcaataggatttttatacgattttttgttgcaatttagattgtagcgctagttgcaataaggatttcaatataaaattctgtaaaaatacaa

SEQ ID NO: 30452 - DNA, 6615 bp, Cannabis sativa
  modified_base (679)..(686): a, c, t, g, unknown or other
gggcagccacatcatcctatactaagcttatgaggcgcctcttggagagtaccctttctggatgtgtttaaacactcatccggaaggctttgagtgttccgtcccataataaaagtggagattttctcaggtcgagataagcctcgtctcggacgcgagtcttatgagcttttagatggacttgggcccatcctttcgtttaggctaaacctctcctcatggaaaggcttttaaccaagccatattaggctaatttgaacctctcctattattgttgatatatgtagaatgagtagattttttttttaataatgtgtattttatctacttttttgattaattttttttttaataaattgattaatatcttttaatattatgtagaagttactagtgagacaacattatcctttggaaaaagaaagagataattatataagagatcattttttgtaaaaaatttatacgtttacgtttaatatttttataattttccataaaaataatatgaaaacaacaaaaaaattatataaaaaaattacataaaagtaacataaaaataacacctaaataatatcaaaataaccataaaagataacatacagataataaaatatcgacaacaaattaacaagagtacaatataaaaaatcatatttttgtaaataaaataaaaaannnnnnnnaaatatttaaaattctgtgaaactgtatttttgtaatttttttttttttatttttgtgtatttgtgaaataatttcaaaaagaaaagaaaagaaatcttaaaaaggaaaaacagaaaagcccacagcagaagcccataatgttagggtttcttatttactcattatatatatgaagaggctattatttctactacaatcatcgtcttcttcttcctcttcactaaagatttaagtcgatgttagggtttattcaatgtgctgagtacatcacccactgttttttttcctctcaatgatatggtttttggatttctatctaatgagtatttgatcggaataacgttcacaagacaagtattgctattttattttcctgttctatactaagctttaagtgtttatgttatttttcatttctgaaatcagattcaaagataaatattgaaactgtcaaatcccagttgctccatccatctattcagcatctggaatccattagccattgcttatatcataggtgattgtggtccataaaatgtttgattctgttttccaatgttatataataataatagtgatagaagtttgtggagtttttattaatttgaggtcagatacaggtctaagactactctcttagactgtctcatatataaaatataacacttctagtttatgtataaatcgatgtatatatcttgtaatttcagtaagctgtcttgtttgtggaacttgtttaatacataaacatatccctcaaattcttatagttctccaagctagttgagtattgaaacattgaattgtgaaaattaatttactattgctagaaatattcattataagtacctagtgttttgcacatttgattttgtttttgatatcagatagtgtttttttgggtgaaattgatatgcaatttattttcttgaaattatattatttatttggtgcttatctaatttttgttggatgactgtaataattttgagtctgttagatgattgtaaactttgtgagtggttaagaactactatggcatgactcgcctgtatcagtaattatttgttttggttttcttaagtctaatctgtccatgatgataattctaaggcttgtttctcaaaacattcgcagtggccgccaaagagctttcgccttagccaggtttgagagctaatgcagttttatccttccttggatgtctgagacaatacattgtgattttttagaagtgggttggtttgttttgctgggttgatcttggttttatatgttaatatctgtcttttgtggatagcttttgttacctatgtcagttattatttgatttggttttcttcagtcaattttgtccatgatgataactttaaggcttgtttctcaaaacattcgcagtggccgccaaagagttttcgcctttgccaggcttgagagctaatgcagctttatccttccttggatgtctgaggcaatacgttataatttcttagaagtagattggattgtttctggggtttttgtattacattatttgcagtttttaattgaaaaagccaatttgcagagcaaaagcgtcgattaatatgatggcgcagtttgcattgaaggttggcaatatcaaattcagtatgcgattctccgtgcctatcaaattaattcagttttgattatggcctcgaacaagtcgctacatttcaatctacttaatattgctttacttttctcaaatatatggataaaatatagtgtgaattatgtataactgaagctggtgtctcaactgcagcccaacccaagatgtaacgatttttctgcttatgtaaaaaaattttgtaccatttttaagcaggggaagtcaattagtaaagaagagcagtgaagagaaaagactatcagagaagtggtcaactatatgtacctattgttttacacatttgatgtttttttgagatcagatagtatttttttttgggtgaaattgctatgttaattatgtgctttgcttttcttcttccaaatttatccatgatgataactctaaggcttgtttctcaaaacattcgcagtggccgtcaaagagctttcgccttcgccaggcttgagagctaatgcagctttatccttccttggatgtctgagacatgatacattttatggtttctttacattatcaaaaaaagaatggtagattggtttgtttctgttgatcttggtattttgtgctatgtcctatatgtgctttgtttatatcttttgttacctatgtcagtaattattatgtacgtttttcttctgtcaattatgtccatgatgataaatctaaggcttgtttctcaaaacattcgcagtggccgcctaagagctttcgccttcgccaggcttgagagttaatgcagctatatccttccttggatgtctgagacatgtatcattctgatttcttagtagtagattggtttgtgtttgttgggctgatctttttgttttatgttaataatatctatctctggtttgtgaaaagtttttgcggcctatgtctatatttatttggtatggttttttttgtcaattttgtctatgatgataactttaaggcttgtttctcaaaacattcgcagtggccgacaaagagctttcgccttcgccaggcttgagagttaatgcagttttatccttccttggatgtctgagacaatacattatgatttcttagaagtggattggtttgttttgctgggttgagcttggtgtttttttgttaataatctatctgtgttttgtggatgatttttgttaccaatgtcagttattgtttgattttgttttcttcagtcaatcttgtccatgatgataactctaaggcttgtttctcaaaacattcgcagtggccgccaaagagctttcgccttcgccaggcttgagagctaatgcagctttatccttccttggatgtctgagacctgattcattataatttctttgtagattggtttgatttgttgggttgatattggtaatatctatctgtgctttgtggatggataacatttgttgcctatgttattaattatgtgctttgattttctgtagttaattttgtccatgatgattaccctaaggcttttttaatcaattcatttgcagtagctgtctaatagcttgtctttgctagactttgagagataatgcagcttttgtctttgccaggctttgagagctaatgctgcgttatccttcctgaacttcaattatattttgttttatgtagtttgattggtgtttgacatttatggctaaatctatttgcttagggattgctttggtttcctatgttaataactctaattcttttttctcattacatttacaacggttacctatcagtttttgccttgcagctttatctttccttagatctgagttgtagtttattataattgtctcaagtctgaggcttgagcttctgttttcgctggtatggagaatttcctttggtgcctgatattaaattgttttcttgtttttgtttatgtggcttcagagttttgtgattttttttttgttacattgtttgtggtgatggtaatagtttttttattatttagcataattttcttcttttttgccatttttaaattgccaaatcagtatttttgttctgtttgttggggtcttgtcgtttgccccttcagtagttttctgagtgctgtagggaagagaagacccccatatccatgttcatcctgttcactttgtcagccgacttttatgtctttctgatcatttatggatggtagatttcgtttttaattgtacaaatttgtgttttgaatttctcttaattttttgttcttatttttttttggtgctttgaatcatttgaagttgaaaattaccttctaatttggtaatcctataatttgtacagcttttcaattaccttttttgataaatggtttttgctaaacttgcattgatatgattgttttcgtgtttttgctagtatttgtggcatttggggttgtgatttttccatcagaaatttataagactatttgttgatgaatgcttgaacttgcatggtggtgatgggtttgctttgttaatgtaatgtaatgtaatttattgatgtgtttagaacaagcctagatgtcataactgaggtttactcaaatatatgtataggattttgtatgttgttacatagttgcctttcctttatttacattctcatgtttgtttctagggcttttgtattacattatttacagtttttaatagaaaaaagccaatttgcagagcaaaagcgtcaaataataagatggcccagtttgcattgaaggttggcgatatcaaattcagtatgcgattctccgtgcctatcaaattaattcagttttgactatggcctcgaacaagtcgctacaattcaatctacttaatcttgcttttcttttttatcatttatatggataggaaatagtgctaattatgtaaaaccaaggctattgctacagcaaaacccaagatgtacaatttttcctacttacaagaaactgagactggtgtaacatgttaactacaacacaacaggatttaccttttgttattgatgtgattggaaaaggccaaggtgtcacaactgagatttactcaaatagagatgagacatttcttgcttatgtcaaaatgtaagcagaggaagccatccattttgaaaggttacaatttacaaaacagacaagtagctaaaaggaactgtgaagagaaaagacttctcagagaagtggacaactggaagaggccaaaggacattagtcttatacatatgattttttagttatataattatatttaaaaaaattcaatttgtgttttattagtcctatactacaccaaacataaaatttattagtattagattttatgggccacataaaatatgttatagtactaagataatttagtccaatccagtttaattctgagtatatgttttagttcttgaaacattatacgatacaatctcatttcaacttttgtatgtattactttaattgatatacccttttttgttgttaggtcgttgggggccctgaactagtgtttgtttgtagagtttttctgcttctttttgtggttttgaatgaagaaacttaatagtgtaataaatttggtatatatagttttagttccaacaagattgtataatataatctcaatttgacatacatttgaggttcaaaaaaaaaaaaagacttcagagtttaaagactatttaatctaaacatgaaaatgaaataattacaacaaaacaattcataatttaacatagacagatcatcatccataaataaaatgcaaaagatatcatccaaacttttaacttcaaacgaaataaataacacaaaaaatcaacctgtgtttctctgttttgctgtcaatcgttatagtgtaaagtgttcttttggctctagtgttttgcttgtttcttatctgctttgcttcatggcggacgagggtagtatggaattggaaagtgagagggattttatcacaataacaagcggtgaagatgatgatggaggcctattatatgacacgaacaataaggaactatcagactttgacgatcgatggtgtattgtaggacgcttccttactgaaagagaactggatttcatggctatgcaacacaagatggcatccctgtggagacctggtagaggtatgtttgtgaaagaattgggagataatgtttatttattccagttttatcatcagatagatgtggaaagagttgtggaaggcagtccctggacgtttgacagggttcccctgattttttcgaaattgtaacaaggtgaaaacccaagggcagtggctcttaataagctggatttctggattcagcttcatggttta

SEQ ID NO: 30453 - DNA, 1626 bp, Cannabis sativa
gaaaaacaaaaatctattgtgtgcgatgacaactttgttactgtatagtctagtcatattcctgaattagtggaaatctttttcaacatatcaatttggctctaataatcataaacatatatatctacatacacaacttttataacttttttttttctgcattacatcaattaaactagaaatagaaaatatccagacggaatcttctaggtggtaaatactaaatagaaagaaattaaacaagaaagaaaattaaaattccttaataatgaatagataatattagaattctctgtttatttaaattttttacttcacgtcaaaaaaaaattattactttgtgaaatggatgtgagggaataataggattagtttagccgttaaaggaagaaatagttgtagctgtgaaaaaaaaaaataactgtaatagaattgtgaaaagaaagttaagttgaatgtaataaattataaattttaaagtgctgcaagttgttaagattttattataataatgataatgttatagtatagttcattataattacatatatataattatatatatataaatatattacataaatttttatttttttttgtatatttttaattatttttctcatagtataaatttatatgcatgcatttgattaaaataatttataatattttaaattatacttttatcacttgtacaaaaaattataatttataagaaatttaggttgatgttgtttgttaataatataaatataaatataaaatattttttaaaataaaataaaaaaataaaaaatttaaatattatttatgttatgtttttttttttgtcaatcacgtaactatattgattccacaacaaaattttacaccactaacagcaccaatagtaggcctgtttatttcttaacaaattttctaaccattctatatctttttttttacactttattaagcataatactctttactcttctctttacatcaagtttaattcttttcacaataaaatatattgtgtatatcttcatgtttcatagagcttcattccttctccaccaaatatgatatatagttgccgcaagtgtagctataaatatttggtgcctaaatccgtttgttttagcatttgagatccatctcatcacaccatgaacagtattggcagcaataatcctatcaaaacactaacacctaattacttaagtaacatttgaaaaatagatcgatcttcccaatttgttcagcccacaaatatggcattcttcttcttcatatatattgtatttagacaatctagatttcaatctcagcctaactatctaacaccgtaagtcagaaatgattctatgctttggtatagacattcgattccacactttgtctccaatatatagttgggaactcagaacaacaaagacatctacaagcatatcacatcaacttctttttgactcgaaccacttgtttcctatatcagctatttttcttcgattcaattgcccatgctagcttctctattgcataaatatattttttaatatataaataattaaatagtaaaaaataatttattatagtattttaatcaaaacagttttttttttttttttaagacgatacatt

SEQ ID NO: 30454 - DNA, 1952 bp, Cannabis sativa
attcttgtaattgtccaactcaatgtcattacaattagctccatacaaatcataaccaagagccttatcaccaggctttaaaagatgaccaatatgagttctaatgttgacaattgtatcattcttgccaaaatctgttaaccttgcaacttgggcatcagctagtgagtaaagatttcaaagaggatctcaaatatcgatccccatcaacataacattgcctcaaagtaaaagggtcaagtaaggaaatggtattagttacttttgtgcaaattactaaagggccaagatttccaagacttaatgacactttggatggtaaacatatcaaatcttcacggcatattggagatatttcaacagagaaagtgtacttgtaattgtagttgttactcttggtatcatgggagatgagttgcttgtcgtggcggcttctgatcaccggagcaactttggcgatgaactcgacaaattttacaccttggcttctgtttgagaaaaagaaatcgattcctttgtctacttgcttgatctttatggctgcaactgcagcaccatgcttcaaaaatcatctgttccaaataaaagaaggtgcgcctgcaaatatgattgaagatttttccaataaaaatagtcattttctacaagctaattatctaagaaaaaaatgttaatcaatggtgaacttctaaattaaaagtttatattagtataattattgggaacaactatggtactgcatttgtttttaagcagtatagtagtcaaagttggcctcatttacattttcataacattccaagtcactatgtaattactaagtcatataattattaggatagtaattacaccatattttaaaataaaatgtataaaatggtaattacatatgaatgtgtaaaattacgatgtaattatactcaattttcatgggtgatgatgagaattggagtgtaattggatttggaacttcttaattacatacgattacacaattacagtataattatattgacatataaacgtgcaaattgtataattatctctaattacacttaaattcaattcttctatgatttttcaaatgcacctcataatggtttatgggccacaaatagagtcaaaaatgatcaaaacagaatattatagtgtgataaaagtaaaagtatagactcttaatcactctaaactattcagaattttataaaaacgtgctggtgatatgtaccgaaaagagaggggatatgtatgttggcggagttgaacagccgcaacccactggtcaggattggcttgaatcctcatacaagattcacacatgtgttcatgctgaacaaactcaacaacataagaccgttgaaacaaaactccattcagaatctctttctctactttgagcttgagcttgatcctcttggaatgtggctcagtccatatgaactcagcatgaaccaatctcactctgttcatattcttcaatctcttaacacaaaaggtcaataactcattggattcagattgggccttaatccatgttgttggtggctgcaaataggtatcacattcaggacaatggattattgtaacatgtctttgcaaaccttgtgtgatatcatattcataatacaaacattttaagcatgtgttggcatcgtttggggccattggaataccacatctgcaacatggcataaggccataggtttgattgtttgccatcaacatacttaatttgatcctataaacaaaaacaagaaaaagggttaacaaataagatgtaattaattgaaaaataaacaaaattataaatatataagctaaatagtgacacaattatttaaagttttgagattgtaagccacaacataaccacccaatatttagattttacatacccttgggtctctaggtttatggagtttacaaattcaaaattttggatatatatatat

SEQ ID NO: 30455 - DNA, 1416 bp, Cannabis sativa
gggcttttttattattttagtctataattattaaattaaaaaaattacatttaattttttaaaagacaatatttttgttagtaggggctataatcccatattaatactactagatccgtccctgtatatatatatatataaatatttttgctttaataagttttattaattctttgttctcgaacagctaatgtagtagctaaatatttcttagctaaatttgttttatcagtttaattctgtctgtgaattattaattggctgaactattattatagctgatgttattcagccctcaactttttttttctttttttaaaaaaacttttttagagctctttctcaattattattattattttgagggactcagaaattttactttttataaggccttacttatcataaaaaaaaatatttatacttatattataattacttttaaatttattaattttgtggggggtttttctaattttagtccaattaaatatatttaattttttaaaatgcaatatttttgttaggggactatagcccccacatgattactagtgggtccgtctaccttgattattcataaatatatataatagtatcatattttatttaaaataacattagagtgaaaaaatgatgtacatgctaaatttttaagcacacttttattatattaagaagtgtattatagatcattcaaatgaaaaggtttcaagttgagtcgttaggaaagctagtagttgtttgaaaattaatgagttccaaaaggctagttaatccagaagaagtcttgtgaaaagccattcgtcacccaaaaaggagttctggaaagctagttcttccctctaggaaggagtttggagtagtttgttcctgtaggctttgtgcctatttgggaagtctttttagattgcgcttcatcagtttgaacgtttgtccagaaagcgtaatacttgtctgaagagagcttcatgccaagagcttacttagagatctcattgtaaggagccaattaagtcggttaagtcttaaccaaaataactatttagttgtttgaagccaccacctttggcattcatatcctcgatctataaatacaaccatcctcttcttttgatataagaacacgaaacaccaaaagtacgcaagttctttgagaggtagatgattgagtttcaagattttgtaaaggggaagcttttgtagatgaagaagctcttcaggaaagagtgttagagaaaaaataccttgagagaatctaaacaaagaatcgctctcaactgtgttgtacatgtgttcttacacaatcaataaatgaagttttagttgtgtgaagtccagaattaaagtagaaccatagattacgtcgatctatatcagacttgaaccagtatgattcttagtgttatttttaag

SEQ ID NO: 30456 - DNA, 4734 bp, Cannabis sativa
  modified_base (2232)..(2233): a, c, t, g, unknown or other
ccgaaaccaaggaatgggatttcaaccaacgacaacttcgtagctgatcttctgcttgaggatggagggtgggacatcagtaaacttaatggcctctttgatagggaaacagtgtctgcaatcctcaagggcggaactcctacggggttggggaatgatagatgggtttggaccctagaaaaatcaggtctatttacttgcaaatcggcttatttgacgcaagctttggatagagctcagcagtgtgtggtcgctccggcactttggaacaaattgtggaatagcaaagtcttggaaagacataaaatcctttggtggtgcattctttctaatgcgctccctgtcagatcggtgattggaagaagattccatgtgcaggataccagctgtcctttgtgcggaataggggaagaaacaatggaacatcttttcttgtcttgtgaggtgtcaatgcatttatggcgctcttcaccgtggggcatttaccccatatgcaatgcggggattcgtgcttgtgggtcaaattcatttggaaccttaattctagggggattcgagtggatgaggtcttcttgtatgcttcgattgtcgttgacactatttggcgacttcgtaatgacattacccataacagtgctcatctggatgtcttgaaatgtattgatgtgatttgtatttcttatgcagaacttcatgatgctatcttgccttcttcaccccctcatttagagggtatctggaagcctcctcctcaagattggataaaactaaactgtgatgtaagagtaggcctggatagtatgtgcattgcggtggtagctagaaatcatcaaggttctgtggttcggattcacacggctcagttgaactttgtggaccctctgtgtggagaagctgctgcttgttgttcggctgtggatttggctcttctgcttggtttcaaatatgttttggttgagagtgattccagaatagttatcaacgctatcaatgggacggagtctcactgggcgattgagaactatgtctctttttgtgttaaatcctctccctatttttcttgttgtaattttatttatgctagtagaacttgtaattttactgcccataatgtggctaattgggctttcattaacaagttgtacggtaatattccgattaattcggtccctgtgaacctattatgtaatgaccaacaggtctagtttattttaatgatatgaacacgcttattttcaaaaaaaaaaaagtagaagtactaatatatgactgaaattacaattttgcccctttcccaaaaatgtattctttctttgttctattcctattccctatatatgagttttttaaatttttatgtatctgttaaaagaggaaaagtgttacttattttatttattaaaaaaagagccgacacataaaaaaattaattaaataataataatcataataaatataaaagtgataattccaactaagcccctcctcaccaaacagctaatttatgtcattatggtaatgtatggtatgggttggcaaaacttatattatcaatgcttttcttaacaaaagtaagataacccctcttctcttcatataattctcacctaaaaacaacattttacccctacccactaatcttaattttcatttgaagccctttaattttgttttaatatcaatttaaacccttaattttcaataattactatattaaccttctatgttaagttgtgaatggtgataattctatctactttttatattgttgtagtgattttttagagcatgacctatgcagacaaccttagaattccatgcttagccaatcaaaataaaaaagagaaaaagaatatctaacaagtatcggtgttcctattttgtcacaaatctttttttttttttggttgcaaagttagttaaggacccacacgggcccatttattatgacaagcaactcttatatttctaacatcggtcatgctttcttatagtatctctaatcatgctttctaaatatttcttaactaaaatgaggaattagacttgaaaaaggaacttcaaccatacaaaaattggctttctatagcctataatagagaatagaaatagagctctctaaatgtaaggaattctctatttttttttttattaaacttttttaatggtattttaatcaaaagtattattacattttcaagtattattatttttttcattattttataaaannaatttatatttgacaaattcaaattataaaatattattaaaataatcaaatattaactaaagtagagagcatattagagcaacaacaataaaacgaactttattttaactttttagctattttaattaaaaaaatagagagtaccattgaagatgctcttataaatgttatagataatacttgtgtaataggaattaaaatactattttgaactccctattttgttacattttaaatgacaattcaaattctatatttttcaaaataatacaaaatagacaactagcttaattttcacctgattaaaacttaacaataacctaacttgaagtgttatgacaagattgattatatttttggtatctattcgtgctaaaaacaagcttcaagttgattatattaaaacaatgacacaaattgacatttaataaaaggtctaattattaacttttgcaaaacatagaatcaaaaatagtatttataaataatcgttcactttattaagactatatgattagagttgtaacacatacttcctatactctcttaaaatcaataagagatttagtttttagtagctaaactttctcaactattatttcacttgtgatgttttaagcttaaattttgacagtaaaaccttcaaaactactgaattgttagcaaacgtaaggtgtcatacagctaattgccacaaagaactatttacggtacattcttgtacacatgacacgtttatattagtacacctaatattattatttcaaaattcatttattctttatcttttctattggacagttgagatatagtattttgaaataaaaaatattataaattttgaaataacttttaaataatgatattaggtttaccaatataaatatgccacgtatacatataagcagtccatgtagcagtccatgttggtagtttactgtgaaaaatatatgacaccttaaatttgttaagagttcaatagtttgaatagttttactaccaaaatttgtgctaaagggttaaatgtaagtaaaataataattgggagagtttagctacaagggttaaatgcgattgttacctatattgttatatataattatttaaaacataggtacttacatgtaatttttcttataattggcttttcactagtatttttttttttttcattttcttttctaaactttaattttggttggtatatcagaatctttatacatatttcacatctaacttttcattcattgattcctaaagaagtacatacatttatataattatatatgtatattttcacttctaaacttgaaggtgaagattgttcttggttaaccaaacttggaaataatttaattcccttaaaaaatatatataatttggtcttgttggaaattgattaaaaattaaaaccacattaattaatttctaaaattggtttgatatggttgaccctagctaattaaactacgtgtgtttgtatgaactaatttaattcataaaacacagcaagattccaaccatttttttttttatttttatattttttttaaaaaaatacaagtttccatttttaaagttcatttttaggccaatcatataaacattaaatatttattttattttattttattttaaaaaattgcattaaggacaattttgatgttaatttgttgataatatatatagtactataatttatatatatgtattaaatgttggtggtctactatttatttttcatgtaagaattgtaattatttttaattaatttggtacctaatgggattaatgatactattaactatttatttatgaaatttgtcacatttatatatatgttatataaaaatgtggaccacattgctaatgtgtcaattaatatgtatataaataaatattattgatttacttttattaaatatatattattaatttactaacctaaataaaggagtgctatgccattaattatgattagataagttaaaaacaaaaaagaaagcaataacattgatatatatattatatatttattattatacctaagtctataagtttatttttatttatttatttaattaattataacttgtttgaaagttgagacccaataattgtaacttaatcataatatatagtttctttttctcttataaaaaccttggatgcttaagaagtttcctctttcactattttttctttcttttagcaaaaagacataaaacatagcaagaatccaatgataatttttttttaatataatttatttattttttgaatggaaatagaatcaaatcaagacacaaaattaaggtactaaataagaagaacataattaattgaataggaatctaaaaaatggtaggttgaagctaccattcataattaaatgagctatgattttaattagttacatataattataggttgttagtgtatttacataattgaagtgttaccgttaattttttagtcagttttttgctaacaaatacaac

SEQ ID NO: 30457 - DNA, 1876 bp, Cannabis sativa
aaaaaaagtcgtaacagttaatagtgatggcccctacattaatgtatgtagggtcctccaccccaaatatttaatttttctttgaaaggacctcaccagatttccgagtccatagttcgtttggaaaggaaatataaaattaactgttttatgagcattcctattgggcatggtgccttttagccattctcatataaatatattaagcatatagaccatggtatatcccgcatgcgccccaatagccgccaccacatgggctgcttaagttctattgtgttatttatttaatttttgagcattgctattagacaccagtggtgtctagcactttcttaacatggcgcgttgcgattggctagcgataatacttaaaagctattatattaaattatatgggacctgatacttaatattgacacataagagggcgctaggcaccactaatgccttttagcatttctcttaattttttttatgaaaaacaggaaaaaaaaatgagaatggaagtgtgaaaatagggaattttcaaacagaaaagtgagacttagaagatctcactatcattagtatgtcaaagttcaatgatagatcatagatgtattttatttagtgcaaatagttaaaatatgaattttatacctaactatgtcaaagttcaatggtagatcatagatgtattttatttagtgcaaatagtatataaccaactatgattataaaaataataaaaaaaaaactatgatcatctttttaatcctttttttctttttgaagagtccaattatctgtatacaggattaattattaatgtataagttggaactttgaagttgaagttagaacgagttgagattggacatatttagtcagaattagctgtcacaaaagttctattgcatatcaattaggttgaatcttgaatgcacgtgggattcaatgctttattcagtcctatgtgtaataagagggcaatagtaacattgtttgaagatgttaaaaatttacaacatgctaatgtaatttacaacatgctaatgtatagcacttttaaaactacaataattatgatttgacacattattatttgatataaatcttaatttttagctacaataactttttaacttcaattttttattaaaaaaaaaaaataaatagcatcaatgctacaatataacatctatgtaaatttctaaagtgatattcttttctctctaatagtatagtattttaatattttgccacataatatatccacctcaccaaacatcttatgattagagatgctctaatgagccatctgatctgcagaattgtctgagctacggaaagaatgagtttttttttagaaaaatatatataccacaatattatatacactaacatgacaatgtgtaaaatagcgtgtcgaaattagataaatgtgattgttttaaaatactatcacttcactatgtatcatattatttctcgggtaaattatgggttaacctagctacagatttttactttacttttatgctgtttctttcttgttacaaaatgagcaaacaccaacttaacttgagtgttggttataaaatttgctgttttgaatctatatataaatatattaagcatatagaccctggtatattctaattgagtatattaattaatacagtgatagccctaaacacaatattccaaaaatggaatgtaaaagcaaaccccatgtggaacatgagtggggagccatgcactggatctgctatcaataacacaatagatgttgagcaggaaggcaacaaccccagcatcaaatgcaactgtacttacaacaataacaccacttgccacattacccacttgtatgtcacttttatatatccct

SEQ ID NO: 30458 - DNA, 2359 bp, Cannabis sativa
taaaatccatgtgtcttattattgctttatcatatatctgttattatatatcgtttatcgcttataaaatagactcattgtcgttggtaaaagtgaagtcaacaaatatatttaaattaaatactaatttcatatataactaaaaatgaaattaataatttcaataaatgtatatatttgcattactctaagtaaatatattacacaagcatttttaaattactcttactgtttacgagttatctaattaaacataaaaaaatacttatacaattgttctactctttatcaccgtggatcacctcaattaatttttctatccaatctcactgtaacggtaacaactcctttttttttgcatcgtatgtgttctttccaccaaacagtaaaaagaagaattatattttttttattagcatacatatttgtttgttaatataaataagataattaataattaaagtttacaacttttgtgttagttatgtatctggttggatttgcagctctgatgggatcaataatgtattttaagacataaaatccatactctcgatttttttgttgttttgggcaagctatgtgataacagtccaataaattcattcatccccctgaacttctggtatggcctgttttaaaaattatattactattttaattaattaaccactattacaaaaatgggtattcgaaacggttctaaaaatactttttttggggaaccgtcaacataaaaattaagcgagtatttaaaaccgtcaggagaaatagggtgttatttgtattctcgcgcataagacatgttgcatgattaagggacaaagagtattagcagaagggattggttgaaatcactcgtaaggtatcccgaaggggacatctcggcaatcctagaagtgtatgctagacacctgatggaatgagccatttgcgaacaagtaacatttcctggacctggagagtagttgaggtaggtgggtcccggatagaaatcctttaagcgatggacacggagtgtaataacagtctcgctggcaatgaccacatcatcgtcatataaaaattgttgtatagacgattgcacctttttctaacacaaaataagatcttgtcgcgcatgccaagccatggtagtttgcgtatgcccctctaaacatgcttttttcctaacggactggttagagagtattttgcaaatgagagacctttgcacgacacgtatcctggtttgtacaaaacccctcactatagttgtacaccacatgatgaagaaggttcttatcaaccaatggtcagattgtcttatggtaatatcggccttggtagcgtgtagggtacgaaaccctaggtggataaagggtatgccctttatcacatgtgtgcctataaatacttattttctatgaacaagggagaataattttcattttacagatattctgctgaaatttctagagagctttcttctaaaaaaagaaacaagaggaatacagagttcattattgtaaacacttgtaatacttaaatactttcttgaggaggctaaaattatggactcgtggactaagcatcattaacgcctgaatcacgtaaaaaatatattttgtttattgtttaatatattttaatttctttagctctacttaatcggtttttgaaaatctcggtaaatatttttgtgctttcattgagagctcaggaaattttagaatcctcatcacgcttcaaccatggtgtatacctaaaaaggctctgtaaagaaagttctcctagatacgataatggaggaagccgactcccatactgttggcccccagtcaagaaacgatagagagggtgcaacccctacagagaaccgagaaagggatactgagaatgttggcgatgatcttgctgatagccaaaaccctagtggtgaagaaggagaaggaggcaacgatgaggagtacataaaagatgggtattacatggatggttatgactacgaccatgaccctaatctgttacgagtaacaaaagcattggaaattaccgaggtggagttagtagagcaaagagaacttactgcaaagatgaagaagatgacgaaacaactttagagcaagtttaatgacttagctgggtcagatgaggaacccttggtggaagttatagtcgaggggcgaacccaaaaacaaaatgaagttgaaacctcaaacccttggaaggacaacggtaaaggaaagatggatgagctcccataaaaactgctcctaagcctcctcacaaagatgcggccacagctagtcagccctcgaggacgtagagggccaccgatgcttttgagcctggatgcccttttgacgctcgaggcaaa

SEQ ID NO: 30459 - DNA, 2016 bp, Cannabis sativa
aaataatttccaacagcttgtatgctcctaatctgacggatgcattttaatctagttgtattttgaatatgtgtccatgaaactcaggatttcatggccatttgtggcttctacaagcttgtcaattttgcagagcgaaaaggagtcctttggacatgctttatttaggttggtaaagttgatgcacactctccactatttgttgggttcgggtaccagcacagggttggatatgcaaagtggatagaatgcttctattttgaagttatgggctcgtagcctctagacttcatctttgagtgcttgggtgcattctttgtcaaacaacctcttattctgttgaagaggtcaaatgtttcgatcaatgttaagagcatgggtcatcactatagggtagattgtgaccatgtctccatgttaccatgcaaagtggtccaggtttgcccttggaaatcttatcattgatgattttatttctagtgctaaacccttctccatcttcagttttctagctagagatgtgggatcaacctcaacttcctccaacttttctacaggtctaaagctgtctacaggatcccaaagtcaggatatctatatgtttgcgtccccactttgggctggacttcattgtgattttctaggctcttcttcatagctcttggcgggcatcttctctttctgaactttggatagggctaagttgtaacagtgatgactaaattgttggtctcccctcaaacatcgtactccatgccttgttaggaatttgagggacatgtggtagatggatgttactatcttcaggtcataatgggctagtcaacctatcatggcgttgaaatcgaagggaatgtcaactacgatgaattatgcaatcaaagttcaagtgcttgtattttctccaatagtgaggggtaatctgatatacccagtcggtgcgatgccttggccaaagatgacatacatcaattgactgtaggatgcaaaatcagtgagctagagcccaacgtttttcgtatgttgatttgaaaagaaagttggaggaggctccattgtccaccatgcatcttgccacagtcatattcccgatttgtgcagtggtgactagggggtcgctgtgaaggaaactaacttgcgcagcatctccttctatgaaagagatcgtgggctctcgaagctttggtttcttagagtctctttctttgactgccaggatgtcattttttggctcattacaaagtgtctgagtgtagcgctccctagattttttggtctcgcctagaatatagggtccaccaatgatgacccctaagtgacctgccactggtggtggcattggatctccatttttggcaccttatgcctacgtctgatcgttctgcacataacgatgcatgtggggatcgttcttccttatgagaattcaatctccctcttcaaattttgacactcattggtgtcatgactgaagtcattgggaaacacatagaactttgacatgtccctcttgctcaattaccttttgatgggaaggggctttctgtatgggacttttcctttagtggccatgaagattgtcttaggtttctacgttaggggattgaagcatgtacacttctcctccttgtctttcttgttttgtggcctgggagaaattttaaatttcccctttttgccactttttcttcaagagttgttgttgttgcacttgatcctagtgctcttatgactggatgtttgggcatagttgctggtacctacctatggcttattggaaagcttcttctagtttgatgaagtcttgagctttgtcaaggaactccttaatgttgtcagtttagatcctctgtatatatctttctaaaagtaactcactgaaaagatgcccccagtatggatgtatatcaaccttcttttgtaaggcttttgtaagttccatacatacgatattggtatactttaccaatgtcctggaaaagacataacacttatccaagatgtaagtatacctta

SEQ ID NO: 30460 - DNA, 1264 bp, Cannabis sativa
gggcaggtatctattcccccgctcccgcttcgtttccgactcgagtatgaatctttaaacccatagccgctcccgtccccgaaagtctatatacccttgtacctaccccattagggatgggtacccgcggatataattgtcatccctaaaaataccttcgtattatattttattaaaatatacctatttttttgagtaagttgttcaatataccctcattttctacttaagtctaacatataatttacattaacttaggagtctaattgggacatcatctatatatcttaaaaaatataaaaatataactaaaaatcaaaataagtaaaataaaataggtatacaaggtagtttcttttaatataataataggtacattattttattattattattattatttgaaatgcaggtacattatttgtataaactagaaaaatcttagctcaaatttgaacaacaataaactaataaactgcatgatctttttttttttattgttgtcatgtggtggattaagtttgtgggagagaagaaagaaaaaaaaaattaggcgagggtgtcaactgaaaaaaccatttctttttagtagatgaggaccaaagaaacatattttaattaaatgataaatagaggcataaattatttttttagtaatataagtatttaacatttgttgagtttgtaataaacataaactcaataatatttttagtagcataatactaatatttataaaattgtaattttagatactatacccctatttaatcaaaattaaaatactatatatttatattatcactttatgagtcatcacttcactaaagaaagctatttttctttacaggaaagagctatcattttgaaaacgtagagcatctaagcaactataaaaaggaagtataggctgaagatattaacatatgcgaaaataccataagagagtaagcaaagtattgtatcaccaaaaaaaaaacaaaaatcaagatgaagtccttgtttcttattctgattggcattttcctaactacacttgttctcttcccatcttcaatccttgctcgaaacttggccgcaggtacgcattaatatatatatatatatatatatataaataatgatttgttaaaattaatttatatgacatatatgcatatggttgaggttaattttcttgtaataatgatgatgcagatgaagttcctaatggccagaatgatcagcagccaataagcaaaggaaccgatggggacagtgggag

SEQ ID NO: 30461 - DNA, 1347 bp, Cannabis sativa
agtcttttacctgattagaaagaggaacttgtcttgaaacatcccaaactacaattgaattttcactaacattgcttcttgaaatatcactagatgatataatttgtctgcaatttcgggtgaattcaacatcaagaataggatcgtgacctcgagcaaattcatgaaccaccttcccatttcttatatcccacaacctgatgcgcccttgtgaccctccagagagaaagagattaaaattttcctcatggaacttaacaacaccaaccatttgatcttccttaaaaacctgaatctccactcccttctctacatcaaccaaccttgacgagcaatcgaatccacaagaaagaacagagagtccctgcaaagaccatttcacatctttcacagctgcactgtgaacgtttaacttcctcgctatcttctgatcactgctccacgggttccatatgcatatcgagtgatccatcccagcagaagcaagaagatgagctgtagactaactctaacgaacagatcaataaaggcagcaataaatgcaatgaacacataatcacttcatataaatttataaaatcatggaagcaatgcacaaccgatatagttgagcatatgcctaagctcaaaaccagagcctccatagttttaaggaagcatgaaacttagggttatccttgcataggtcaccttatagctttaaagcactgttggtatgactcctacacaaagagaagcattccaagtatggtaggtccaatgtccaaactaatgactataaactaacttcatggtccaatttctacccttttacaactcttcctattaaataaccaccacactactagaaaaaacattgaaactcataatgataaagaactcaattaagcatttgagccacatgcatttatacacatacatatcaaagagaataatagtaatgaaaacaaactttccaacaatgaagaactcaccatgatttggtgaccaatgaatagcattaacagctcttgaatggctagatagagcaatagacaccctttgagacatttggtctcgttgttgtacactactcctcttattcctcagcaatgacaatatatcataacgaatatttgaatccaaaatactcccaaaagctaaaagaaaaaatcattcagcataccaacttttttgatagatttaatcacaccaaacatagcctttatccaattaccaaaacgaaattaagtcttaaaagctactaagtgtaatataaaagagcaacttgaggcaaaacacataaaagtttcttttttgattcaaaaaccatgtttgaactatattatacaatgataaaaaatggtg

SEQ ID NO: 30462 - DNA, 2412 bp, Cannabis sativa
tgatcttcctcctcccagagatttgatgattcagattgaccagaagaatgaagctgttctgttgcctgtatatgggagtatggttccttttcatgttgctacaataaggacagtctccagccaacaagatactaatagaaattgttatattagaattatttttaatgttcctgggaccccttttagtcctcatgatgcaaattcgtcaaagtatcagggttcgatttttcttaaagaggtttctttccgctctaaggacccaaggcatataagtgaggtggtacagcagattaaaacacttagacgacaagttgttgcaagggaatctgagagagctgagagggcaacacttgttactcaggagaaactccagttagctggtaacagattcaagccaatcaggttatctgacctttggattcgtcctgtttttggcggtcgtggaagaaagttacccggtacccttgaagctcatttgaacgggtttcgctattctaccactaggcaggatgagcgtgtagatgtaatgtttgcgaatattaagcatgctttcttccagccggctgagaatgaaatgatcactctccttcactttcatctgcacaatcacataatggtggggaacaagaaaaccaaagatgtccaattctattgtgaggttatggatgtggttcaaacattgggtggtggaaagaggtctgcttatgaccctgatgagattgaagaggagcagcgggagagggataggaagaataaaatcaacatggacttccaaaactttgtgaatcgggtgaatgacctttggggacagcctcagtttagtggccttgaccttgagtttgatcagcctttgagagagcttggtttccatggggtaccctataaatcttcagcatttattgttccatcctcaacttgcctagttgaattgatagagactcctttccttgttgtgactctcagtgagattgagattgtgaatttagaaagagttggccttgggcagaagaattttgacatgaccattgtatttaaggacttcaagaaggatgttcttcgtattgattctattccttctacagcacttgatggcatcaaagaatggcttgacacaacagacatcaagtattacgagagcaggctgaatctaaactggcgacaaatattgaagacaatcactgatgacccacagagcttcattgatgatggtggttgggaatttttgaatttggaagctactgattcagaatcagggcaatcagaagagtctgaccagggttatgagccatctgatgtggaagttgaatcagagtccgaagatgaggcctctgacagtgagtccctggtggagtcagatgaggaggaggaggaggatactgaagaagactcagaagaagagaagggaaagacgtgggaggagttggagaaggaggcaagtaatgcagacagggagaaaggtgtcgaatccgacagtgaggaggaaaggcaaagaaggaagatcaaagctttcggaaagtccagagctcctcctcctagtagatctgcaccatctaagcgacctaaaacaagaagataggtgtaaccagaagtttcttgttttcatttacctttgtagtagtattaagcagcaacttactgctgcagtatggcttacctagattggaattcttattttgttctagtttatttccaagtttttagttgtattgctggaccaaataggttaccttaaaagtctatctgttgttggttgtatattgttagcatcactttttgctggaagaaaattctttccgtttcttttgactcatttggtaacatatgtttttttttgggaagcacataagaaagtatttcttttatatattaatatataatcttcttgggttaactaacctaattaaccttaattggttctcttttgtttgtttaatcttttaacttcatattactcttacaatgaacagtaactgtaaacttcttactttttgccttactgtctactcatgtccttcacaaaatttacttgcctttaaatatggctgaagtattgtttgctttgctagttattagcttgagaattttctgcacatacatattatttaattcttatattgtggaaaggaaaactaattagcaaagaatcattaggagaggagatgtatttctagttatattggtttgtttttagatgatgaaaataattgaaaacagaaaaatactgcagcattctacaattggtattatcaaacttgaaatctgcaaatacaagagctttttgtgtgagttttagttggtgattggtgctgccctatcagcaagtgtacatcctaagagcatctccaaagagacatcaaatttggtgttacactatcaccaaatttagtgtcaaaaattatttctactccaacc

SEQ ID NO: 30463 - DNA, 4328 bp, Cannabis sativa
  modified_base (4248)..(4252): a, c, t, g, unknown or other
gttcttcttagtcaattttgtcaatggcattgaaatcttagaaaaaccttctacgaaacattaataataccctgccaactctagaaaactttgaacctcgggaactattcttggccttggctaattttaaactgactcaatctttcccggattaaccataattccatcatttctaacaatatgccctacgaaggataccctacgaaggatacttttgataacaagaattcacaaacaagaattcacactttagaattcacactttttaattcacactttttaaactttgcatacaacttatgattctaagccattgtaaaaccatccagagatgttgctcgtgcttcgattctgtctgagagtatacaaggatgtcatcgataaatacaataacacagttatcaaggaaatccttgaacactatattcatgagatccataaaggtcgctagagcatttgtcaattcgaatgtcatcactaaaaattcatagtgaccatacctggtccaaaatgcagtctttgggatgtcttcctcccaaatcctcagttgatgataacctaaatgcaggttgatcttagagaacactgtctgttatacttaaaatttggctacacttcaaaagctgacacgtgtccaatatatggaatatgaatcaattctaaatgatataacgatatcattaaatgcatattgaataacttgttattatttaaaggataaataggtaatattcaaaactcgttggctttataataaaaaatgagagaagaataataaccattgatatgagattcacgagacatatgcatgcctcagaatatacaaacaagaaggggatattcatccgcctgaacaaaatgaatgtatcagcataaactacctcgcattacatatagcgagaagatcacctcacattacaaaagccacatttgattgcccacgtttcatttacagttatatttaaatctatcccaaaaagaataactaccaacctatactcctataaataggggaagattccatgggaaaggggatgacaaatttgagaaagaattattattattcaatattagatattgtattctgtactctaaaaatatcctttataagaaggagttgtggagtatgtagattttaactacaaaatcacgtaaaaatatctggagttattatattttttattatttattaatttctgtagaatatttattattaaaaggctatttaattttggttaacaaaaatctatgttaacagtttggtgctttcattgagagccttagtgataaaactaaaaaaaaactctccttacaaacaaaattctaaccatatttaatggctgataacaatcgaaacaatggaaatcaccctaaagaaaccacacatccccctgtaaaagagccaataggatctaagaggccccataccacttgaacatcatgttcaaggaggaatgatggttgttgtgatcaaaattcagaaacagggaatgaagataccaataattctgccagatacatgcctagaagtgaggatgattacgatccaactaggtatgtaccattagtggaattagaaaatagacaactctgacaacgcttagatgaatctaactgacgaaatgctgagttagaaagagacgctgtggaagccagggtgacacaaggaacaaatccttagaatcaacttgatcctgcgataagaaaaccatgagggagacctcgaggttctagaaccaagagacaggaaacaaatcagggaaatccctaaaacacccaggaaaagaaacttgggggtacaagggatgttctagtggataattaaacaaataattaagagaagtagtgagacgtttttcaaggatcccaataatttatgaaccaagggaacaaacaaaatgatgtaccagaagcttcttgcaggaatgaggacgcaagatagcctcgacttgggaattaggtaatccctcgtgataatgagagaaaccctggaaaccaacccaggacaagtgggctacctccaagacactcttaacgtccttctcaatcagagagggggtacgtatacaagatgaagcaagttctagtttaggacactcaaggtctcaaggacaaagtcgatcgggtaggcaaacacgagagggaagtagacatcgacattatgctaactgagaaagcatgagcaatacacaaagctaccaatatgagagttacttagagacaagatctgtgagtaattatgagcgaagacaacctgatcttcgcgagcacctaaattgaagacagcccgatcttcacgagcgactaaactagaatgcacctgatttgcgccatcaacttaatgctaatcaacagcaaatagatcccatctaattgtgaataattgaagtagaggataaattcggaaagtatcacgatggagaacatggaaaattgccttgtcatgattcggatgaagagaccgagccgtttcatcttgatattttgaattctgaatttccatagggattcaaaaacccacatgttttgaaatatgatgggactacggatccagtcgctcactttaattactttaatactataatgcgagccagcaatgtctcgaataatttgcattgcatcttattgttgacttccttaagtggagctacgggcacctgattcgacaaatttactcatcattctataacatcttgggaacagttgtccaaggactttaaaaaataatttcaagctgctagagacaggcaacctgaagcatcatctaaaaataaaaagaaacaaaatgaaaagaaaagataattcaaaagaatcatctaaaaataaaaagaaaaagaaaaagcacgacaagtatgtctcgatttatttagtatacactgagttgaatgaaactcgtgaaaatatatttcttgcaaatgaaaatatgattgcattttgcaagcctgagcgcatgaagcatgcaagacataagcgagactcaacaaaatattgccgattttacaaagacatagggcatactatcgaagaatgtcgacaactaaaagatgagatagacagtctaatctcgcgtggatatttcagacaatatgtaagacatcaaggaaatgagccaaaccagcccaacaaccctaataacccaaataaccagaggatacaacctcccctgttgagggcgaggatatactggtcatttcagaagggccgcatctcgttggaaatagtaataatacctaaaaaagatacatcaacgaaataaagaatggacaattgacatttgctctagaaccactaaaaagaggaaaattagatgaaccttcgattatcttctcggaggaagacacaaaacatgtgcagtatttgcatgttgatcctctcgtccttacagttcagctcgccaacaaaagagttaagagagtattgttggacaacgggagctcagtcaacatttacaaggatgcactgaagaaaatgaggttacaggatgcgaagttgaagccttgcatggtaatcttatgtggattcacaagtgatagtgtcgccagccaaggcatcatagaactttcattaactgtaggagagccaccattatcaacaacgctaatgcaagaattcttagttgttgatcttccattaggttacaatgtattgatgggtcaccctgcattgattggactaggggctgtaagctcaatcaaacacttatctctaaagttcccaacataagcgggagtaggagtagtacaaggcaactaattgttggctcacgaatgttattgcatagaaggggagaaggaagatgaggatctagatcccaggatccaagacaaaaataacaagctcaaacctattgaagagctggaagaggttattttagatccaaataatcccacaaaatgtgtgtacattgggaagaattcggatgaaagactaaaataacaattaattgattttttgaaataacagagaaaatagcaacgggatacactccattctcattagcattcgactcggaggcaatgttaccagtagaagttaacattacgacccgtaggcgtgaattatataatcaagaagaaaaccaagaacttctgaatttttccttggacttacttgaagaaaaacgtaatgagtcgcaaataaccaattcagcttatcaacatcgaatcatgagatattttaacaaaagagtctaaaaaagacttttaaaagttggagataagacgagtatttactgttgggttttatgcnnnnnataaaactcatttcaatacaatcagatttacttattaatatagatcagaaatatcatttaatgttgcatggttcac

SEQ ID NO: 30464 - DNA, 1074 bp, Cannabis sativa
  modified_base (39)..(67): a, c, t, g, unknown or other
aatatgcaaatcgaatttctgggaaggtaagtttggatnnnnnnnnnnnnnnnnnnnnnnnnnnnnntgaactgcatatgtaccaaatattattactataacttaataatcaatttttggtaataagatagactcatagactataaagaattaattttaaaactacgtaaaaaccttcttgatattattactataactattattgttattctaaaatatatttattaaattaatatttagttatttgttaagaaaaaacggtgttaacagtaattataacgaatactttgataaaaaaaattattaaaaaatagtatttcaacatgtaattttaaacataaaaattggctaaaaattataattagcaatccaaattatatttacttagcaaatgaacgtgtttttttgccaatatatatttatatacaataaaagaatggatcatcatataatacaaaaacaaactacttgtttttgttggttttttttatgttttatgttttttcttatatattatttattttggtaaatgattttctgtatttattattagtattttaaagtgtttaatatcatactaatgtggtacctaataattagttaatatttttttggtcttttgtgtttttattttttatgatgatttctgtactaatatttttggtaaatgatttgttgtactgttattaatatgtcattccttaaggtgctcaatatcatattgatgtgctacttaataattaattagcatttttctaaatcatttattacattaaaatttgtgaaaatcgatatgaaaatacaccaagaacggtatgctagattttatggtacttggcagttggcacattaatatgtcccttaatatttttgttattaatatatgtacatatctttattaacttctattattattattattattattattattattattaagtttgcaagaatatcttcaatgagatgtaaaaattacattatattgcatcaattttaggtattatatttcaatgcacaaatgaaaaacttgatacaaaatttatctattgtttttttatttgtttttttttt

SEQ ID NO: 30465 - DNA, 3354 bp, Cannabis sativa
ttttttaaaaaaaaaaaaagataagtcagggctatagcgcccatgagatatttcctcaataactcatgtgctaaaattatcttttcttgtgtatttttttcagaccggagctatagcgcaggaatttggcgctatagcgcctaacacaatttttgtttttgtacttgattagtattttggtcataacttcttcaatacaactctgaattggacaattcaagatgttccagaaagttaagaacgagatctaaaactttcatgttgagcttaaatccacttctgcttataaggttaccaaaatttacaattaagttctgccttgtaaaatcgagctcgccaacttccttttttttccaccaaaatatgctaacatccctccaaatgactccaaatgcatgattagtcttcaaaatagcctaataaattataatcacactaatcaataaattaaagaatcaatttaagaatattaatacataaattagctatatttataagacagaatatcaacttatcactaccttcagtagaacatttataactcactcaatattgatttgattgatgcgattcaacttgcgtttcgatgctaatttaatgttctatcatatctatcttacacttcaattgcaattatgaagttatcaacctcaatttttaccccaagtaagttacaaaaataagctccaagttacacacagcgggtcccgccaagctctgaaaattaactatcaacttcataagttaattttgatcgttggatcatcatctacgatcaaaattagccaatttagattgttttcatattttgaattaattttttctatatttgtgggcctccttcacttataaaaggagaagtcccttagttcatttttcacattcagaaaactacccacaaggttaaagcttctctctctaaaaattaaaaatttgacacttaacctttttttgtaatatcatctcatgagaaataaaaactcaaagtatatgtagctccattattgtcgtgatagagggagtgaactacaatagatttgttgtgtctctcttataaatacttaacaactattttactctcatcaatctagcgagcgggtgtggcttaggaatctttgtccaaacttctgagtcaacaatatgggatttaatttttcttatatagtcttcattgtacaattaaagttatataatcaatgaaactcttatttaaatattttctcatcttcatgcgcaaattaatttcatttgagaaaattttatttttcagaggaactgaataaatataagatttagggtttattcacttaaatatatgcaacataaagtatattgttatgtagtaaatatatcgtaatacatagaaaataatactcgccatataataaagacatatagccataattcatatatttattatttagcaaggataatcattgagtttaagtggtacactagtttaaatatcgatcaagtgaaagaatataaaaatattttcataataataaaattattaattgtgttgattctaattgattatattcaagactcaaatctctaaaagcaaacagcttcttgcaaagttcaaaaatcctgctaatgctcttgatgcagaaaaatttgtaatggaaagaaccaactattttgagattctagctcatcaagaattatactggaagcaaaggtctaaacagtattggcttcactcaagggacaaaaataataaatatttccatgccacggttagtgctcagaaaagatcgaatcaaattcatcaattacaagatagtagcgacatctagaagaactggaggatcggtcttgataatcttattaatgcctattttgtcgatctttttcatgctactgacacttattcgctcttgattgttgataatattaaagtttctgttagtgctattccaatgaagctctattgaaatcgattcatgatgaagaagttaaatcaaccatgttctccatgcaccctgataaggctcccgggcctgatggtatgggtccttgattctttcaacatcattgggacgttgttggtactgatgttactaaactagttaaggagttttttgactctgaagctatgccagatggccttaatgacaccaatcttgatataatccccaaaagaagaatttttctataatgagtgatcttaagcctatatctctttgcaatggtctttataagattctttctaaagttcttacatgtatgagagaccttattgaccaaattctctctgatactgaaagtgcatttattcctgggtgtctcatctcgaataatgtaatgattgcttttgaagttatgcactacctgaaacgtaaaaaaaaggtaagaaaggcttcatggctcttaagcttgatatgagcaaagcctatgatggagttgaatggagtttccttagggcgatgcactgtatgggctttgctagtagatggattgatcttgttatgacttgtgtctccacggttcgttacaaagttgtacatggtggtcatgtgtttatttgcccgtctcgtggcattcatcaaggtgatcctctctcaacttatcttttcattatttgtgttgaaggcctttcagcttcaattcaaaaatttgaagcaaacagacacattcaagggtgtcatgttgctcaccgtgcaccctcaatcacacacatgttttttgcagatgacaacaacttattttgccaagcgacaagaggtgttgctgatagtatctccactttacttcagtcattcgaaaatgcttctggcccaaaaattaatcactcaaaatcattgatcttcttcagccccaacactgattcttcaagtcgtgttcaggtttgctctactctccacatgattgaagctctcgaaggaagcctttatcttggcttccctaatattattggccgcaataaaaatgccatgcttggtttcataaaaaataaagtcattgcttgtatcaacagctaggatggaaaatttctgtctcgtgcagggaaagaaatccttcttaaaatagttattcaatctctgcccacgtatgctatgagtgtcttccttttacctcttggtacttgcaatgaaattgaaaaattaatggcaagcttttggtggaaaaccaatactagtaaagggtgtggcatcatttggatgtcttgggatcgtttagccattcccaaagaagaaggaggtatgtgatttatacacctccacgattttaaccttgctatgcttactaatcaaggatgactgttacgaaaattatgtttattacgcaagtgtacgtatcaagtagtatctcacgcaagtgaggttgaaccacagggaattggattaa

SEQ ID NO: 30466 - DNA, 2096 bp, Cannabis sativa
atgcactaaagtaccaactccgtacttgtgttggtagagccctaattgtactcccggaaattactaagtgttgtaccacgaacacgacgtacccagagtatatagcattaagaaaactattattgcggatttaaccatggaagttgaatatatagcatcttatgaagcagcttaggaagcagtttggttgaagaaattctacaaagctctggaagtagttctagaagttaaaaaatcactagtgctctaccgtgacaacagtggagttgtggccaactccaaggaaccaaggaaccacaagattagcaagcatatagagagaaagtaccatatactaaggaatatattagagaaatgtgatgtgacgatcttgaagattgcttcagaacataacctagtagatccattcaataagacgctaccagtaaaatcttttatgggtcctattgctaatatgggactaagggagatgcccaatgcgcttttagggtaagttggagattgttagggtttatgccttgaaattcttgtaaagacatttctgattatcaaataaagagtaaatatttgatatatgtgtgaatattaagttattaatatttattattgaataatttatattaaatatcagaaaattccttatttatatatgaggttgtggcttgtagctgtatagagaactaagaccacttagctatgaatcaaatagtctaaaacatattaaagttatggaatctttaatcaatgtttgctagtatggttcaccgatgtctgctttaaagagcaagtaatctcggttcatattactgatgtagttagacatctaagtgaaggtgttgtatataataaagattatatatgataaggaccgatatgaataaagttggctttataacatgtcatttgtcataaaaaccaaactcatatcataacgattgtcaatagtagatcgacctaaattttgagttatcatgaactcatgttgatgttattagtttctttgattcactcgttaaagtttctagagaagttgattcttaaacttttgttttgggaatctaataatatggatggcttagaatatgatttacaattatataatcatgactttcataatggatcgaatgttggttccctttaagtgttaattttggaattgtaatgttgtgcgaaaattcaaatgggatcttgaattatacttccactagtgaattaatggaactaaaggataaagaagtaattataaaggtaacatgatattttgactaaaactaattaggaagcaacacaagagggataatcactggaattgattatatcaatggacagtgcagttaaactctaaaatataattctagaattactatgagtgcgattctatatttatagtggagtaatcatagaattaataaaaaatgaattatttggttgatgagactcaataaataatctaatttattagaccttacaattatagttccatggtccccgagtttccaccttaaaatactattaagggtcgggataagagtagtataataaagtttagaaaaatctattttgaattggcaaaatagtaattaattttttttaataaataaataattttcaaataaattaaatagggaaaagacaaaatttgttaagatgagatttgtcgagacaagatttttcaggacaaaagttgttagggtaaaagacaccaatcttatcctaaagacaatggtacgtgcctatagcgttgtcctgtccctatggaatttgtttttttaggttaattaatttaattaagtaaatatctaatgtgaaaagtagttataaatatctcaaggttgttgagatattctctcaagtggccgagagattctttcataaatattagtaactaaatttaattataaatatttatttatttaaacaattaaacaatgatttaattaaaaggatttaacttgtgtaaataaaagcctgatttgagaaatcagtacactcttttgttgcttttttttttttgaaataaggagagaaaaagaaagaaagaatttttctctcaattgttcttgctcatgtgttaagaatgttggaatttattttac

SEQ ID NO: 30467 - DNA, 2052 bp, Cannabis sativa
actaatcagattgtaaagagttttatttagggcgtaaaacccaacaggaacatcctcaaagaacgcaaggaacataagactcacacttcagcaaattaaattccccaacttattcagtcgacaagaacacttaaaagaattcttgtagattgtggggtaagtgttaaccccaaaaattagcacagctaattctcgaggttagtttattaataaccaatggacttacaatagcgcatttgacaagctcaattggcatgcatttcttaaagtcaccatcaatacttatgattctcgggatgcgtcgaagcgactcaaggaccaactgcctggtgattcacaaataagagaatggaaaagagtgagggcataaataagtgaagtcacaaatagggaccaagtcacagatgcatgtgtaagtgcatgcatcattgtatgtgcgtgtgtgggggctcgcacgtaaccatatgtggggggctcgcatgcgagccgtggtatgcatgcatgtgtgtgtgtgtgcattgggggctcgtgtgcgagctcatgtagggggcttgcatgcgagttgtgcatgcatgtgcgtgtctgttgtgtgcgtgcgagtgtcgtgtgcgcatgcgtcggttggtgtctcgcatgcgagcctatgtggggggtttgcatgtaattcgttgtgtgtgtgtgtgtaacgtgcgtgtttgtttaggtgggggctcgcatgcgagtcgtgatgtgcgagtgtgtgtcgtgggtgtgtgtgtgtaagggctcacgtgcaagcccatgatgaatggcggctcacatgcaagcatgtgtgtgtgttgtgttgtatgtgtaaggagaaatgcaagtacgcattgaatggaatgcaattggaggaggaatgaaaggacaaggcatgcatggaaaaaagggaacaaccccgcctcctacacgctctgagagcaacaaggaggtacgggtagtggaagcagcacacttgcaaggtctgacgacctggtcaagggtacacagtagccaccacctctgcgacctgggacaacttgacatcatataaaggtacgaggcgcaagacaacctcttacacctgtggtttggagcccgaatgcaacaacttgtctatttgggaccaccatgtaactcaggccattagagcctataaataccccattctcaagtttgagagggggttggaaaatcattcttgtagccaccatattgagagtaatagaaagtttacattttctctctactttgagaaagatatttgaatttatattttatctttttcttcatcttagttttgagtttgaagtaaagtttgattttccaaccaacaagttcgttgacgagttccaaccgtcaacaatacctaagacaaaaaataatggtgacattggatctccctatcttagacccctcttacattcaaagtaatcttgagtcgtgccattaaacataagtgaaaaccgtggaattctaatacaaactataattagtctgatcaaactttcttggaaactaaaaacagttaacattgcttcaataaagtcccatttaactgtgtcagaagtcttcttaagatcaagtttgatcatacaattgagttttgaatttttctttccatatgattgattgcccatcttccatataattgattcataaaatgtgaaaagtaagtattagttatgctataattgtttattcataggtttgatatataacgaatgtatgtaatttgtgtagcatttggattattgcttattgctgattatatatgtgttatacctcaaaagggtataatgtctgggaggacccctggattcctcattctaaaggtttttgtccaaaaccaatcaggggaggtactacaaatctcaacagtgtatcggatctgttacttcccaatggtctctggaacgttaacatgctgaaagaaagttttgatcatgaaactgtggctgccatcttaaaagggggccacccctcgggccgtggagcagacagatggatatggactcaaaacagtaatggaaggttttcttgcaagtcggc

SEQ ID NO: 30468 - DNA, 2871 bp, Cannabis sativa
ctagtgaagttctgtccacaatcagccaataagccactttctcggtcacttaatttgatctttgataattttttttaatataatcaacttgaagataatttctaacacgaatagataaagtaatcggttttatcataaagcttctacatcagattattataaagttttattttgacaaaaaatcaattaagagtattatcttagaagatacaaagttcaatttgtcaattaacaaaataaaaaatctaacaatttttgcaaaatactattgggtgtcttctattacttttctccatttttgatatttcgggaagcttttcagagactcggtgtaagttttttgagcttgcttaaggagagtgtggcagccacactgatcgagggtgtttcattagcaagagattgagttttgctttaagcttttttttcttttgaaggttcttatgcttcaccatcctcatctccattaagatttttttagtgaagatcataactttattatttctatgtactgtacttagttcaacagctcatgatgtatccagtaatatcgattgaccattccctttaaaaatcaaaagatgcatataaaaagacataacagatagaaaaaaccagaaaaacacaatgtaacaaaataaaaagtaggatattgtaaaactgataaataatactgttcaagcacaactaagtgcaaaacaaaacaaactcaaacggaatgctaccaccgccggtcgagcacccaattctgagtgcaacgactggaaagcgagcacagacaaacaagacgatcccaaacaaaaccgaatagatagttcaaaacaacacagtaaaaataaaatgacaacttatttcgataaacagataaatagttcttccaaacaccatccagtgcaatttccatttgcaaaagtcacttcttcttggcagcagacttggtcaccttagctcctgatgggtccttcttctccacactcttgatgacaccaacagcaacagtttgacgcatgtcacggacagcaaaacgtccgagtggtgggtactcagcgaaggtttcaaccaccatgggcttggttggaaccatcttaaccatacctgcatcaccattcttcaagaacttgggttccttctcgagctccttaccagacctacggtcaatcttggttaggatttcagaaaacttgacagcaatgtgggaggtgtggcagtcgagaactggggcataaccgttgccgatttgaccggggtggttcatgataatgacctgagcagtgaagttggctgcctccttggcaggatcatccttggagttggatgcaacgtaaccacgcttgagatccttaactgccacattcttaacattgaacccaacattgtcaccgggaagagcctcgagaagagcctcgtggtgcatctcaactgacttgacctcagtggtcagaccggtgggagcaaaggtgacaaccataccaggcttgatgacaccagtctcaacacgacccactggcacagttccaataccaccaatcttgtagacatcctgaagtggaagacggagtggcttgtctgagggtctcttgggctcagagagattgtcaagagcttcaagaagagttggacccttgtaccagtcaaggttggtagacctctcaatcatgttgtctccttcgaaaccagagattggaacgaatgggattttgtcagggttgtacccaacctttttcaagtaggaagagacttccttcacgatttcctcatacctggacttggagtatttgggtgtggtggcatccatctgcaagaaataacagaatcaatgagaatcatttgataatcacaaatacatacaattaaccaacaaagcatcattacaacagtgtacaaccaaaacaaaacaaaggccacccgaaatggctaaattctttgcatatacctgtagacaaaacaaaagttaaaaagtaaacgggagagagaaggaattgcacccccaatagttcttttttggagaactacaccaacttggacatctctccaatagcaagctcaaaattctaccaataaagtgggctcttttcacagtttcgaacaacaaaaatgtccaagaatgccaaaattagtattcaactaagcattttcactgtgagagagtccctttatcggatagagtcatctgagggttagttataaatatccaaacaatgcacaaaaagtaaaggtaaaccagagttgaactgattttatcaccttgttacaacaacagatcatctgcctgacaccaagggtgaaagcaagaagagcatgctcacgggtctgtccatccttagagataccagcttcaaaaccaccagtggtggaatcaatgatgagaacagcacaatcagcctgtgaagtaccagtaatcatgttcttgataaagtcacgatggccaggagcatcaatgactgtgcagtagtacttggtggtctcaaacttccacagggcaatgtcaatggtgataccacgctcacgctcagccttaagcttgtcaagaacccaagcatacttgaatgacctcttgttcatctcagcagcttccttctcaaacctctcaatcacacgcttgtcaattcctccaagcttatagataaggtgaccagtggtggtcgacttaccggagtcgacatggccgatgaccacgatgttgatgtggatcttttcctttcccatttcgaatcaaattgcaaactacaaattcaaaaacccaaatcataataaacattaaaaacccagttaaaaatcaaacaattttaaacaaccataaatttatattaatctaaagaatataatgagaacatcatatataaaagtagtgaaggtaaaaattaaaataaa

SEQ ID NO: 30469 - DNA, 4055 bp, Cannabis sativa
  modified_base (56)..(56): a, c, t, g, unknown or other
tagaaagttcttatttaggatgttaataaagatacttgtgagtagatctaagatcntggtaaaataaattccaacatcagactgatatcaagatcctcgaacatgtcctggaagatctctaaattacaacttttatcatccaatctcattaggctatgaactttagcattcaccaaccccggatgatgagaaacaacaaatggattatccatatcaggtagtcattggtctcctaagacagaaactgaataaccattgctcacttgccactgtatacccttacgaacaatgtcctgtgcctcccaaatactcctccagacaaagtgtggattattacctagttgcgctgtaagaaaactctcatttgggaaataacgagctttataaacttttgcaaccaatgacgggtctagaaatcaaacgccatccttgttttccttgttttcccagaagagcaagattgaagtcacgcaagttcctaaagcccatgccaccaacagttttatgatgacacatatgatcccacggcatccaatgaattcctttcttactagtagaagaggatttccaccagatactcgccatttgaccctcaatgtctttacaaatctcaataggtaacaagaaaacactcattgcatagtttggtaaagattgagccactatctttatcagaatggctgatgtaagtgcaagtggaggtcaaaaatagggagttaggggaaagtacaagagaaaaaatattgaacaaaacctggctaagcagcctgcaggtcaaaaatgaaatttagatttcatatgatgactggggccccagtagacgactatggcaacaagtttaacaattacatcaaatttcttgttcgcaataccattcctatgaacaagtttgagtttgaggacgttgacgatatttttaacatagtaatattttgtaaataagtaaatttttaataatattttattaattttttatagtgtttagaaataggctaatccccagacgggggaacttcccaatgctgtggatacttttacaaagttccactgtaaggataacaaatggcgcgatgaacacacacaacaactgtatgtaagtaattttatatttttaataaattcattgtatattttaatttctttttaactctaacagtttcatgaatttttttgtaggccaaaatggttgagattcgtgaaactcaaccagtgccaaccaatgtcccgcgccagtacaatgtcgaccccacccaatttcttgtagatatgcatgttatgaaacaggtgttgggtgagcggtcatgccacatgagaggactgggctagttaccgagacttaagacgcgggcaaaaagagcaactacctggacaggtccctccgggcagtccactgtcactcaagaggaatatgaggtactgaagcgaagggtggaagagcaaggagcacggaacgagtggcaacaacagatgatgatgactcagaatcaaatcatgagtgcgttccaactacaaatgatctaattggccaacgttgttccatgatttaacatgtccgagatgcgtccaattctactgattccaccatttcagcctcctagcgatgttgctaggtcctcctcacagactgcccattctggtgatgacgacaatgacgacaatgctgttgtcgatttgtagttcttttagtctacagtgtatataatattattgtttatgaactaaaaatacttttatttagtttatgacatttaatgtagttttgtaattacaatataaatttcagttttataatatatttgatattatatttatatttatttattatatttattattattattattattatttttattatttctattttaaatttaaatttaattatttaatttaatttttttttttaaaatacttttgccaatgagttcatgtgcgccggtgtttaatatttttaatattaattgttttgttggcggggtaactcaaaattatttaattttttattattaaatactattgtcgacgagtttatgtgccgtaggcgccaaattgataattggggtcaaattcgtgccaattcttttgccggcgcattaactcgccaacaaaacctcgtccaggggacctcaaccgacacccttttgccggcgttgtacttatggcaacattttaattcgccagtgtaaagtattttgccaatgcatttactaatgtcgccggaaaaagttgatatgccgacaccctttgtcggcaaaaaggtcgccggcaaagctatgccggcaacttccctttagttttgctggcgagtttagtcgccggcaaaatgtgtttttcttgtagtggggagattttagtaacttggatattgctactgttagttcatctagtgacctgttagatgttgcaggtctgtccagttagcttctgagttagttttttcagttaactaacttgggtatctgtcttaatgagttgcctatataacgttttgagttctacttctttaggtgacaatctagagatgatttagatgacaattaagtttgtaatgagtgagaaatgttgttaaagatgatgtgtgtgtttgatcacatctttctcaagtgagtttattcgtaaggtgcaagacacctttgtttgtgagattaaactctgtattctcctttgtattcctctatttttgaagattgaataaaacttggctaaaaaacaatttcttccgaggattagtcaccacaaaaaaaaaaaagaaaaaatgatgaacctcattaaactttactatctttatttcatttaggtcattccaaatttaatttttggtttatatatcattatttgaattttacattccagttcttcagtttttattttatttagttcttgataaatgttaatttaccaatcacacaattcaaataactgaaagcctatatatttatatatatatatgatcatgtaccatacataatacatatgatgaattgatatctgattactactagaacttatatattaatgctttttgagaaaagaagtggggttatctcatgtggtactaatgaaatatgttcaaatgtatagtttattttagaagaattaatattaataaggcatggttgtggttgtgtgtgtaatattaatgcaagtctttgtctatgataataataatgcatgttattaggggaatatgtagtctttgtccccatgtgaatgaaaacagaacatacaatataccccctactcctcagcccacatgacacatagtcctaagcttccaaaagtactactactactactcaacactacaacatcaacaatatttattctttaagatagattgtgaagtgaagggccaagagccattcacaattctatcaacttatatagattttgtgccacaccaagaatcccacataaaaatttccttatcaagtggaagaatttcggtgccaattaatttcatcatctctattatttattttgtatgaaaactatgctactatactttttactattaattaatattaacgaatccctttactaattatctatctatacgattttgtaaacatattcgcatatgacttatattctgcaagagaatcattaagaaaagaagaaggtatatttatattatatatatagtatgtatatataactttcacgttttatataagcatatatatggcatatatctatcgcgtgcaacaaataatttatattaaacaagcctcttttgttatcttttattacctttctcaagccaaacattagctccattctttcttccaaatccctttcgcacgcggaattgacgtatccaatagtggctctctatctaatttttatgtatatataatattatatagatacgataatatacgtatatatataatattatatatataattaaatatataatgtacaaatagtatacgacgaatccgtagagatatgaaaatttgatatttcttctaaatgaagatacgctttttgatctttttagacatgtgtccgatcctataaatccaaaatttctttgagaggattaaaaa

SEQ ID NO: 30470 - DNA, 1894 bp, Cannabis sativa
  modified_base (282)..(300): a, c, t, g, unknown or other
  modified_base (734)..(736): a, c, t, g, unknown or other
aataataataataataagtttatgaaattgttttaagtgatgtatgtttttagataaataatataaacataatattataacaattgataaaatacaatacaaaaattatttaaatttacaattaactaaatagttataaaattaaatgtatatatataattttctaattattacaaaacttcacaatgagtggctacaaggccggctctgagttgaaatggactataagcgaaaaatcattttttgggttcttactataaaaataaatggtatttttaaaannnnnnnnnnnnnnnnnnnatattttttaaaaggtattttttaatttgagcctctaaattgagtgggccctaggcgcgggcctagctcgcctatacttagggccggcccagagtggctatataatgactatatatatatatattttttttttgtaggaaagcataaacgaatttaggtagctgagagttttataacattctcaatacaatttgcttacttgggttttgagtttttcttcactttttgcacattcgtttatgcacataagccaaaaaatagggacaattaattaggttataattttattggagttcttatatttgaaatacgatcttaagactctgctaaagatatacttgttgtggacattgtctcacatagaataaatggtagagaattgagccatatataagaacatgtgttactccactcattgccaattggttttgagnnngaaccccatgattctcaacaatacttttcatgaaaagcgatttgaagttatcctatgcctaaaccatgtttgaagttatcaacattttttctttccaattttctttgaatacagtaaaaagttcaaaattacgcaattttttcagattttatttgtttgttaggcactgtgagaccctcactaagatctgcaatggaaaccttaatatcactcaggattgcaagacatctggtgacaacaacagggtgatttgcatttgccagtgggcatcgtgtagcagtagggagctgaacatgatgtgtgggcatgctatgagtaaaactcatattgtcccgagaaatgaatgtaccatggtccttaaataagtattaaggaatgttgaattaatagttagtttggaaaaatatgaaactatggccaaggtgataggctacatgtctacagaagaaaaatcatatatgttcctggttgtggattaaaagttcatattgctctttagagggtggtgcatgacaccccaaggaaaactcttgaggacgatcctaagatgtcggttgtaggcgataggattgctcctagccaacaaaagagggttggcttaatggttcaaggtgtgggatccattggtgacacgatgtgtgggtgtccgcacacacgtgatgtgcatgattagtcttcaaaataacttaaaaatttaaaattacactaatcaataatttaaagaatcaatttaagaatattaatacataaaattggtcatatttatatgacaaatatcgattgattagtgcgcatgcgcatgatgtgcatgatgtcagttatctcagatggtgtgcgcaaggggtggacacgtgagtgacagttaccaagggctatctaaagagatgcacatggacttaagacatctattggtgaacatgggaaacaattcagtctgaaggcttgaccatgaagcacgtgggtgtgttagtgacggttagcatgtgatgttgatttgttgtaagatggttggtctagcaaagcctaggtgcttagggttgtcaactgtaccctagtattgtggtattaattgttgggttttgtgccctaaataaaacccatttcgatataatcagatttattaattaataaagatcagaaactgcattttatgttgca

SEQ ID NO: 30471 - DNA, 1707 bp, Cannabis sativa
caagcgtcaaaagacagaagaaaaagcagaagaagaaaatcatgagccagcgtcttgaaagaaagtagcgagcgtgatggggtgagtggtcttgtgtctcaaacttgttgctctatggttcactttatgtgcaagaattgctattgatagttggagcaacgtattagagaattagaattttacaaaaattttgattatggaacgttttaaattatttcattttaagttctaaatttgttcaactctcactacatatagcatgcatagtgaagtgagacataaataacgtctattgattttgtgaaattggccgttattttgtttggtatatttaataatcttctcccttattatttttgctctatataaatttaaaattagattttgttccttttcaaatttactccattatgttatgtactacgggcgagcagaatatctgcttaactacgaaatctgtcttattcgctgcactacgtagtatggtttggtttggttaattttatttgtggtttagtgtggttaagcaaaataaagattaaaaaactacaatatctgcactgctatgcatatatagtattggaaattgtagaccctatatagttttcgcatttataataattttttagtctattttttttaatgatcgtatgcgttgtagttatttaagacaatttataaatttttagaaaattctaaatagtttatactcttgaaaataaagtttaaataattacttaccacgtgtataaaaaaaataattgcgcgtgcaataaaatacataaattttactttcatcattgtaaattattcggaattttttgaaaatttacaaatgatcttaaataattataatgtacgatcatgaaaaaaattacactaaaatttttttttgtatgctaaaatagatattctaccgaaatatttatttagagaggtttagtgtagacttgccctataatattaatattttatatattatcattaacaaaagttgtttgatgtaaaaaagatatatatttcatgttatgataaatgacgatgtcttttttttggtctttatttttctataaattattagttttttatgagtatgtttattaaaaaaaaattatatttttttaatatataaaattagtaatttaactgtggtatcaataatattttgcactgcatataagcaggtcgtttgcagttaaggaatataaaattaaatatgcaattaagattttggtttttcttttttagaaaagtaattttatgaaaaaaattcaagaaaaagttaaaacatcgaaagtcaagtaaggataacgagatacccttaggtaatcagaggggtaaccaattactttatactacttttctcataatttttaaactttttcttaaaaaaatttataaaataactttttagagaaaaagtcatacttttacaaacttatgctataatgacacgtttactaaactgtatttaaaatcagaataatcaataagagatatgaatgagtttcaaatatagaataatcaaaagtccttaaatctaacaatctcaatagttcaggagaatttttaacggccaaaaaagttcagggggcatgattttatacatgtcaaagttcgggggaaaaaaaatcctaattagccactattttattatgttatttactaaactggaaaaaaaaaatcagaattttttaattttattta

SEQ ID NO: 30472 - DNA, 2539 bp, Cannabis sativa
  modified_base (2461)..(2462): a, c, t, g, unknown or other
ttttaaaaacttcaaaaactaatttttgttctcatttctaaaaacaatttttgaaaacaaaaaacagaaaacaataccaaacatgctcttaatgtctaaatactatgtatctactaccatttaatatttaaaataatataataagaaattaaatagggggattttcaaaaatcttattttttttatattttatttataattttatggcccaaaattttttatttccaaaaatactcttgttaagttctaacattacaaaaatacactttgttaagtaataaataagaaaacaactaaaaaaataactagaaatcaacctcgcgacaactataaataaattataaaataactaaaaataactaaaaaaaaaaataacatcatgataactatattacaactataaataaactataaaacaagcaaaaaaaaataatttattgtttttactgaagagaggtatttttataataaaaaagttcaaagcgcaaaaataaatttttttctgtattaatgtatttttgtaattttttttttaaattttcctatggtatgtaaatttttcaataaaatagttctatatctcaatttaatattagatttggactctcgctctctttttaattttttttaatgtccatttcatcatgggttttttagagcatctctaatagtaaaactttagaggatgtttggtgaagtagacatattatgtgctaaaatattgagatgctatactattgggaagaaagagatgtcattctagaaatttgcatgaatgctatgttgtagtatcaatgttatttattattttttaataaaaaattgaagctaaaaagttattgtagctaaaaattaggatatatattaaataataatgtgtgagattataattatatcatttttaaagagtgatatacattgaagtatttttagaagtaagagtctcaaaaatgatgtagaagagaaataaaataaaatattatattttgagatgatgtgtaaatttttagcatcctttaagaatactatcattagaaattattctaaagtatttttacacaaaggggactgaaatgatattttattttcacaaatttacgttttttattatcatttttatggagctctatgaaaaaaaaacataaaaacaacacgttgaacaatataatataaatataaagcaacatgaataataatgtataaacaatatagtataatgttgctataaacaacgtaaaaaataacaatacttattttgggaaaaatattgaaaaaactgtaaactcacagttaatttaaattttataaatgatattatattaaaaaaaaaaccccaaaaatgtgtctccatgatcactccaaatttttttatttatttatttatttttgcaaaagtgtttagaatcactttaaaattcatgacgttcatgatgtagacatcaacaattgtcaaaagataactaattgtttagccaaaggacatgctcatccaaatcaagaactgcgaagaaaagatgtaaatcaacaattgattaaaatgttccttaaaaatttagataataaaactataaacaacaactagcctggcgaaatagactatccatgactgaaaaacataaaaaagaagataacgatagtgaaatcacaagacaattcacaaacagttgagggttttctctaatgaaagtgaagtgtcgagtgtgaactcattgtagatatagtggtttggattggtgtcattgaatcactgtcgttataaacaccaacactaatccctcaatagcaacatgaaagttgttgataagcaacacgaaagttgtgtagcatcatttttgtctactcgtgttggtctcttaacctatgcccttgttcaaggttagcgtcggttgttcatcgatgttatagctcaatcagttcagctcaaaattgtttgcacctattcaaaccgatgctaaaactttgtagtggtaagttgatcctttgtgttcacttgtcaactcatcgtgttcaagtgtcgactagatttatcctacactatcaattgatcgacgtaattagtatctcatatattttttaaatgtattaatttatttgacttgaataatacattaaattttaaatcaaaaattgatgattaagttattcaacagaaaatatcaatatagtgaacaaaaattttaaaattatgaataagttatgctatattcatgtaagcaattttttttttttatttaactttagatttgtgtattttatgaaatataattatactttaattataaattaataatttattgatatactgaatataaatgggtcgatatattttaatttcgtatcacacaagtcgaccgtaacccaattaaaaaattatcatgttattggggtttgacgaaatccagtctctatttattcttcacataaataaccaataataataagggataatttcacaaatgcnnaaaaacaacaaaaaaaaaaaataacaaaaatacggttttacgaaattttaaatattttacgatttttttgattttat

SEQ ID NO: 30473 - DNA, 1580 bp, Cannabis sativa
tccactactattttaatattaatgtaccgcatcttggtactggggggttattattttggcttggaaaattgattttagttttgaatgtgtctcttgttctcgtaaccacatctcgggtttggtctattcggatccccctactcacccttggcttctatcttgtgtgtacggtcctccttacctccatgctaagaaaaaattttggacttacctcatggttttaggggatagatttgggggtccctggttgatcattggcgataccaactttgttcttagtcattctgagcgtgaagggtcgtcgggtagggacccgtttgtcccttttatttctaatttggtggactctacaggtctgattaatttgtctatccaaggtgataagatgacttgggataaccatagatctggaagtaaccatgcaaaatcagctctggataaaggaattgtaaatggtgattggcttcatttgtttcccaaggctgttctttagtcctctcacatgagcaattcagatcatagaccgttatgtcttgattctagggggaaccccccaaaatttaagagattgttcaggtttgaagaggggtggacgagagatgagagaagtaaactgattgtggccaatgcgtggaaaacagttgagcatccttgggcccgtactagtgccttcaagaaaataggagctacgcgtgtggctcttcttcagtggaatagaacacaatacggtaaattggattggataattagagatctggaatagaaacttgatagcctccagaggttacctgctggagtccgagattggaaggaggaatgtgatgttcaacgattgttcaacgaatctttgactaggaaggcgatttattggaagcaaagggcaagaattgattggctcaagaatggtgataaatgttctaaattcttcttcctctctgctactattagaggaagatgaaatgccataaaaagtattctgaatagtaataatgtctggattaatgatcgggagtcaattggtcgcgagttcgttgagtttttcaaaggcatcttctcggtgtctgatcctggtcaggctatggactgcagacatctctttcaggttagaatttctcaggaggatcaagatgggaccaccctctgtcctactcgagatgaaatcagaagtacgttatttgccatgaataaccacaaggctcctgggccggatggaatgtcagttctctttttcaagcactattgggagtctgtgggcgatgccttctgtgatgcggttgctgatttctttgaatctagcatgatgcatcgaggtatcaattcgacaaatgtggttctcatcccaaaaattaaaaaccaaaaagacctaaccatttcaggcctatatctttgtgtaatgtgttgtacaaggtcatttctaaaatagttacaaatagattgaagcctctccttccttctctaatttgccctactcaggcgacttttgtcccgggtagaaatattcaggataacaacgtgctcgtctaggagatcatccactcttttaacaggaaaaaaggcaaggagggatacttttctataaa

SEQ ID NO: 30474 - DNA, 1210 bp, Cannabis sativa
  modified_base (1145)..(1184): a, c, t, g, unknown or other
caatccaatgcaaccattaatgcaacaacttctgctagtatgactgaaaaattccctacaataaccaacaagcagaggataagcctaacacaaatactccataaaaataaactacctccaaaactatacttacaagaaaccgtaacctaccatccagagaaaactacaacacttatcaaaaaattataattcctaacaataacgttacaagattaccttccataagagaacatgaatcacaatatctaaaaggtgaggatagtatcaacttcttaagattggacaaaacatacaccataaaggaaacactgttgctcaccctcataacaaaaaaatatcataaacaataaagaaaaaaaaacacctcctgtcataaaccattaaagtcataaaccataccaaataaggatctacataggtacccaagaacattcctggtagtatctcgaactattgctccaattcctttagtattagaattaacatccagcgacgcatcaacatttagtttatacactcccaaaggcagcttaatccatcattctggagacatgcatgtcgacctcttagtcataatattgtgtctcgaacattgactatattcaataaataacttaaagatttgtgagaccacaacatcaggagggttggctttgcgacaatggacaatttggtttctttcgccccaaatataccaagccacaataaggaacaattcgtagtcacatcttgatagtacctccgaagccttcagaactatttgtttgaatgagatatccattgagagattatacaatagagtaacatgtaattccttccaaactttcttaaaaccaggacataggaacatagcatgactgttttaatccacactataaccacataaaggacaattagtatgatcgaccattttccttttttggagccccacatacgtatggagagcatcatgaaatccacgccaaacaaaggttaaaactttctttggcaaagaagttttccaaaactctttccaccatatagagaaccaactcttaaaaggggaaggattaaaatgagccaactgtgttgccacaaagtatccacttttcacaaaataattaccctcaactgtatagtgccatatgttgggttttgtgccctannnnnnnnnnnnnnnnnnnnnnnnnnnnnnnnnnnnnnnnaaagatcaaaaataacattttatgtt

SEQ ID NO: 30475 - DNA, 3455 bp, Cannabis sativa
  modified_base (58)..(69): a, c, t, g, unknown or other
gtttattatcgttttagaagttcagatttaggatattaaacaacatacttgttagtannnnnnnnnnnntggtaaaatatttccaacactctacctcagccacggggttaagggggattctaattttcccgactgccaccagttgtaaccgtatacactgacctgttgtattacgtcgcgtgttaattctataggacaaacctggatatttcataagtaggtgggtcatgcaacgataaaagttgtaatttaattaccgcacacatggaaatttaacatgctcttattctgctaccaaactgctttcatgtttttctaatcatgcatatcaaattaaaactactgatacatgtaaagacttactgaattatttgtaaaccctactttagcatgttattgtgatttaaagctaattgtgctatatgttgctattcaatgggttaatttgatggacaacgtgtttaattaaaactttacttaattaacctataattagaataataaaatttgcataaattgggatcccatatttaaaaagtttcaactaaattacaaaatattagctacaaaagttatcgcctagcgactaatcaaaattcagcctgttgtcccaaagatcgaacactctaggtctaatcgctccgatatgtacaatctttattagcttgcactaaattaagatttagtaacagtgagtgcgagctaaatcctacctcgtgtcccacgtgtactcctgacggtggtaaccagctaaacccaaaaactcctgacttcagtgactatcttcagccttggccaatccctaacggatttaagttttcctggatcaaccatgatcccatccttactgacaatgtgtctgagaaatgacacttgggatagccaaaattcacacttcttaaacttggcataaagcttatgttctcttaattattgtaaaatcatctgtagatgttgctcatgctccgcttcagaatgagagtatacaaagatgtcatcgataaatactataaaacatatatcgaggaaatccttgaatactctgttcattagttccatgaaagctgcgggagcattggttagtccaaaggacataatcaagaatcataatgtccatacctagtgcggaaggcagtctttggaatgtcctcctcttggattgtcaactgatgataacctggttggagatcaatcttagagaagattgtcttcccttgaagctagtcgaacaagtcgtcgatcctaggtagaggatacttattcttaatagttaacttgtttaactcctagtagtcaatacacatatgaagcgatctgtctttctttttaacaaacaacaccagagccccagggtgacacactgggttgaaaaaaccctaagtcaagtcccctgaagttgaatcattaattctttaagttctgtaggagctattctataaggtgccttagaaactggctccgctctaggtgctacattaattacaaagtctatttcatgttgtggtggtaaacttgaaagttcatcgagaaacacgtctaaaagttcttgaactacctcgatgtcttcaggccaaactaattcagctcgaatggtgtccaacaccactgccaaaaatcattagcaatcttcttgtaatagatcttagccttcaacaccgagataactaggatttgggatccctgaacctatcccacaaacataaatgattatttaccctcaggttggaagataaccatcttccgcttacagtcaatgctagcaaaatacttggtcaaaaaatctattcaaagtcaaaattcgctaaacccaattctactaaatcaacactcaactctctactttcaattttaattagcatagacctaactcaccatttagagatagttaattctccgctaggcagtgtagttccaaaccttttattataattatcacatggcctactcaatttaccaattattctggctaccacatatgaatgagtagccccaaagtcaaacaaaacagatagaaagagttgttgactgagagctgacacgcaacaactgaggagctagcttctgcatcatcctgattaagagcaaacacccttgctagagcgggttccgcttcaatcttcttctcttctttctttgactgcgggtactctctcttgtaatgtctagttacactacactggaaacatctccgccctctacacttgcccagatgatgcttcttacagttaggatattctgggtaagtgtatcgagtttcaaatccactatgtcggttgcctcggccttggttctgctgaaacctcttgttctggttcgagccaccaggtgtaaaaggtgcctttctcttctaattagtggttaagtcactaccacccctaccataactagaggtaggaggagcaatcgctccacaaacaatttgagtctcccgagactcctgaatacaccgaactgcgccctcagcttgcaatttttccccaccatatcagcataagtggtggtctcatctgttgtgatcatcaaatcatgtttaatctttggatttagcccatccagatattttttcttcttgttaaaattaattggcacgattctcgaggtcaacctagccaatctatcaaactgggttgtatattctatgactgacatattctctttctgagtcatctgagtgaactcctttctcttcgcactacgaactgccttgttgtagtacttcacattaaataactcttggaattcttcctaggtaatcgtagcgacatcccgtgtaagagctaccatagctcaccaaaccagggcatcttcctggaactgaaaggtagcacatgtcactctgtcgtttctagtgactcccataaaattcaaaatccgagtgataacagttagccagtgcttggctttcatcacatctcgacctcccagaaggactagaggcgcccccttacggaacatttcatatagtggttccattcggttaggaacaacaacatcccacacttgcatagcaagggcgttagccacttgtaccttaggagcaggcattgtaggagcaccctgctacctcaaacactgaatctctttatcttgctcattaattatggcttgcattgctgcaaacttattatcccaatcctacgcagcctgcggtgggttaacatcaccccgtctgcatgccctacctcttgggcctctacctcggccatgaatattcaagggaaactaaactccctatccactactagatccgacctaattaccctggcttcttgtgttttttctggcatccattctaatagaacaacctgtaaaataatgagctagcctggattgattgcgattaagaacaattctaattatcgcttacttgagaaaacaaaaaatgcgcctattcagatatcaggctactaacatacttcttattaggcttttcttataacatactaataaaacaa

SEQ ID NO: 30476 - DNA, 3104 bp, Cannabis sativa
agctagctctgatataaattagaatgggaatgtccaaattgtaatagaaaaaggaatacattacaacagcaaaaacccaatcgtattgatatagtaattgttcaatagcaaaaacccaatcttattttttggatttaatgggattcaaaaacccaatcgtattgatatagtaaatccaccttcaagccccaactactctcctctcatgtttggctccacagaaaatccaccgagataatgtgagaaactctctctaacagaccaatcaaacctactcttctgctccatatcttagattggaaaaaaaaaacaaaatacatcatcaatttcgccaattcaccatggttggggctataaaggcagccattggatacgctgtcctaacctttacgtggatcttctgtgcttccactttgggtgctgtaactgctgttctttccaccacttttggtgttaatggcattgtttggccctctttcttcatcactaccgctctcgttttcattttcgttatcgtttttaccttcgtcggtgacctccttggcggagctagcttcaatcctaccggaaccgccgctttttacgctgttggtgttggttctgataatattagttagaagttagttggtacataagaataaccttcattttggatatatactcatccaagtctagcatctattatttcaatccaaacaatgtagacatgagcaaatttgagctcaaatacataattcaaactattaaatccaaaaactaaagaaaaatatttgaattacttcaacttccattaataattcacacttagtcaagaaaaaagaaaaaaaaacaaaacttacctttatataatcaaatatcagttcgaatctatcgcagttattgctcttatctgcacgtttgtgtttcgtaatcaaagaagatagggcatccatggcttctcggtatgcagttgctttaggatcttcatctcatgtctgccaaaccaatttatagccatctgatgttggagatccaaaccattttcgagtaaccaatttcaacctctcatccttaacctcacaaaacttttggtcccaagcttttggctccacggcctcgaaccctaacccaggtgtccgatcattggaggctagattagccttctccttccaatcaacaacgtatgtcgaaacccttctcctaaacttgttctgaaactcactccaagcttggtaattgaagtggttcaccacagctctgttcaggctcattgtcacagtcttgtaccgatccttcattttaaaatggtgaattgcattgagtagggaggcattcactgcatccagtagcacaatagacttgtgtctctgctccacaaatcttcgacacatgtacccttgagtcacaccctctggtgggtgggaccgttggctagatggaccgaattcgttacatctaatagagatttgaccaatataattaggtttagcagatggtgagaatgttgggagtagagattgtaacattgatttagatggttttgagaaattgaaccatgatggtgagtaaatgaattcatccacatcaacgaacatcatccaattgcacaaatccttactctggatcgcgctgtgggagaaccctgcttcttgagatttaggccaaacccaaaatattgtcgttacgtcgaatccttcgtcgtttaactcttcaacgacgcttttaatattatcattactgtcgttgtcgtataatataaacttgtccactccaattttggaatggtacacaacccactctttcaaaaacttacctgcattatacaccatggtggacgcgcacaactcagactttgactttgactgtggaatctgacgtggcccgtaatacgctacggaaggaaccaccaaattattctcactgatgatttcgatagagactttgatttttaattcaccgttgtcttcatcatcgtaatcgtcgttagaattaaacggcgccgttatgttcgggtgagggcatctgaaaacctcttgtgcggagctcgtaacggcggttttaaacgccacggttttcgaagagtcgtgataaaacacgcaattaaactctctaggcgaacggctaatccattgacgattattaatccctttagcgaataaaacgacatcgttttccgtcgaaaaagattcgtaaacgagaaaattccatctataaagctccggcattttaacgattgccgccgactccttctccgatgacttagtcatcataataggctgaaggaacggacgaagacgtcgaacactattaggcatagaacacttgaaagcgaatcgatcgttggacaatgctccgcaaaaggtagccggagaggtggcgttgttctggaatagacagatgtaatctgcgaataaatcaattgtttctttattggcagggcctgggacgatgagcaaaacctcccattcaggaaggagaacggagtggtgatgaagcggtgaactgacgtttcggaggatgggttgagattcattttcttcttcttcggcggcggcgttgtatttgggggtggcggctacgttgagttttgaggtggtagtatagggaaaatcaaggtgagtggttactaagatatggtggcgagagagatgaagagagagtaagacgaagagaaagagagaggttatgattagtagaagcttattggtgatagggatgattaaggtcttcccgcccatacccatggtgatggtggtgaataaggtcgtagcaaaatgaaggtgacgcggcgttacagtaatccctatttttaatatatatggtcaaattagggctgtgattatcaatatacacgtagatatgtctgtcttctctcttaatatttatttatttttaattattattattttaagattctgtttggtgatatttttgggagattcaaaatacaggtaagatttcattttacagttgcactcttaattaatcactttcttcacaatttttatattattttttataccttaacacagttactaaattatttgttaaagttaaaatttgttttctctcaccaaaaaaattaaaatttgttgtataaaaagatataaacacgctttctatct

SEQ ID NO: 30477 - DNA, 3479 bp, Cannabis sativa
aatttcgctacaaattttctaagtaggacttttttaatgtttctgactcatataaagaattcaacattaacaattttccttttcatttcagcgtgtttttgacaatatcataaacagggacatcccctggccgaagacacctgatgaaatgagctacgaagcttatgatttgattgacaagtatgtattcattgaaagctattctgcacatttaaagtcacacaaatgctcttatgaaaggcttattattgtagagcttaatacataaaaataaatattgtcatcagaaatttgaaaccaagcaatgaaacatgttaccttactgatttcgagtacactcaattttcagattactaactgaaaatccagttcaaagactaggaacaacgggagcaagtgaggtaagtacaacaatgagaacttcgtgctttatttgaagcatcagtttactcagaagtaacctcaaaaatgtgtggcaggtgaagagacatccattcttcaaggatgtaaattgggatacacttgcgagacaaaaggtactttcaaatatagaaaggataaagaagtatgtagtttggtgtaaataaataattcattcccacatttatatttaatttattttgagcaatgcccgctccttcaaataatatttaaagttttcgagatgaatttgaacaatttcatacacttttaatccttgttggtcacaggctatgttcataccatccacagaagcacatgacacaagttattttatgagccggtacatatggagccctgaagatgaccatgttaatggaggcagtgactttgatgatatgaccgacacttgcagcagtggctcatatagcaatatacaaagcgaagaggtaataatgactattatcaccactacatctacatctgttgctcttgttactgctctatatttaatacatatatttttttagaatttgttttgcactttagccttattttgataattatttgttgttagaggattgaagatcatcttttgaaaaatatattatcaaaactagaccaaagtgccaaaacccctgttttctcttgttcggattttcatacaactttggacttaccaaaatatttatctcgaataagtaaacattttagggaataagaacatgaaatcaatatttcttccttaccattattttgctatcattagggagatgaatgtggtagtttgacagagtttagtgctcctgccctcgccgtacactactcatttagcaatttctcattcaaggtacgacctgaaaacattaatattttgatgacaagattagaaatgtggtcttttacttttggattatgtgtgagattgcatcattaaagttggagtctacattttattattgctctcagaatttgtcacaactagcttctatcaactatgatctcgttgtgaaaaacttcaacgaatcctcagatgactctaaacgacacattccttaatagggttcgttagttatttgattttaattattcgttttacatgtttcattatttattaatttattttgctaaaatgggtcatcatctacggccatacaggattcttaattaaatggaaacttttacatttggaggcaaaaaattgtccctccagacccaaagggaaacaaagggttggtgatggagtgtgtatagtcttaatttgaatatctgttctacaaataggtttcactgaaaaacatcaggtgtggtattttgttttgaccacatggttttttcatgtatatactacttttactagtttcatttatagatttttgttttacttttcatcaacactttttgtaagtctaattaatatgctcgtgtagatgcgaaatgaaaataattttcagtattattattatgacctgttcaaaatatgtagtatcatttgtcggaaaaaattagtgttttacacaattttatagtgacaatttgaggcatgattttattaagacactttataattggtgagatgtctttgaaaattgtattattttatatattcaaaatagttatgccgtgaatgagaaattgttacctaagaaaaattgtgagatttgtggtattactcttgagattctttatatttttagtgatttacaatatatgagactaatactaaaatttagagtctaattgtgggggtcactaacatgtcaaattgtaatagtggggtaactccacatgaaagaagaaaaaaagagaaaaaactctttcaaaggatgtgtaataacacattttcttttttaaaaaaatatatgtataatataagagcatccaatagagtattaaaaaagtgatataatgcttgttgtgattcgaatatgcacacaacaaacatagaacaaatcaaaactaacaccaagcagaagtcaataatgcagcaagaaatttaaagaataaaatgaacaagtagaacacatagttttatgtggttcgattcatgaacatgttaagttcatagcctactctttagggaaaatcaaccattaatggcttagatctttattgctcttcaaaatgtaattacaaagtcttgaattacaatgtatatggtgtttgacatgacaccaatatttacaatcggttcttaagctagaagattttaacttggaatttagagagagggagagaggaagagagtctagagttatgttatctctctagttggtgtaggcgggatctgaggcagagcaactgaattaactgccatttatctgatgtggtatttggtagactagtttaaaaataaacggtgaaaatttaaggagtatgtcatgtcatacatcatgaaaatttatcctgaaatttcatcatgaatgctatgtcatgctataaatttttgttttatataaacttatgtgttactttttgaattattttttaataaatatattaccacattatttaagacatgtagcattgctgatcttaaaacaacaacgccacttggtagcatccgttagactattaaaattgcttgcaataaagacaaagcaatttttttcataatgaacaagatgtgactcaagtcagggcactcctccaacctgggcaatcaattctccattaagaaaagccaccaaagtttgacaacccgaaaacacattgacattatgccactctttccacaatccaaaggtgaattttattgatcaccctctcaaattatcggtcgatttttcatttttctcttttgtcttttttagtgttatttaaaaattatagtttttagacattatcgaattgatgataaattgacaattttaaaacgtgtaaaggagaatttaatgttaagacttttcttatcatatcacttccatataaaattttgaaagaaatattagtttagaacatccatgggtagtgctctcaataatacaaattaatattgtttctttccttataaaaagtaaaaccttataataatttttaatgtatgacactttttcaca

SEQ ID NO: 30478 - DNA, 1584 bp, Cannabis sativa
agacttttcttactaaaattggacgaaaatcattaaattcaacaatctcattggttaagggaaattttttaacgatcttaataatgtaaaaaagataatttggtacatgtcaaaacttaagagaaaaattctaattaaccaataaaatatgcactcacaaattatataaaaatattacaacatagtgatgccacaattttttatttttaaattattatatttatcaaaaatgggagccattgtattaaaagacagtaccaccacatcaaatttgtgtaatgttttggttaaattatgatttacctggattcttagtaccaaagagaatatcagcaatagcagctcccccaccttgtcctgggtatccagcccaaaggatggcacctatgcgaggatttctctttgcaaatgaaatatcaatagggcccccagacatcaacactagaatcactgggccttttgaggccccagccactctagaaacaagttcttgttggcgcccaggtaaaagaatgtcaaccctatctttagattcagcctcaatggattgatctaagcccataaataatattgtggcatcaccttgtccagctataacctctgccgttttaaagtgttcattgtcataacaagaaacatcaacacaaccttgttggtacatggtttttgcatattttcctattccttgtaatggtgtggtatagccacaaggaatacctaaagaaaaatagaaatgagacttagaaagatgaaaagtattaaccaataatataaaattattcattatatgagagagaagcaaaagatttaccagcatagtttcctatcatagtgtcagtgacattagaattaggtccaatgatagctatagttttatagcgtttagtagagagtggtaaggtgcgtccatggttttttaatagaacaatgccttggtgggcagcttcaatagctaattgctgatgggttgggctgcacacatcatttgggcctaatttaccgaatggttgagatgatggttcgccatcaaacatgcctaatctcatctggactttgattgtgttagtcagggcattattgatgtcaatctcacttaccaaacttctgttcacagctccttgtgtgtggtccttgagaaatgggccacaatccaaatccaatcctttgtaccatcatcataaaacatattatatgtaagtttagaaattacattagtaaatattaaatttaattttcagttgtagataaatatgtaagtttaaattttgacggtaataataagtaagttataattctaaaatttttgtagataccttaagtgttaaataaattgacatgtggtcagcaataacaatctctgattggtttaagtcattaattttatttttttttaaaaaaaaaaaatagtttaaatataccaataaaaaaataacacgtgataatgacttaacatttaacagttgagtatctacagaattctaaaaatataacttaattattattatcgctaaaaaaacttatatatttatggcctaaattcctcataaaactatatatattttaatttgaaatttgtgaaaaatg

SEQ ID NO: 30479 - DNA, 1483 bp, Cannabis sativa
aagtggggcttgcagaagacccttgattctgagcggatatcttctagtgctgaacgggaggttctttaaaaggaggtggacagtttggagtcagctgctttggacatcttttatgaattttggaaggctaatcaagaggctaactttgattacctcaatgagaacaaggaggcttatctttgtttttgcgaggcccaaaaatccaaagaagatgctaaagcatctaatgacaacatttagaccgactaagagactgtgaaccatgttgttgaagactcattcgaccaatataaggaacttagaactccagcaatttgatgtttcaaaacgtttttcactagttcggcctacaggcctatttttaagtataatatggccgaccaagtgccttttaaacttagaaaatattttcattttagtttaagacaactagctggcttgacagcttttaatcccggagttatcatgctttgtatctttaaaaataaatattttctcttaattccaaatgattgcatatatatatatatatattttgagcttgttatttacccatgctttgtacgggtgtatagttgccccccaagtgaccgagcagacttatgactcttggtcacttgtatttcaaatgttcaatttgtctgtttggctactaggttcagtcaaaccctttgtacatatttttgttggtaattacataacttgctataccaaaaaagatagaatggatgcaattagaatgataattaatatcgctatttatttattggtcgatatgtgttgtaccgtggtaatgtacatttattgcattataaaagctattacatgatctattagctaattaaaacataaaaaatgaacggtatattccacccaaaagacattactcaagagcaatgattcttgatcatactgtactttgaaggtggtcatccggcctgactaccagttgttttccaatcccttgagcgaggctccctcaaaaggctacctacttaagagtaagtattcgagcattgtgcactttgtggggtcatttaaccttgtacacttattggtagtattttcttgggtgttcaccttaccagtatcttagtacttgaacgagttccatgttttcatcataccaaccaagtttgtatgctccaaagtttgtaactttagttacttgatatggtccttcccaattaggtctgagcacaccagctaaactgtctttttggtttaggaacactcttctgagaaccatatcacccaaaaaaaatttcctgccctcacttgttcgttgaagtaccgagctaccttttgctgatgagccagtagctatagttttgttgaagctcttttctcttcaatttcatcaagtgatttttccaggagggcatggttagtcttctggtcgtaagttaatcttttgtgagatggggtttctaattccatggacagcattgcctcatatccataggccatggcaaaaggtatc

SEQ ID NO: 30480 - DNA, 1617 bp, Cannabis sativa
ggtttataattaagttttattttattaaaaaaaaagtttagggtatactatttagtattattttagaaaatatatagttcaattattatttaacaaaacagaaaacttaattagtaatttttataaaatacaagatttaataaatagtatttatttttttaattaatagttcttatgtttagttgtaatgaaagctagatgtcttaataatcttatttataaagtaatatgttgcacactttaccttattgaaatttctctcttttgtcacttagttaaactactaaaccttttatttttaaaaaataaaataaaacaaaaaatcatttaaacaaaaccaaataaactatgcatgtatgtcccatattaatttcttaaaccttatatattaatctaatcaaacctattaaaataagtgacaataggtgattatataaatggggggtcggtgtggtaggttcaagatttttaatgactaagattttggcatattctcaattgcctatgtagcaagtaactatgtatatatatatatatatgcatgtgtaaatatatatattcatatatttttgtatataaatatatatgactaaacttccactatcccatattaaatatatttagttgagagtgatagaatgagtgccatgtaaggaaaaagctcatggtttgattatttgagcaaaaggataacatttatgttgacatatatagtacctacttccttgggtattattattatatataatctatttatatatatatatatatatttatatataacaaagattttgtgcagttaattagtgctaattattatttgagctattagaatttttatgtttgaaattacatatattaaaatatttttttattaaaaaatttcttaatagtatttgttataattatagtattctttttgtaaattttttaaaaaatttaaattatttacagtagcaaaagtagagttctgagtattctaatttaccatgcgtgttcaaaaaatttcaaacgtattttcaacattgtaaatcattcaaaacaatttaaaaatttacaaaaataaaaaattaaaaatattttgacatatattttcgagtacagaaatcaagtaaaagattataataaatatctttagtaatcttatttttttaaataagatattttaactaaagtgatatgatatatatatatataacttctttttgaagttattttgtaatttaatttagtttgataattttttgtaaatttttcctgtctattataaatatatttaaataatcatatatgtattttagtagaccacttaaatatattaaagaacaaattatatatagtgcacttgtattaaaaaaaatattgggtgcatcaacttgattggttataatgaagtgcaagaaatccatgctatttatttattattactttatcttaactcataaataaacttcttttattattaattcaataaataaatagttatacaaagtaagtgaattcaaaaataaaataacatgttatataatttattcatgcatgctttaagtaggagcgcgtgatgatgacgcgagtgcaagaagcgggggaatgtatttccctacaaacaccaagaaa

SEQ ID NO: 30481 - DNA, 3216 bp, Cannabis sativa
  modified_base (40)..(40): a, c, t, g, unknown or other
cggtttaaacccgtcgcctataactgggtatagacgacgnttttaaactgtgcctaatactataggcgacgattgcctatagtattaggcacgattataaaccgtcgcctaaacccaattttaggcgacggttttaaaccgtgccttatagtctggttacgtttattaattttttttagcgactatttttttttcagttgttacatttgaaaaatagggaaaaaaaatacaatttctgtaattttttccctacattaattttcacaataacttttttaataatttcacaataaatttttcaaatacaactaattattaaaattattctctaattgaaaatatataaattcctaatttctcaattttataaattatcaaattataaatttattaagcaaaaaaaatattttttattttttaaatttgattttttttggtattttattttattaaatataattttttttttacgaagcaaaagaaaagtagaattttttttcttttttgttttttttttaaatctgaatttttttttaggcattttcttttattaaattcaaattttttttttattaagccaattttttttttttaaactttgaaacttttttttttgtattttcttttattaaatacaaattttttttattaagaaaaaaattcttttttttttaaacatacactttttttttgtattttcttttactaaacacaaatttcttttattaagaaaaaaatcttttttttttgtatattttattattaaactaaaatttcttttattaaacaaaaaaaataaaattatttttttaatctaaaattttatttattattttcttttattaaataatttttttttattattcagcctaaaaaatacaaatttcttttttttttattatacccttttaagtgtcggtttataaacgtgaccaaaggttcttgtagtctcggttttaaaccgctattaatactcaatctgtatgtataattttttttaatttcttttggtctcggttatacttttagtgtcggtctactaactgacacttaaagtcattataggtgtcagttataaaccgagaccaaagaaatggggtggtttttattgtcagtgtttttaaaaaacttctatcaaaccgacactaaaagtctattttgtagtagtgtatggtcgtcatccaagtaggcgtgctatcgatcatctcaacttcttccttttcacatatacttggttcgtttaacacttccactggtaccaagttcaattcatcaagttcattctgcgaggccagttttgctaacgcgtcgagattggagttatgttctcttagaatgtgttcgattttgaaataatcaaaattttccaagttcctctgaaccttctccaggtattttgccatttttaagccatttaccttgtattcgcctaaaacttgattcacgattaattgcgagtcactgtaacttaccagattcttgacttttaacacttcagctattctcaaactagctatcaaggcttcatactcagcctcattaattgaagtgtaaaatttaaatcttaaggcatagtgaaacttaaagcctatgggcaaaattagtatcacccctgcaccgaagccgtgttcattggacgctctgtctacgtataacttccaagtgtccgcgtctcactgaacaagtggattttcatcgagagttatcccttctatcaggaaatctgccaaagcatggcccttgatggatgtttgcgagtgataagttatgtcgaactgccccagttcaattgagcattttatcaatcttccagaagcatctagttttgacgaaacttgtctcaggcgttgatcagttaatacctttatcggatgtgcctagaagtagggccttagtttgcgagatgcatgaattaggtatagtgcaagtttttcaagaggtgcatatctcgattctgcccacagtaaccttttactaacatagtaaaccggttactggtgcttccccttttctcgcactaatgttgcactaatcgcatctccaggatagccaaataaataagtaaagtctctccagttattggtttagccaagattggaggagttgataggtgtttctttatgcttgcgaaggctttctcgcactcggctatttattcaaactttttgttgcctagcaatatattaaagaaaggcaagcacttattagttgatttcgagatgaatcaattaagcttcgccattcttcctgctaaggcctgaacttccttcgacattcttggtgatgacatttctatcaaagccttgattttttaggatttgcttcaatgcccctcgcattgactatgaatcccaaaaattttcctaaggagactccaaaggaacacttttttggattgagtttcatattgtactttctcagtatctcaaagcactcccacgaggtcttttgtgtgatctccattttttatcgacttcaccaacatatcatcaacgtagacatccatgtttcttcctatctattttgcaaacatttcatttactagcactgatacgttgccccggtgtttttcaaaccaaaaggcatgactttataacaataaagtcccatgtttgttacgaagcgtgtatgctcttgatcaaggacatgcatttttatctggtaatatccagattatgcatccatgaacatcataagctcgtgtctagcagtttcatccactaactggtcgatccttggtagtggaaatcaatcctttgggcacgccttgttcatgtttgaaaagttgatacaagttctcctagttccattttgttttggaacaaggacaagattggatatccacgaggggaagaactccttgcatacaaagtttttagtcaataacttctccacttcctctttaagtgccccttgtctttctgaatctaagggccaccttttctgtgtcttcgctaggtaattcgggtcgatattcagatggtgacaaataattttagggtcaatccctatcatgtctgaatagctccaggcgaactgatcctggtttgccttcagaaaacttgttagttgctattttagtttttcatccagatttttcccaatgaatacacacttgtgggaatttctagatctaaaacaacttcttccaattcctcgattgattttaataggttctttcatctttaactcgaggatccaagtcctcgatgtact

SEQ ID NO: 30482 - DNA, 3205 bp, Cannabis sativa
  modified_base (2129)..(2130): a, c, t, g, unknown or other
ttttttttaaaaaaaaaaggcttaaaagtaatttagtcattagctttactcgcaaagtctagaaaattttagataggttattatacttctctagaataactatttcacccagagtaattaccatctcagatgtaaatttctaatattgattcaaatcttgaaatttgagtacgtgcagcctaaagggctaaaacaccatccttctcaacatataggtcctttctaagatttatttgattatcttctaatgttcctttctaaataatattcataccgacttacagctctcactcaacatcaggtgtaatgaccgcttagttttattatgactaaagtcggagcaacattacacaaaggagcccgtcccaaggcttggatgaggtacgacaacttagttgagatcacaccactagattctttagtccagacccatctatccttaccctgaccactcgatttaccatcgctcaatataaaatcaattgtttccttgtcaaagagatcattaagcttccggatgtcccaattcccgtcaggtaaaagtaaatcttccacaagttcaatctccccctggggattgtgcatgggcctagggtagaaatctctcccatggataatataagggtcgttccaaatgctcgtatccctcataactataagcttgcaagcccctttcttcaaaatctcttttgtactcaccacattcttccaaaaccaggagtcaaaattcttaacgcacaatcaaagaactgtctaccccgaaggtatttggctctaagcacattatagcacaacgactgctcatcattgggaagatcccagccccatttggctaagagggcttggttcatttctaaggattttctgaaactaagacaaccatgagacttgggcaagcacagatgatcccaggcctttaggcagatttctcgattaccttgctcatagccccaccaaaaatctcttaccatctcatcaattctagaggagagtttttttgagagctttgtcgtctacatcgtataaactagcaaggcaaaccctacagatttgatcaaagtggcacgacctgtcttagaaagcgattctagtttccacccatgcaacttatttaccaggttatccagaataaaattgaaatcgacatccttttggcgagatctaaacagcgggagtccctgataatttatattacccatcacacagttaagccccagagcctgtttgataccccttttcataccgttgctcatgttaccgctgaagaagatggacgttttgagcttattaattctttgacccgaccaattgcagaatttctctaaacactgcgacaaccccttagcttcgtccaaattttcccttcccaccaaaatcagatcgtctgcaaagaaaaggtgggatagtcttgggccatctctgctcaacttgatacctttaatggttccgcaactcaaggcattctcaagaatacgggaaagaagttttgcagcacagataaaaatgtatggagaaaggggatctccttgacgtatgccacactcagggaataaactactaatctttctaccattaaggaaaaggttgaaatatgtcgtagtgaggcactgacaaacccactggcagaacttctcaggggccctgaagctgcaaagaacatggttgataaatgaccagcttaacttgtcatatgctttaaccaggtcagttttaattgcgaaaaagccttctctcccttttttttttcttgaaagagtggattatcttctggattaagacattattatcctgaatgctcctatctggaacaaaagcagcttgggtagggcaaatcagtctcgggaggatcactctaattttgttcgcaataattttggagattaccttatagataacattgcacagggagattggtctaaattgagacactttctttgagttgggaattttaggaataaaagtcactttagtagcattaaaacaaccgactctaatcagcttatacaataaaaaaaaaaaaaaaaaactaatctttaagagaaatgctaaagggaaccaatggtgcctagcaccctcttatgtgtcaatatcgctattagtccaactaagtatcgagtctcatataattnnatataatagcttttagagagtatctaatcgcaacgcgacatgtcgaaggtggtagatactactggtacctaatagcaatgctcttttataatagtaagattcttcatagttgtgtcaaaatttgcacaataataaacacaatttttttattacaaattttttatgaatcatcaatgataagctttaatacacaatatttttatcacaatattatcatatttaatttattattattttatttttaataaaatcacactacacataacatattaaggtatttaatttattaacaactaatattttactcttattattttcttttttataaataattttcatccaaagttttaatgtaaatgttgtgcaaataatatttatttatttattatgctcaagttagcaatatctcaaattttagtattatttataatcttatttaacaatttcttttttattgtaaggctatatatcaataatttttcttaatatgattttaataatcacttttgagcaacttctctcacataaagatttgaaattaaataaatttaatttttttttttgctatgaatcttaaaatatattatttggtttttattttcatttctttttaaagaaagatcctatattaataatactggctataaagttattatatatccatgaattagtatatggagggttgtgtattcaatagttacaataaaaatataactatgatgttaaattattttatgacctactataacatatcactaacaggttaaatttcaattttacttaaattaataattatatacttaaattaataattatatacttaaaatttctatttatatattttttttatttttattattttaagtaaataaataaaatcaagttaatataaagttataagtaatttaataattatttttagtaaatttttaaattaattacaaccatctaataatgatctaatcactacaaaaaactactactttcagtgataattttttagtcataatataaattttttgtgactaaaagcgacttttagttacgacaaaaacttacttgtgattaaaacata

SEQ ID NO: 30483 - DNA, 2403 bp, Cannabis sativa
  modified_base (703)..(712): a, c, t, g, unknown or other
  modified_base (788)..(797): a, c, t, g, unknown or other
aattatgcaagactttttggttgtcgacctgctatcggcttacaatatattactgtatcgtctagccttgatcagactagggcagtcagttcgatcaagcacttatccctgaagtttcaaacaccgaagggtgtaggtgtagtgcgaggcgatcagatgctggcccgccattgctatcgcatagagctacaacacagaaaagtcggtcactagttaatggcattcttggcagaagaaagcgaaaaagggatgaagatcttgatcctcgaattcaagatgaaagaaacttattgaaaccaattgaagaattggaagaagttgttatggatcaaggaaatcccacaaagtgtgtttacattgggaacaacctggaaaaacagttaaaatagcaactaataagtttcttaagggcgaaccaggatcagttcgcctagagccatggagatatgataaagattgattctaatattatctgccaccatttaaacatcgatccaaactacccagcaaagagacagaagaggagacccttggatttcgagagacagggggcactcaaacaggaagtggataagttgttggtcaatgactttatacgcgaagtgttttatcccttgtggatagctaatcctgttcttgtcccaaaacctaacagaacttggaaaacttgtattgacttctctgatctgaataaggcgtgccnnnnnnnnnnttttccactacccaagattgaccagttggtggatgcaactgctgggcacgagcttatgtcattcatggatgcatannnnnnnnnnaaccagataaaaatgcatgtcccagattaggaacatacgagctttgtaaccaacatgagactttactgttataaactcatgtcgtttgggttgaagaatgttggggcaacatatcaataattagtgaatgagatgttcgcaaatcagatcggacgaaagatggaggtttacgtcgatgatatgttggtaaaattagtaaaaagtggaagttataccacggacctcgcagagtgcttcgaaatattaaagaagtacaatatgaagcttaacctgaaaaagtgttcctttggagtttcctcaggaaaatttctgggattcatagtcaacgcgaggggcattaaagcaaatcctgagaaaatcaaggctttgatagatatgccatcaccaacaacaccgaaggaagtccaagccctaacaggaaggatggctgcacttaacaaattcatttcgatgtctactgataaatcccaaacttatagttattcatgattatagtgttgtctacacactacaaaataatcatgattatatgcttcaaactatttagtctcataatttattagtgtattagattcacactgatgtcataatcaatgatgtggtttacttacacttgtataaccgaggagatgaacaagaccacctccactatgaacacagctgagggaatactaaagacccccaaggctgtaacctaggagagaacaaagacaacatttatatctacttaaaggcagagtgagacatgagagtcaatgttaagacagcatctgaagatcaaagttggtgttgatattttggtgttgacacatttccaaagtcttgcaaataaatgaaatcactcaagaaaattagaaaacaattgctaggagtcaaaattgatgcccactcggtagttttgcatgaaataggcttagtttgcgtcatgaagtcagcctcccatagttgcaaagctgacttgggggaaaatttttgcatagaaactaaccttgatgatgtgaaaataaatgtttgacacgtgacaagaaggaaaatattcatggatttaagtgttccaagtcatagcagttaactctaggaagggtcccgcccaggttgactttggggactccaaaatgggtatttagatccccctaagttttttcaaagtcaccatccttcattattatgaaccaaaaattcaagaagaatccaagcttgaggcttgggaattgaaaagattcaaaacgacctcacgaaagtcaacccaggggcctagcgcccaagttgacattccacctagggtatcagtttttgggtctgtcttagtgaaaatggctcaaaatttgaattatacatgaataagacatgtcacaaacatgctagaggcatcgaaattaaaatcaaaacacttcccttttggagaacccaggcactgggatgatgctcccaacgcctaggttgacatgttgtcaacctagggtgcttctgaccacaatatttgaagatgtttactaagaatttcctttgtcttcatccaaaaagaggaaaaaagtgctttaagaaaataaagggagttatttgagagtcaaaaatgggacccacttgttgggttttacgccctaaa

SEQ ID NO: 30484 - DNA, 2594 bp, Cannabis sativa
tgattctaccttatttaattgatgccatgattatgtgttatatatatatatttaactttatatgatgataattaaggctattaactagattgtgaaatttattactcgagaggaaaacttttaaacaatcaaacattgggtagataaattgaggtggtgtgagattgatagataagcatttacttaggtaaccgaaatagttctaagttgcgaaatcgagaggtagaatatttaggattttttctagagtgagatttaatgaaggcaatgtataatggtggtatagagatataatctattatttacttacacattctttatacgacactcgagagagggtatagaggtacaatattactctaagttcttaaaaattggaataagctagtcccatcaatgataaaaatcataattatctagagctagtaaagaggtacaatattactctaggctcttaaaaatattggaataagtcagccgtgttagactttcttaagaaaaagatgaggaagtgaatcgaaaagtgggatggtaagtttttatctagagctggtaaagagaatttgttgaagacagtggagcaatctcttccgaactatgctatgagcgtttttcttttacctaaaaaggtgtgtgacgagatgaaaaaattaatgtgttctttttggtgaaagaattcgagtaaaaatggcagtggcattcgctggatgagatgggaccggatgtgtgtcccaaaggtttatgggagacttgggtttcggaagcttcatgattttattattgcattggttggaaacatgattttcgtcttcattctcatcaagattctttagttacccgtgtgttccaagcttgttattatcctcgtgggtcctacctgggggtggatttggaaagtaatccgagttttatatggaaaagtatccgtgaagcaaagcctcttattcgaaaaagggggcgtatggttgttggatctggaatgactattaatatccttagagacccttggctttcgaataaagagaacccatttgtggtttcagatcaccctagattggcaaatcaaaaggtctccagtcttatgaagattgagtcatcttgggataaaacagttcttaaagacatttttttagagagggacgtaaagcttattttgagcatttatttgttcccctcaatgtctgacaatatttggcagtagaatgatgagatttctggtgtatattctatcaagactgcgtattggtttctttgagaacttaaaggtgagttagttggaattggtaacttggtcttttggaaagagttgtgggatttgagagttcctcctaaagtcaaggatttggtttggagggctacttccaattgtcttcttacccgtgtcccattaggtgtgtaacatgttctgcttccctcattgttgtgtccaaggtgcttgcgagttggagagtctatttctcattattctgtgggggtattcatctgcttttgcttgctggcggatggaaagatatttcaatgatagagattggtgataaatcttttgggggatggcttcattatagattttagtgttgggaatctgggatgaaacataaagttgttatgctttgctgggtgttgtggtttgtgcgcaatgaaaaggtgtggaatggtaaaaatataagactgttaaagaggtggtttccttggctgagggtagttttgatcaatggagttgggctcaagataaatattttggttcatctttgttttctttacaagacgacgaagggcacgagcagtggattgtaccagttggtaatacgatcaaaattgatgtcgatgtaattatcgttagcaatcagaataagtatgggtatggttgggtggcgcaaaactcttctggtcaaactattatagctcagacaataagttggatgggggtggttgatcatgttcttgcaaaagctagcaagattaaggaggtgttgagttggttgaaagaaacagggcgacatgtacagattcagacagtttggtcacaatccaagctattcgaaattcgttagatatgacttcttttttttggttctggatttcagagtgtaaacagattttttttagtttgaataatgtctttttgatttttatcaagtgatctgctaatagtgttgcttaccatttggctagagctttgtcgttaaatgctagttgtacctattaaattctacgattctgaatagtttacgtgatgttcttttgaataatttgagttgataaaattgtatttctattaaaaaatattaatttcattttatttttaattaatttattaattttaataaaaaatatatttaaattttaaattattatttatttgaaattacatgcatggcacttacttggcaatgcgacataagtgaccaaacaaccacgtcaacattttatttttcacgtgttacgaaacttagtagaagaactattttatgacactgtgaatagttcgggggataaaaatcctaaatagccatattttttttttgacaaagtgatttaaatcactcatgaatttacgacgcccatgtccgccaccggcgctggaacctcctcga

SEQ ID NO: 30485 - DNA, 3787 bp, Cannabis sativa
atcaatttaagtgtacttgggcatagccttttggccgtgatatttcaagagtcaccttccttccaagagtgttctcccaagcttagttttctaagacttagggaattataaatttaaacacgggcacttttggaaagaaagaagtagggtcaggcctagtctaacgcctaaagggaacataagtaagaacattgccaaaatatacacattatcccaaagtattaatttttaattttctctcttatccacataaaatttggtatttttttttttctacaaaaggtacttcaatggtagacaactccaaaaattgcatactatgatcctacatatcatattttaaatataaaattaatcaagtttcttggtaaaataacattttttcttaaaaaaaaaaaatttaaaaaaaagatgacatggttattgtcttttttgggcaacacttaacatctatattctcaaaatttatcttgaaagtttaaccacattatatatgtggcaagactactccaatagagaacccctattagagatgctctaaggttttctttcttctgagtttcaacctcactctcacctttttgccttttagttttaaggttcaatcaaatcaaagcagcccatatacttagaagaaaaggaccttggagaagataaggtaggaagaatatatatgtgaattctaaagttgtaatggccatttctttcaactcctttacgtctaaaatcttggtgcctatttatgagtttaattaaattatagtgatagtttgaggtccttggatcatagaaaaactagctaaaaaactatttcttgagctttcatcttcaagaggtaatatccatagtttttaagcttgggatattggttctaaggaaattcaatgtcttcccgaaattgagccacttctggtttatcaaaatcaatagataaacttctaaagagtataacgcctttcaaaataagtattttgtgattttcaaagcatataactatttatgactctaagtacatgattttaggctttggaatcatttaatatggttatttttctaaatagatatggcttccacatgttggaactgatttctaaaccaagcaactaaatctttgagttaggaaaaattatatttgaacacattaaactattcagaattttataacaaaaatggtaggaattattgatgtgttatattttaatctaggaagttttcataatcaattttattatagccagtagcagtcatttttggaaaataacgatcaaaagtcggtttggaaaattttgtattagaacttgtaactaacttttcactaagttaaactaatcaaaatcactcgaaattttacaaaggtattcttaaatagtatcgtagtatggtcttgtcttttgacattgtatgatattctctctcgtttgtagtatgtgggtatttgtgtgtctttgattttttattaatggattgtcaacattgttattgaggatggtgatgatggagtttttttgtatgatgaagaaaatgtcatgaagtaattataaagaataaatgattatatgctcacttatcggaggtcagaaaatttggagatcatttggtattctgacacagatattgtgaattgccaagaaactaagagatctacttctagttatgtctacttgatgtctggaggagctatatcatgcaaaagtgctaagcacgcactcatatctcatccctcatggcaacataattcatagcttgttatgggcaaccaacaatgtaatatggctacgaaatttggtcacttggctgcaggttgtgtaaggaattgaaagactgctaaggtatattgtgacaatttattagcagttctatatccaattgacaattatgataaattttagagctagtgtttccttttttttttaaaaaaaaaagctagcgtttcattcttaattcaattattatttgaaacttaatgaaaatttaaacaaactattgttctattaggttgtttttacatgcattgcatttatatttagctatatttttagttataatttttgttatgtatattttttcaaattttattaattaaaagaaaccacttattaatttttttaatttttttttaaaaacaatatttaaagtcttaaaaatttgagaaaaataaatataaagtttaagaatattaaaattgacaatattctcaatattaaaaataacaataacaaaataataatgttacaaataatacattaatatttatatatatttaaatcaatctaaaattagtataagttttaattaacttacaataaataatattaatatttatatatagttataaaactaatcctaacactaacactgttaaattttacgaaatatttttatattcttgaaatatctgttaaaccaacaaaaatcattaaataaccatattttatgtataaaaatttatttatttttcttgcgttttattatatctaaataatttataacaattaattaattaagtttaaaacttttactgtgattttgtagtttcaaatttaaatttcaatttcaccctatattttttttttttattctattttctcattattaattaagtttattattttttttacaacttttaattagttttaaatttgaattctaataattattaggttagattttcttattttttattctattttttaatttatcatttattgttagtttttttaaaaaataaattattcaattttattaattgcaatcacctgaaataatattatgcattccactcagtacatctccctcatagaagattcgaattagaaaaacgaatgaattaattagttacctaactcttagatcatttgacaaaaaaaataaaatattacaacattactgtttactttaaaaatacttgtattcaatttcatcaaccgctagaagacacaataatataaattataacagcaggtcattcaaacttgccctgccccggggcaaaatttgacccgttcgattttttatagaacaaacttgccccgctgatcgattttgataatcttgctagatgtatataaatatgaaaatttaataaacagacctggatataggagttcttggtgtagctatatgttccatttccaccgttcattgggtgtgattctgtcattgcatctttgcaaatattgctcattgtatcaacttgtccaattatgttacctgcgatcgatgttcattagcttctaattatttatatggtattatatacatttataacgagtttactaaaatatttatttttattttaaattaaatgtgcataataaaggtgttatatttttttttaaatattacaattcaaatttaaactgactacacatatttctcttatcttttatcttacattaaatgtgtctatataacataattttctttttaatattacaattcaaaattaaacgcgcagatttaaaaaatatctttttattattaattttttttacccaaaacaattttaattattaaaaaaaataaaaaatagaagaagcttataatatttaaaattaaaagtattatggtaattaaattaaaattataattaacaataaattataaaaaaaattatttattgaataacatcgacacacacaataaaaaaaaaaaacaaaatttaattttacaactaaaaaataaaaactgagtataactaatactagcattgcacataatattaacctagtatttatgtatatattctatataaaatgtggctaataacagaattcttggtttatga

SEQ ID NO: 30486 - DNA, 4223 bp, Cannabis sativa
  modified_base (2663)..(2671): a, c, t, g, unknown or other
aataaagtttaattaagttcttcatatttggcaaagataaatttcaaaaaacttttctcagagctcgtgaaagatttagtgaatttaaaattttaaaaaccatattattcagtatgcatagatttaatttcttgatatttgatttatctccttaagatttctttgctttaatattattcgcatctacttttagttttttcatttctattcgcttcaataacaattttaataattgcttattgcgaatattttacatttggagtctttctagaatttttgtaaatgattgtaatctctctctcaaccatataatcaaataaatttggtctccaatgaaaaaaaaatattatcaaataaacttacacacatctaagactcatatatacatcactatatataatctttttctaaaggaaaaaaaatatatcacaaagcactaaattttgattctattatatcaaatatattgattattatcacaaatccataactaagaaagaataagaaacagaggagaaaactgaatttgttattcaatgctcaagaagtgaatacagatacaatcttgctactaatagtagcagatgttagttacatctgttataactaactctcaattcctacaataatgaatctaacaacaacttttaacacactccccctcaagatggacaatatatgttcttcaatcccatcttgcctttggtgtaattgaactgattagggaacaaaggtttggttaatatatcagctaattgctctttggaagccacatgaactgtcttgataactccatcttggaccttctctcttaccaagtgacaatctatctctatatgctttgttctctcatggaaaacagggtttgctgcaatgtgttgagctgacttattatcacaaaacaacagtgttggtccttcatgatcgacattaagctcctttaagatcgatagcaaccaaactacttcacatgtcgtattcgccattgctctgtactcagcttctgctgaggatctcgaaaccgtatgctgcttcttgcttctccatgaaatgatagagtcccctatgaagatgcataatccggttgtcgacctccttatgtcagggcaagcagcccaacctaaatccgtgtaggctctcaactaaacctcaaattctgcaggaaaataaattccctgacctggtgtagcttttacatattgtaagactctaacagcagcattcatgtgactaagtcttggcacagcaagaaactgacttagcttatttactgagtatgaaatatctggccttgtaatggtcagacattgtagttttccaattattcttctgtatagtcgggtctgccaacttgtctttgtcattttgtccaagcttgagatttgcttccataggtgtattcataggcttgcatccaagatgtcccaagtcttcaagaatctgtaatgcatatggtctttgtgatacaaatatgccctttgtgatctagctatttcaagcccaatgaagtagttgagatttcccaaatctttcagtttgaatcaggcattttatctgatttttagagcttccaattcttgaagatcactgacaagtattacatcatcaacatagaccaacaagaatatgaaatggctaccataatgcttaatgaacaatgaatggtctgtagcctgagtgattaaatccctcatcaaataaggcagtggagaatttggcaaaccattgcctcgaagcatgctttaaaccgtataatgatttctttagcttgcatacaggattgtgaggaagctcccccttaggtttgtaacctaagggagagtcatgtagacatcttccttgagatcaccatgcaaaaatgcattatttacatccaattgatgcgaatgccacccttaattgcaagagcaatgacacatttaacagtcacaagcttagtaactggagcaaacgtatcagtgtaatcaatccgctgctgttggttgtaccccttggcaaccaaccgagcttttaatctctcaacactcccataagcattgagtttgattttgtaaacccatttgtagccaataacatgttgcccttcgggtaaagaaaccactatccaagtgtcatttctctcaagagcatctatctcatcgtccattgcattatcccactcgggtatgccatgtgcttgactaaaaaattcaagctcaaaataactcgaaatggctataatagttgatcgaaaagcaggagacaacctgtgataagataacactgcagataaagggtaaggagtatttgattttccctgaaaagaggaagaaaagaattagcagcaagataacaatgatactcattcaaatatgatggcttatgtgtgtgtctgcctgttctagtaacaacagaaggactgtgaacctggtttgaatcaggttcagttgcatgaggaacctgtttagtattcagaacagaattaggaacctgctcaggaagattaacagactcaggaggactctgtgcaggtgtaataataggttcaaaatcaggcttaggacaagtaggaaagaacgtctgagtgtgatttggcacagcagagaaaaattgatcataggcagcaggtaaaatttcagacttaacaaatggaaaaatatgttcatagaactgaacatctcttnnnnnnnnnatctggtttgtgttcaaatcaaggagcttgtaagctttcatgcttggtggatagccaagaaaaacacaagaaatggctctaggatgaaattttgatcttgattggctcaaagtagatgcataagcaaggcagccaaatgcctttaaatgggcatatgcaagtggtttagagtgaacaatggcaaaaggtgatttgtttttcaaattaggggtaggtgtcctattaatcaagtaggcagctgtggctacacaatctccccaatagcataaaggaacatgagattggaacaagagagctctagcaacattgagaagatgttggtgcttcctttcaaccacagaattttgttgtggcctttggacacatgaatgatagtgtataatccctaatttggaaaacaaatcattgaattgaaattgcttagcattattagacgtaaagcctttaatgactttaccaaattgagtcttaacaagttgaatgaaatggggaataatagattgagcatctgacttatgtttgatgagattgatccaagtaaacctagaacaatcatcaacaatggtaataaaatatctcttccttcaactgtcagagtactataaggaccccatatatcaacatgaataagatcaaagcaattcttggcaatgttatgattggaaatgaatggtaattttctttgtttagcataatggcatatggagcaatgaaaatgggaattagaattggaattggaatgagaattcaaatttttatttaatgaatgagcttttacacaagaagggtgacccattctatagtgccaaatggtatcattggttattctagtatctaaaaatgaagaaaacacaggaatagaatcatgaaaatgactagaattcagattatagaggctgccacattttcacccatcccaatcatcttgttcttaacattgtcctggataacacaattataatgagtgaacacaaaggtgcaattagctgtagctgttaatgaatcaacagataacatattccattgaaaattaggcacatagagaacattttcaagaacaagattattagacaaaacaacagttccaacacatgagattttgacatgcaaaccagttggtaacaaaacagttttaagattagaatccctgtaagttttggagaataaattgatatcaggacacacatggtgtgtagcacctgtatcaataatccacttagaactatgaacacaaaaattcttaccaaggaaatgtgacacaactggttgctcatcaagaactgaagtggttgtcttatctgaaactttctgagcaaggagggccatgagtttttgacactgaacattagacaagctggacaccagatcttttttctcctgaagcattttctgttttctcatcatctactccagtgaagttagcagatgctgaaccaggcttatttggagttcctttggcatttcggtttggaaatttcccatgaagtttatgcccaggtgaatatccattcaatcttaaacaacgatctattgtgtgtccattcatcccaca

SEQ ID NO: 30487 - DNA, 6496 bp, Cannabis sativa
tttttagaaaaagaccatttcttttctttcaagagggtctattttagatttgtgacaatgtattttaagaaagaaaaaatcatacttttatagatcaaaagagatccaatttaaaaaagttaccaagccccaaaatgtttgaagtatccctaaagtcattatgtataatagttggtacacttttcattcaaagttttttcttaaagttgtaataaattgcaaaagtgagctttgatatattatacatcaataatagtattctttataaataaagttgaaatgcaaaagaagaagaaataacaaaataattttagtcaataaatatatattatttatatattcctcaaagttcaatgtatacatttggtaggtttgattgatggtacatatagtgtttttgttttgattgtgtgaagtttttctttttgtttgaaaagtgaaaaaaagaagaaaaaacagtgaacttaaatttgttcatatttatgatgatgatgataatgtcaccatgtgatgtaatacaccaagtttgatgatttatgaaattatgaaattagagtaatcatataaatatatatatatatatatatatctgtgttttttttttaaataatcacttaatatgaattcatagtttaagaaattactagcatgtgatattggatataatgtttttagtgcatacttgtttagtagaggagaaaagggagaggaaagaaaatggataagaggaaaattatcccttttattatatattaactaaatataacttcacaataattttaattgataaatacttttttttttttataatcaaggtactaaatataatcttatataatttattaaaattagggttcctaatatatataatgggaatgcaaaacaaacaaggaggtctgaaggttgagtgggttcaagaacaacttacatcgggttggtaaagaggatgtcatggcgtttttgatgaggttggctaagggttggactaaggtggactatgagatgtttttggtgttgtgctggcagcagtggtttactagaaataatacgaaacatggtggaggggagccacgggcaactgatgtggtggagtggtgtgctaagttcctaagtgattatcaaggccaaactcaacgggcaattaatactcaactgaggtcagctgcttgctgggctcctccggtgcaaggtatgatgcaaattaatgttgatggaggggtaaaaaagggtgtgcaatgcacgggtactggatgtgtggtgcgtgattgtgagggacgggtacaggttgccattgcaacatctcggcagcaggaggtggctccattacaagctgagttgttggcgattaaagaagggcttctcttaggaattcagaggaaatatcgacaattttgtattgaatccgattgtctacatgttgtccaattaattcaaaaaaagaggatgggtgtagggatgtggatggaatattagattgtattaggaacttaatgttgcatgattttgttataggtatttcctttgtttatagggaagcgaatggggtcgctcatggtttagccaattatgctttggtgaacaaagctagtgctatgtggattggggttaattcctcttgtgtaagtcttgctattgagcgagacatgcctaattctatgtaatttgtttctgtgttcaaaaaaaaaaatgtacataatggcgatatgatctataaactgggtataaattaaagagtggtaaaataaaagtaaaaattaaattaagaaataaaaaataggtatagagtgtaattttttgaaagaaaagctttgaagaaaaagtagagaaaagtaaaaaaaaattgcttgttggaaactagaaaggaaagtggagagaagaaaaaaaattgataaaaaattttgaggtggggacccactaaaaattttctactccaatttggagagaaaatagagagaattttttttacaaaacaacatcaatgtaaaattactaatttgtttttgtaagaataattttgttaataaatttaagggtaatatagtaattttacagtaacttaactttctttcctttctactcactaaacaactaagtaagaaggaaatagattttctattcattccttctaattttctattggtaccaaacatagtgttaattagataataataattaaattagttaaaatatttattaggatttttattttagtacccataattcaaatacatccctttttatagacatagagactgcataatatatacaacttttggagaatagaaggaaatatagtgattgtttgatatgtgtttctattaatttggcaaaacaatataagaaggtacaattaattataggtgtggtcatagaaaagtgtagcaatagtataccttttcatgcaattatgcaatatttgctttattttcatctcttgaccttagagctcccataggccactgcatttatattttcaattgttcagtctatgtaaattattcagatttcatatttttgttcttctcttacttatatacatgttagtggtgcaggtggtgtagtttttaggtaattttttaaattatatcgtacgtgtaatatttataattttccaaattgtaaaagctcaaaattgcaaaaattacaccgccaaaatgtgatagagtatatggtgcgatgtagacattttgtactatcacaaaataattcatttttatatttgaaaagaaatagtaattaattgtttaaattttcaatagtttttaaatttatagttagaggaggttgtcttttttctccggtcagacgtgtcagccttttctggacatgtacagcttggttggggttgtgttttgtgttttgatattgtgattcaatttttgctactgtaattagttttgtctctgtgatatgattttgagtattttaaccttgtctctgtgacatagttttgttttgtttcgttgttggttcttttttattcttcgatgacttgccatcaaatcactgttagtggttgagaagaacaagttctctacgaatgaataagttgttagtagtacatttacttaccttctgatcgtatcttcaacgaaaaatgttttttgattaaattatattctattattttaacaaattattattaataaaattatccgatttattaaaacacattacattaaaaatattcattgtaaagaagtggattggtttttataaataaatgaattgttagtatatgataaaattaaaaagtatatttaaaaattagtgttttgtaatactatagtacatagcaatttaaatcgcaattattaaattcaaaactacaaactacactaagcagtttgacaaaaatacaaattgcatagtacaactaaaggtttaaattaatggaaaaaataaatgaccaaatccaaacagtcaagaggacaaagtttatttagaagttaattcttagtactatatttttgggtgaagaatggaggggacatgtattacaccatctcctcaaatcaaaattataatagtaatacaaactaattcaagatatttgtaacttaaatcaaaattataatagtaatacaaactcatttaagatatttgtaaagctacaaccccaccaaatgctcttcatcttcatcttcatctccatgttcattgttcatgattttaccccaaaagaaaaaatgacctgttgaagattcaatgttgaaatattacaagaatgttagtcaaatcaatcttgtctaaaactcaagaacataattgtatcattcataataataagggaaagttcatgaaggaattacatttcgatatggtgccaaaattgcttgctgctgctgttgctgctaattttcagtacttcgtttcctcttctgttttgattcccgcttttcatatgccccgagtctggtgttttctagtttaaatttcgattgtcgttgccttctcctagcttgcctagacaaattgctctcatcaccagcagattgttctaattctactttactatcttccaacttagcatctgcagaagatgttgccttgttagcatcatcatcatccctcactctcttctttttaccatgcttttttcgatcatgtttatctcctcctcgaagaagctcttgtgtcataagcttaaactggtgcctcttactattgggtaccttccattctttatctttatagggagccatctgtttcagagacacatacttgtttaactctttgtcatctgttacaaatatctcagcagcactcaacccgaatctattaggttttattttcgaatacttgaatcttgttttcaagtctccaattgtatcttcatagtctagtttatagtattcctccaacatggcctctttagctttctccaaaagagctgtttttcgcttcctctttcgctttttttctttactcacttcctcttttgcctcttcatcttcgtcatcactatcgctctctaaaccgtcgatcttatgctttaaacttctttcccttgcagctgagaacccgtcaccagttccaaaattgtcccaatcttttggaagtccaagcaactcatcttctttatcgaaatctggtttttcctcgtcttcatcagtgccaaaatctggtacagcatcttctgcctcgtagtacttgttaccaaacgctttcttcatcattctatcgtactcctcgggatcaaactcatcctctatttctttggcgctcaaagggagaacctcgtcatctccaattccagcaatctccatgatttttttaactctttcatccatctccttcttcttcaaattctttaaatgcctcaattcctcttccctctccaaccttgcaatctccatcctctcctccttatgcttccgctgctctttcctggccttcaatttcttcctaaccgagccctccacttccctagcatgacccaaaactcgatccccgggattctcttgaaacctatactcatactcctcttgcttctcaatcgccttctcatcttccgacaacagttccaagtcctcaccctcaacaccctcatcattgttcttatcaagccacatcttattcataaagaacttcttcaaaaacattgacttttcatggtcttcatcgaaaacctcatccaatgtcttatgatactcctcatcatcactcccatcctcatcccctccactcttttccttcaacttcaacaaatctccttcatcctcttcaacctcacttccttcgacggcttcaagaaaagccttacgtaactcctcttgctcctcattgtaaacaagtttagtcttgttattcttttcatctttatcatcaaattcagcaccttcttcaatcaaatgcttagctaccacatccttcaaatacatagccttctttttcttctctttcttcccttcttcaccttcttccccatcagactcagattcggattcaaacaacttgacatccttctccttcaaactcgggtcctgcttcctaaccttaagcaaagcattaaagaattccaaatccttcttctttatatcaacatcgtcctcatcatccgacgaggatgattcatccgaagaatcatcctcatctccatcagcatctggacgtgctcgacgaggaataagtcccttcttattcaactcctcatacctctgaagatcctcgcgcttcttgttgtgctcgtaccttcgagcaaactccttgtcaacctcaatcttctcaaattcttcattatctgaatcactaccgtcgaacagctgcataaccattgttcctaaaaaatcactgaattaaaccaacttccccagttctggttcacaatggcaatctgcaaaaaacagtttcaatataaaaatatgataaacaacataaaatcccccttacatatactttgtttggcttaggagcatctggataaaaaatattgaattttttacttcaaaagtcctttagggagaagctacgatgagttattttcaaaattacaataatttaaatcattcataattgattcacaagagatcatccagaaattttagttaaaataaaagtagaagtttagctaaaaagtccatagttttaattaattaaattagtattacagcatgaacaaaagaatcaaatcaatatattatcatatttcaaattcaaatccactaactcatgctcttgttctgaactatttttcacaaaggtactgaatcagaatgacagattatagctcaaaataacattgcaagatatcaccttttcttttcaaataaacatatattacttgcacataatacaaatctctagctatataataccaatgcacagaacaaaagattaaaatcttaactataaaatataacctactctatatctatgtatatatatacaaagccatagaatgaatgataacaccattatagtttataattatacaataatacaaattaaaacacaaattgaacaaaacaataaagattaaacgaagattacgaaa

SEQ ID NO: 30488 - DNA, 1561 bp, Cannabis sativa
  modified_base (1516)..(1522): a, c, t, g, unknown or other
tccaatgtttggcggtcggttgtaattgaatcggtccgttcacattggattagatcaatttatgcacacccctacctatatatatatatatatatatattatgctcaatgataaagaaaagaaaagaaaaaaaaataataaaaaatcctgctattccgctcacgaacacttggttactttcttatactttttggtctaaaaagtgtcactgtatatgatcctttaaatacatcataactttatgtaaacatatataaagcgtaatatacatctcaaatacatataattcaaggaagcatcttagtttcttctcctcataataatattccatttaagaggcttaccattaaataaggctactttttgaatgttgcatgaagttccttgatttggtctatatacatttgcagatatcggatcgttttttaatatattatatagcatatatacatatattccaattaatttcattggtatacctcctgttttaagtattagggttccttaaaaaaaattgtggacaatactaattttttttaataaactttatatttatactttgataaaaaaaaaattatatttatacttttcttacttaatattttttgtttttgtattttaatttttcaaaaaactattttaaactttttttaaagtcagttgttgattttctttcttttttgttttttttttcaattctctctctttttatttgtttttcaaactaattttttttatctttgtaatatatatatataataagtgtacatttttatacactactacaagaaatgtcacttttgccagcacatttttgtgttggtaaaagtttggcattgcgctggtaaaatgaaatttacttctgatgtgttggcaaaaggggttgacaaatcaacgttgacattagaacttttgccagcacaaaatgaaaagcactgacaaaaataacttttctcagcgcgtcaatacattggtaaaagttagattttagccactgcaaatgtgcattggtaaaactttgacatttttaccagtgtcgtttgcgaaatgcactggtattaaaaattacttttaccagtactgtgatggtaaaagtgacatttcttatagtgatatcttatttcttttaacactctttctctctcttacaaaaaaataagagcactcctcctgtatttttctatcccttacatgattaataaaagtaatatatatatatatatttgtttttgatattttgtagtttattcagagttaatttatgaataatttgcatattttcataagattgatgtcttgattatttttctgttcatttatagttgtctttttattattttatagttatttttatgttgttgtttaggtgttctataattgtttttacgagtttttttttgtacagatgttgtttagtttatgtgcagtttttatcgtgtatattatgagtttatcttagataatgattttgttgtatacatatgcatttgttttgttatttttttaggctaattannnnnnntttcccctgaactttgacatgtagtaaatcgtgccccct

SEQ ID NO: 30489 - DNA, 2124 bp, Cannabis sativa
ttgaatttgatcggttacttttatgtatcaatcaatatccaattcgcacaaatacggattttagattttctaattcaatctaatctgcacaagtgcagatattcacattttgcgaattggtttaaattggatcgtatatattaaattagattgaaattttttatgaacaaccctaggaatcaatatattgaagaaaaattataaaacagagtagctcaaataaatctgctggttcctttctataaaatatgagattcaagtcccttctcaatacttacatagtaataagaatcataatcgatatttaatgatgatggtttaaagtctagcaatagtcctataaaaacttgatatttgaagccaaaaaaaatgtcaaaagacgataatttccaatgcactatcattaaagtattattaagcattgtttttttacaagttttcatggaacttagaggttgtttggttatgtattcagtttttaattttgaattgtgtttttaaaagtaagattagattacagttttttgtcattttaaaattttatggtgtttggctcaagtttttttaaaactatttttagatttcttcttataaaaaaaattaatattctacaccatatcatgacatgaatccatcatactccagactcgactcgaaccccaacccgaacttggatcccgaccttgacctagaccccgaaccagaactcagactcggaccttgacttggatcccgatcgggaccccggacccagacccggacccagccaaggacctcggacctagccctgagtttgggatccgtgttcaggtctggggttagggttcggggtctaggatctgggttcgcgtccggatctgggtccgagtttgggatccaagtccaggtctaggatctgagtatgtgagaaaaaatgtaaaatataatatgttagacaaaaaaatatttttgaaaattgtgtaaagtcctttttttggcaatttagatgccaaaatattttttatttatggtgagatttctttgtgttaataaaccgattttctcaccttaataatatatttttgatgctcttttctatcataggaaagaatcttatatcagctatctattttctaagtttggaaacttcttgtaagagaagaaatactcttatggaaagttggctttacatgaaaactttgactattgttatttctctttaatgagtttgattgtgtcttgataagatcagatcaagcacactgtttttggcaggtatcaagtccatgtacatgatcagacacatttttgacaagtttccttttctggtctggtttgctgctgcagaatctgtctttgatgctgtaagacaggattttcttttaggaaagtttgtacagccgtggaatcgactttgtggctgtctctagggttcctatgtttaataaatagaacataaagatcagccaatcgatttaactattctagctttcattttttgcatattctcatttgtgaagagagagttttttttgtgagaacctagttgttcatctaggttttagtgtttatatatctgttcttatactggtcttagggttggttagaacattttaattgaacaatagaaaggtcttctagagaagacttattcaagccttattacttcgagaggaagtaagcactcacacttcaaagacgaagagagttcgctgtttgaaggtggttctgaaattagactcatgaagtgcattacaaaggattgcgaaaaagatttggagggagtttgtctttgtaattgttgatactttattaattgatttttttctctgggcgtggtcccgtggactatgagtgttcgaaagaatactgataccacgtacaaatttcttgtgtcaagtgattttattttttacaattatttttatttctgctggttctggtttgtttctgcaaaactattttttgcagtaacagaattacattctgctgttgcagactattacaattaattatttttctgtaataattattgacatttgtaaaaacttgatttttcaaattgaaaataacattttgatgtaacctttttttttaattttttaaaactcaagtttttataaaactgtttttaaaaaatttagc

SEQ ID NO: 30490 - DNA, 2980 bp, Cannabis sativa
aataaataaattataattccaaaattaaatatatggtgcgtggaacctttaaaccctcacctctgaatcctaaaagaatcttttaaaattgtagggttgggtgacacaactatctcacagcacagtcactttatcaaagccctagattctcttcactccataaacctaaaactttgaacgaatttcagaggctcttcccaagcttgagccttttctctttcacacattaccaccaaaaaacctttcaaagctcctcccatggcggccaaggtctcttcctctctatcaaagtccactcctttctctctaaccccatctcaaacccctctttctttctccccaaaaccccacccaaaacctttctcttcttcttcttcacctcccaaaacagcttctctctcctacacacacagacccctcttcaccgcctcggccaaaacccccatctccgacttctttgccgaagataagaaaaacccagatagcagtttcgatgaatatttctacgatgatgacgaaaagcctcgcgaggagtgtggtgttgtgggtatttatggcgactcagaggcctctcggctctgttacttggctcttcacgctctccaacatcgtggtcaagaaggggctggaattgttgctgtgaaaaacgatgttcttcaatccgttaccggcgttggacttgtctctgaagtctttagccattcaaagctcgatcaattgcctggagatttggctattggccatgtacggtactctactgctgggtcttctatgcttaaaaatgttcaaccttttgttgcagggtatagatttggttcagttggtgttgcacacaatggcaatttggtaaattacagctctcttagagctaaactagaagataacggctctattttcaatactagttctgatactgaggttgttcttcatcttattgctatttcaaaacacagaccttttattttgagaattgttgatgcttgtgaacaacttgaaggagcttattccatggtttttgtaactaatgataaacttgttgctgtaagagatcctcatggttttagacctttggtcatgggaagaagaagcaatggtgctgttgtctttgcttctgagacttgtgctcttgatttgattgaagccacatatgaaagagaggtttatcctggtgaagttgtggttgttgacaaagatggtgttcaatcactttgcttaatgtctcaccctgagccaaaacaatgcatttttgagcatatttactttgctctacccaactctgtggtctttggacgttctgtctacgaatctcgccgcgcctttggtgaaatccttgccactgaagcccctgtggattgtgatgttgtgattgcagtgcctgattctggtgtggtggctgctcttggctatgctgctaaagctggtgttgcctttcaacaaggattgataaggtctcactatgtagggaggactttcattgagccttcacagaaaattagagactttggtgtaaagcttaagctttcgccggttcgagcagtgttggaaggcaaaagggttgtggttgttgatgactcaattgttagaggaacaacttcttcaaagattgttaggttacttaaggaggctggagccaaagaagttcatatgaggatagctagtcctcccattattggatcatgttactatggagttgacacaccaagttcagaggagttgatttcaaataggatgagtgttgaggagataagggagtttattggatcagattcactagcttttctaccttttgatagtttgaccaacatgttacagaaagaagctcctaagttttgctatgcttgtttctcaggaaagtaccctgtggagccaagagagattaaagtcaaaagggttggagattttgtagatgatggattgaatggaagtttgggatccattgatggtggttgggttcaagctaatgtgaatccgaaagatgatgagattaaacaagatagtgttgtgaaagtatagaagaaaaatgctattttgggggaaggaataataactagtttttttttttttatttttaattattattattattttcagggataatgaaaccatgttgggcaaggaggggaacgtgactaatttcatcataagtattttttatttattttgaaatttttgattctgaaatccttttacaccacaatctagttattgatgatgtttttttgggctactcataattaatttattggaaatctttatcttagtattttgtagtttaagggaattcggagctcaatggagtttgtttgctttacatggatttgtcgtattaagcataaacggcactgagtcaaagtcaaattcttataattaaatagacttttcttttcctactatcttgttctttttggagtgtgtttgtgtttttttttttttccacaaaggagttgatttctagagaactttaaaaatgaaaggagttgttttgttattgggaatagacctggattattattattattattattattattaatgattatttaaaactgtaattagactttactgtcattataaagtgtgttcataaattactctaaattacaaagctactatataaaactaatcttttttagtttaaaacgaaattaaatcatattttaagtttttttctttaagaatttgttattctgttactattagagtttagatcggtaagttttagattgaaaattaaagaaaataaatataggagaaagttttgtcgaaagaaaaagatgagggtttcgttcatattttctgtttattgatataaaattataatatatatatatatttatataatcaacttatttgaacgataaattttaaaaaatttatattataataataatagggaaatttgaattcctatacttacataacctaaaaatttgtcccctaaatgcaaagttattaaaattggtaatatatgaccatttta

SEQ ID NO: 30491 - DNA, 4270 bp, Cannabis sativa
gtggacatggaatatttgattaggatgtttatcttaatttaatattaaagaaaagacaatagaaaaatttataactaagacataattttaatttattagctataaataaatgtttctcttgtaattatacaaaacatgtataaatagaaaataatattggattggaccaagtgaacaaacgtacatcaaccttagattttcgcatatgataaacaattttactcatgaaataatcttttaacaaaattaaaataaaatataaaattttaaaaactaaaatcaagtataatttaaaacacaacaagactcttatattatttttaatataagcattatttgtccttttttatataaattttggtaaaatatagattttttatattataatgagagatatttgtagtactcaagatttacccaatagttataagaaaaatacaagttggttaagcatagaaattaaatacccaattactattttgcattaaaaaaaatacctttttgtttttttaatgaaaaacatgtctaaaatattaaaatattgaaatttaactatcccaataataaaatcaaatgaatgaaaatatacttttaagttataaaataaccaaaattaattctaaaatttataaataattttatttaataaaaatagaaaagtctcttatttattacttgaaacttgaaagcaacacatttaaaaccttctgaaaataaaaatatactcattaaaaaagacatagaaacaaacaaaaagaacatttgtatttgttccaagtcaatagaaatctcactctcaaaaatcaataatcactactcctatgatatttattaattcaaaagggcatctcactaaaagaataggcaaacaaaacaaacaatgaattcccattctgtctttttcttttctaagtgtaaaatcaattttcaggctgttgcacttgcacttgcgcatgactaatcaccaaatttaatctctaaccacattattctattgtgccaaatagtaaacagagcacatcaaaggtggaactatattgcattataaatatggtcaaagtattcacaattgttatgaggtttcaatattaagcaaagactcgtgtgtggtggtggtgttcttgtgagtttcttaatgggacacatacatttgaataatgaatatttaagataaggatattggagctaaacaattaagggtcaatacaaatcattatttttaaaaattgacactatagattttctattttgttaaatgataaaaaaaatttcgtattttttaaaatggtgcaaaataatacctaaatttaattttcgatatatatatatatttttttaaatataactaacttgaaaaaaaatttctaacatataaatagatgcagaaaatatactcaatcttgttataataacttttgataaattttgacatgtactaaatcatacctcttgaatttttcatgtcgttattaagattgttagatttaaggacttttgtccaattttactaaacaaagtctgacgtaaatgcaaatttaaggggtacgattttgtatttttgaaagtttaggggcatgatttagtaaatattaaagtttggagggcatgatttaatacatggataattgtcatattagtaaaattgaatgaaattgaacagaagtctttaaatttaacaatttcaatagttcggggagaatttttaccggcttgaaaagttcaagatgcatgatttggtacatgtcaaagttcaaaggataaaaattctaattagtcctaattttaatttgacaaaaaatcaacttagggtctaaaataatatttactcaaaagtcaaaaaacctttttattaacattcagcaaggaaataacaaaaatgaaggttctacatgtatttttctcttaacaaaattgatcttgcttagcttattgtgacaccaaacaagttgatcagtcgttatctttgacatgtttagaactctacacactaatctcatatctacttgagagaagaagtaaaggtgatctgagccatcatcttcctgcttttggaatttcttaagtatgcaatgcccactcctcaatacctctttaagtttcttgtctttctgtataaaacacaatacaaacaagattacaacataaaaataaatttcgtacaaccatatttttgtaattttttttgactttttttttaatatttacgaaaatatccctataacaaattgaacttttcacttttcattctcatagccaaacaattaacaagaagtaaaaccaaaattaccttttggagctctgtttgaacagttactaaaagatcagaatctgcagggtcatgaagctctacttgagttcctcctctacgatttttcggagccaaattgtgagtaaacttatcagcctttatgaatctccaaatggttcttattgattcttccaaaatctctaataccatgtcacttgtaattgcatcactatcttttcctttacttcttgctctttttctttcttttgagtcttctgcataatgtttaaacataccccaattaagctaaagctataataatatcattctaacacaagttcaaatgaaaactattactaagtactctcacctcttatgacaggtacttgaagaagatttttcataacacatctattcttgacataattctcaactcttggaccttgaaaaggttcattctctacaaacctgtgtaagagaacctgaaattgttgaaattcattggcaacttcattgtattggcgccacacgtaaggatcagcttcccatatctcgaaagccttttcgtattgccattgaaggaattcccatgaaagacacaaatgtccaacgtaaaccatttccaaatcggtctgcaattcgcgtatgaacttcaccatttggtccgaatgaggcttttttcttttgtgtctccagaaagttgaagacttggggctccataatgagtgaagtgggtcctttgattgaagaaagcctattgattgttcatacaaaattagatacggggttaaaataaattggactcgatattaaattgtactaatagtgaaactaggcagcgtcctttaacatttcttttagacatgggctctaatggggtagagagttataattggcaacatacacttttgtgtaatgcataaataagcataaagcccaaaaaaaagtgactttaataacaaaggtacaaaaagaaaagcaataaagaatgagaaaagcttattaggggcactagagcattattatcatggtgacagagaattcagagttaggtaaaggctccataccataaagactaaagctttttaaatgaaagaatttctaccttcttcaactactaagcttaaatttacacctaggaataaaatgtcatgttttaatggggtttctagtttatgaatgaaatcacaagtactttggtttggttgagttgtatcacaaaaacattttcttaaaaagttataaagtacacaaaacaagctcacaatgtttatatatatctatctacttcttccaacctaaaaactataataactctaaattgagataagaaagaaaaaacagctacaattacatatagaattgccaactaactagattgagtgggcccaactttccccaacataggtaagttgtgataatcataccattttattatgccataaagatgaaaaaggcagcatatatatatatatatagttcggtaaatattattttagacacactctctatcataaattaaatcttttattttttaaaatattacataaaataattttttatcaaaataaaatttaataatcttttatttatttgttcatactaaaaattatctttaaattgagctcaagttattgttttgtttatcatttgacgaaaacaaaatggatggataattttgtaaatcccatattccaaaatgtaataatagtaaaaataatagagatattagatgaaaacaaaaaagacataagtaagaaactttgactgacctaatgcgtacatcttctggtaattaagaatatctagtttcctcatacgttctctgtaactcttataaaacttatgaagctcattcaatttatcaccatggttaaacttctcatcaatcatcttccatggcttcaaatcctctgttatctttggtgattcagattcttcaagaatggtaggaagtcctgtggctttcacctttctaagctccattttcagctgctccaccaattcttgatgttcccataa

SEQ ID NO: 30492 - DNA, 2399 bp, Cannabis sativa
gccatacaagaatgtaaaacaattccactctttgctcttctggtgtgtgtgtactggtaggttgctatcaagaaaataaaaatcgtttggcttataaatcatctgtattacctcctctgtccacatcagttattctggagtaattaggacaagagtcctttttcttatatagaggctaactatatgtttgttaagtatacacatttagtgttctacttataaatcaggataaattctttttcctaagaaatggttgtgtaaattattttggtttgccattatgtatttttatctgatgtttatattgcaacgaaagaacttctactattgcaacatatcattaatcctagaaatcaaatgttggtggaacactaacacaacctaatgtattttattatttgtacacaattttgaaaaaacgaattaaaagaagaaaaatctcttgagaaagagagtttagtacattttatttaatcggcggttgctagtacgataatctctttattaatagtaccattttcttgatctgtaaaattctgaggaagaggaacatcagcaatgtcttcttcttgagataatattgttgaaggaacaataccaatttccatactcttgttgaggatcacactcatattattgaaccttatatgtattagttctctttgagaactaagatgagtttaggtgtcattttgactgttctggaagtccactgctgagtatatataattatatttattaacttgataattactcttggttggaaaaatgatttgttcttaaaacttttaagcagtattcaggtcatttttaatgttgttatagctgtagagattcaattctaattaaagtatttagctataggaggaaaagggtgtgtgtgtgttgaaaaactaatataaactaatatagttttgccataaatagtatcatttctgggtacagtctcatcatttctcagatttgatgaatacagtattctctccactatcattatcatcatatagatccatcccatatctttatgggattaattaggttttctagttaattatataaataaatagatgttgtatatatatatatatatgtaatattttatattgttttttctttacatatttagtatttacatatacatctaaattttagtatgttaatttttatagctttgttaggaatatagagtttttgttatgcgtgaaggtctttctcaagtatttatgttaccaaggttttcctctgccatgaacaagggatctcaataacatagggtaggttagtcctagacatttgatctttgtctctattttttttaatttaaaaaaaataaaaaaagcttaggtaattctgttataattagctttaccctgtaattttgaatctgtatattaatttttttttgaaaatcccttgtatctctaaagcaattaccctttactttctctcatgtaactttctcatactttattactgctactgtctttctatttcaattacaaatttctggttccaatgtttgtatggtgcaggtatgatagttgataattaatttaatatatattttgcagtttttgttattaattttttattgtttaccagtgtaatgcagcgtgaactaaacaaaaatgagttgaacggtgtttatgcatttataaatcctgcgactgtggcgtctactcatggcttatggtacaacgagcgtgtagctttgctttttcagcgattgagcaacatacatagttattcataggtggacatgaatgattgtttttttgagatatacactctaacttgaccaatgtataaatgtgttttttaatatatattatctaacttaacaaatgtatgaattttcttttataaaaatattattaatgttattatattttttcattattgtatattggaaatttaaattataaaaatgcagggagagaattgtattaacatttgcaatttctcccttaccttttattgtccatcagtttataaccgtcattttaagtggtgtattttgttagttatagtctgagtgaagctttttccaacagttataaactgtcatttaaaatgggttttctcaatggttataaaccgtcatttaaagagatgttttccatcagttactacccgatggaagtttttcccaacagttataaactgtcatttaaagtgattttttctaacagtttttaaccgtcatttaaagtaactttttccaacagttataaaccgtcatttaaagttccagatttttatgacacccacatagccaacggttttaggaaccgttgggaaatagtataaatgatagttataaactgatgggaatagcccattttgtagtagtgttaatgaaaatcaattgactatgtctgcaagcagtattatctcaa

SEQ ID NO: 30493 - DNA, 2474 bp, Cannabis sativa
  modified_base (30)..(34): a, c, t, g, unknown or other
tcatatgcattcttaataataataataatnnnnntaataataataataataatgtatgacatatttatatagtttgtatgttatgtatctcggtcaaaaagtgtttgtgattcgaagcttgaattaaatagatgtctttgttaaaaagaagcaagagctctgcagtatatgaatttggatggtaagaagagctaagttggctttgatataaccaatgttatatacctatggttggaaaaaattgaagaacaatatttcattatgtggtctatttttctataggtaatagataatgaaaacaaacaataaaattcaagtctttaatgtatttgaaagttacacttatatttacaaacatatcataataaataattacaaaaatgaatagaaaaatttcattgtaaacataaaagatacacatactttctctatacaaccttacaactatagaaatcatcaaatcaaaattttgggcctgagattagcaacaaaacaatggcttgcttgcttttgaatttttattaggaaataggacaactggctttatgatagaattaaataggaatttctagctatttgagggatatatgtagaggaagagaggttagtatggttgtggaattactttgtacgtaattgtaggaattctttagaattcattgggaggcttaagggttcttcaaatttctcctctatcttttattttctgtgtttgagtatcagtagagaaggcttaatagctatttttagatctgagttcctatcaatttcatgttcaattgagaaaaaagcaccaaacaatgagccataatacaacaagtagaacatctatatttaaattatgaaagatttatattagctgtgaaagtttcacatgccccatttctcaaaagtgaaattagatgtatcatctcaaatcacaattgtaatatagaaaccagtgagcattaaataagcttggaataaatgtcagaattagacaagcacaaacctttattatgtgttgcatgaagtgataaggacttatataatacaaaacatagcacaatacaacaaatgaagccattgataaaattttatttgtgtgtgtttatatttatgttgttcagttgttgcatcccccaaagattctcattttgtcaattcaacaaacacctaatctacattattttacaaaaagttgactatatcatatactgaatatactaagattaacccattaaggagtttcccttgacaatgttaaaattatcatgtgtatagattttaatagagtcactgctcatacatcttttttcattttttatatgctataaaatcagtaataaggctaaaagaatccaaaatttgaaaatgcgcactgctactactgccatgactagaggcaaagcaagaaccccaaataacttttttcctgaatgagggtaatgataacaaaaataataaaactaaacttcttcctgactcgaatgtgtacaaaatacatatcatcatatataatactgaacctatataaatagtaggtgattaattacaattttatcaatatccccaagtaaaatactatccttaccttactatcttacaaacaaaacagtccataagccatttcactggacaacaaagagttgttaactcagaaaatattttacacttatcatatagaaacacacaaaagaagaaaaaattgaatcagataaaaacacacataaagaaaaaattgaatcactagattataggaacatacacacatagaaagacgaagatattgaattcacctgtgggagcttgaagcttgccacctgtagctatcgttgacgagaataagtcttgggtgggagtcattagtgggctgctgaaggaaagggagacatggagacagagacataaagagagaaattgagagagggtgggaacaaggacggagacgtccgcgggctggaactgagtgagaggaaatgacagatgaggtctcgagttttttataagctagatatttgatctggttaagggacggggggtgacgatgaaggcaaaagacaggggtcgcttggagtttttaggttaatgttcgctatgtgggagagggggacgatgaagtagggcatatatctgataatttattattttttttaattaaatgatataaggtgacgctccatgcgtgtgagcaaaggtttttaccaacacgttatgcgcgtcgctaaagccacgtgttttacacgttgttttagtgacgcgcataatgtgttggtaaaaacctttgctcacactcatggagcgtctctataggctatgttttttttttttttccaaaattataaattttaggttttagtatttagtgacacttcatatttttagtgacatacatttcgggtgataaacactaaatatttagagtcttattatgtgtgtcactaaaaaccactcttaactttttagtgacccacacttttatgcgtgtcactata

SEQ ID NO: 30494 - DNA, 3955 bp, Cannabis sativa
attgtaataaaagaaagaggataaataaaaatgatgatgtaggcgtgtaggggtatatttgtaataaattgtgcaaatcagatttttggtgtaaaaatttcaaataacaaatacacttcaatatttaaaaaaattaaacttaaaataatttttaaaaatcattcttaccattttttttgtcagcttccaaaaaaaaaatcacattattttgtgttaaaacaacacaaaggactataactaatatatgcaaatactctgatccaaatggtgggtattttatgttttatgttttttattgtcacatcctagaaaaatgaaggaaaaataaaattactatataaacaatggtttatgattatgatggataagaataaacttcacataaaaaaaatataccatttaatgtattattaggtgatcaaaattaattttcaaacatcaaacttgtattttgttttcttcttcttattattttttaaatgccccaacccaacttaacatccaaataagggaccaaagaacaaagataaaacaccaaacacaacattgcaacttcttctttggtaaaatgattatattccaaatatgattccaccaaatacaaatatcaattaacaattcaaaagatcatcattttggggcttggctttgaatcatttctgctttttcttttcttctttttttcttttttgtataaaaaatcacttttgtggagctgtaataatagcatggtgtggaattactaaaagttattgattccaccaacaattcataaagaaacctcatgagtcactaacaagcttgagactcgacgacattgatgatccggccaagaaggatttgagaatggtgagagcttgttttggtctgtgcagagggacttcatggcctgctcctctcacagacacaaaagtgagcccatcatactcctgtgtccatcctccaacctgttgatgatcattttgcacatgtttaaaactaaatgttgtctaaagcattacatgttaatcatgttatttatttgacaagattatgattattttggcagggctgatgcaatttaataggacaactaactcaagtatataagggcccgtttggtatatcagaatattttagtaggcgaatgttgttttattatgagcattacttacctctccatcatcataccaggcgtgccatgggcctcgagttggaagcttaagagcgtctatactgtaccgagtagatgtaattgggatgacagcatctgtatctccgctgtcacatacaaaaaatcgagacagggtacaaccattagctaatattttccaaaactaaaccgaaatgggagaatggacatgcttgctagctgaaaaagagttcctaaacaaggtcaaaattttattttaagaaacatgtcatgttttggaccatgtaattgtaacaagaggagaaaaaaccatgagaagttgaggtgttgaaatggtacctgagcacccatatgcgaagtcccgactctatcaactcctggtaaacgtcaagcacagatataggagaatccttccagttggcacctaccacctcactatttatcaaagaatatgaaagtgaagttaacaagattgatcatttgctgcagcaccaaatgccatcaacaacaatagctctaaaaacatagaatataatgtgcatatcatatcaagaaagtttagaaatttgatgtcaaaccatcagaatccattatcatatatcttgttaagaaactgatgattcacagtcaagtacagctgaacacaaacatgacaagaatcgatgtaaaacttgagcagctgtactgtacattatcagaatctacagaattgttcaacaagaaatggatggattccaatcatcacaaaaaaatgctttatacctgcaagtctcccatattgatggtgcacaatctacatttacatgaagtgcctgtttaacctcgggtgagttgaagtagacaatcgaatgcttctccgtgcaaggatcatacttctgactaatgtgaccaacaatctacaacagtaataaccagtgttaaaagtgaataatacaacaaaaatatcaaaacttaaaacacaaaagcataagttcagtttccaattttaggatagtgtagataattcgccatggtgattacatacataaaactgtggacgatcaatatgtacattctaatattactaaaaatagtagctgcagctaactatttttagtgtttggatatgagggttcaagctaaacacagatggaaacttgatgagtaattctataacataaagcatgaatggtagtactacaaatgacactctgaaccgaaaaatgtcacccttacaaaagttatctcaaagagcttatactgaaaaagttgtatgtaaaagaaaggcagattatcaatgtctattaccccattctaatattagcacttatataactatttattcacctcatgaaacataataaatgacttgcagagaagaactagcagagaaaattatttgtttactccttaaataagataagcagtttagaatagcatacttacatgctttcttttccgcaattgatttgtttggctaccattagcatggcaagcgggggtatagatgctatatggatcaatgtcgccaagttcttcagaagcgatgtcaagaactttatcacatgaacttgatgaatgtataaaaggctgagaaacacatagttcgtttagtaacttgtatgtctcatcagatatcaagccagctgaccacatgaattggaaaagccccaagtgatcgtggtgatcgtcggttaaagcatttcccacctgcattaaacaaatatcttagctctttaaactctcacaagatacacaaggaactggaacttttcctagagaaatgaatgaaacaagtaccagatagcccttcagattaattgctttttcctttgatgcagagttgtgctttacaattgcttggctcagctgaggaacataatgtcctaatacatagatgtccatgaatgaaaccaacaattcaaacaaagtattgatgatatatgaatgtaagtgtgcataagatatggttagcatgaagaaattggagaactggttggttcaaacatgaatttagcaattgaatttagagatatttggtacttaattttattaaatcagcagaaagtgagttagaaggctaatcacctgcatagctctctcctgaaatataaaagtcccttcctttgtactgaggaaaacgttcaacccaattcaataaaaattgcagagagtcctcagctgcaaaaagagagaaataatatgaattaattttgaagctaccaacacataaatagtttgcagtgcagaagatattgagtgttataccagttcttttgtctccatttgatagtaaatcagaggatgtgtttgaatacgaataaccaactccaacaggcgaatcgataaacagaagattagcaactgtagaaatggtaaagcaagttagagaagaaaattaataattgagtaacaagggcttctatgcagccaaataggcaggaacagctcattgttaacactaagtatttaaaacactgtccaattaaaccaactaaatcgaatcgtatgaagtcaaatcatataagagagaaacacacacaaaaatgagcacaggtgtttcgaaattacatactcaactcaaaccaatgcacataatcactttggtaacaaggagcataaactgcaactagtgacttgtataaatcaaggcgaaatcgatattgtagagcttgaatttggaaaataatccaatggaacttgataacatacagtgcccttaactaacttgcactgatacatattctcatctaattaattatgctcactccatcatggttgtagtaaacaaaataacacattctgatcattattaatcaaagttaattttaaacttcaactatc

SEQ ID NO: 30495 - DNA, 1796 bp, Cannabis sativa
gtactatttttagcggtgcgggttggtttgaaaaattgatcaaaaactgcatcacccgcatcgcgaacacctctaatagattgtttaaagttataatatatttttaataaactcgaccgcaacaacgaatacatgttgggtcccttttgatggttctgggttcgagttgcgggtttgggtcccgagtccaagttctaagttcgggtcccgagtccgagtttgggtcacgagttcgagtcgtatgttcaggtctgggtttcgagtcctgagtttggttctgagtttgagttagcggttcgagtccgggtccgagttcgagtctaggtctaggtcccagttttggtttgggtcctggtcccactttgggtctcaagttcgagtctgggttggagattgaggttgaccctagatcctttataaatattataatacaaactaatacggactatttgttatgtattaaataatcaatttacattgtattaaaaaattgagcattgttattgggcactaatggtgcccagcaccttccatatgtgccacccaatgatttgttagcaatattctctaaaacttattttcttaagttatatgggactcgctatttaattataccaataacagtatgacactaaggagggtgctaggtagggtgataggcaccagtggtgccctttagcaattctctaaaagatttggtcataattaatacaatccaccacatagtatattatttaatacaatacgacttttataccctaccaaacgagttcttagtgtttaataggagccttcacattgtagagaactactaccacaattttttcttacaattttttagtcaatctttgtaataaaaagttgattaagagttgaataagatgtaattaattagcacttatctatattatattacacccaacaaatgagctaaatagctccatcttcaaattttaaagaaaaaattataattttgagatttcattgagttaaagtttagctattatatatgtattttcagcttaatgaatagtgcttagttaagcgtaaaaattactatttattgagctaaaaatattttattatttttatttaattttttttacatttgttgtattattatattttacttttataaaataaataaaaatataatatttaaatgatgtaaagaaaaaaaaattaaagatttaatgtatggtataatgtaaaataaaaaaaaatagtgagattttgatgagatatttagaaaataaagtaaaaaatttaataaaattgcttttataatacaatcaacaagaataaaaccatacacaaagtataaatcctaacaaaaaaaaaaaaaaaaacaaatgaaggaaaagagtatgcatcaaaataagcagcattagatggcaattcatattaaattcaattgagcatggttacaagataatttcaacggatttaatgatgcctagttagcaattttttatgttattgtggaaattattgaattgaatcaaatggcaaaatatgcagcttctttgtaatgcttaacaccttaagagagaaatgataaaagacatcagtggtacctaacactctctaaggtgttacatcgttggtgcattcaaatcgaatcccatataatttaatgtaacaattttttataaaatatcactatctaattataaacaaggctaactctaagctaaggtaagctaagcttgcgggccactcatatcagaggcccaaataaaaaggggttttttatttttacagattaaaatagtttttttttttttttttttttt

SEQ ID NO: 30496 - DNA, 1094 bp, Cannabis sativa
aatatgatactatataatacaatactatacaatacaatatattacggtataacaaacgagccataagtgtgtaaatttaaactcacaattacaactttaaatcattaaaataattactttttttcttgtcaaaggggaaatttatggagaatttcatgttcaaatatgtaaactaaacaattgactcgcattcggtgttcatagaatctctgttcatagaatcatagacttttatttctagaactaattcatctacttttcatatttaaaatatccaaagataagatattaaaatatatgtatctctaaatataatctcttccaccttacattcttgaaaatattcaaaaataaaataaaatactttttttttctagatcaaactagattgatcaacgtatgcatataatatttttattgccatgacagtttcattctatattttttttaacaaaaaaaaattggattttatatattgtgtaagattacataaaaaaaccataatctcaatataattttaaacatacttgacatacacttagttataataatactatttggtcctatattttattatagtaaccttatattcttagaaattttattttgaatttcactttttttttttaaaaagaaaaaaaataattaaataaaattagaattctaatatcacctgtagtcaaaatattttcaaatataacaaaaatacaatggatgaattataaatcatattttaatactcaatattaaaatgggtatatatgttataaattttttaaaaattaaaagtatattttattacaaaatataacgtctaataatgttcggtcaataatggacgaaaatactagttcaaaattattttataaatcctaaaatattatattatatgtttcaaaaaaaaaattatattatatcatttttgtctttaagttggtcaaaattggtttgccgccttagtttttctctatttgcctatctggacaacctagcatttcatttttatataaaggttgaaattgtaattatagtaagtaatttattaaattttaaataatttaagatataaaaaaggttaattagtaaattttttc

SEQ ID NO: 30497 - DNA, 1120 bp, Cannabis sativa
aggtaaatttgattaattgatgaataaaaaaggcatttttcaacttaccccaataaacaaggggatgctcctaaatagggcccatttattatggaggctggaaggagttgtttgggtgcttggtgtcgtgtttcaaccatgaccagccatctcaacaaattatttatgaaaaaaatataagaattatgaatatacaatgatgaggtggctacatcacgtgggctcgtcctacgtgggatactatatgggatgggcgaaatctttttagtggtgaggtggagtagtagagagagaggaggctgtagaccactagttctttgttgaattgtgtggatgaggttgagtgtgaataagatataaggttctatgcattaagaccgttgaggagagagataaagattgcgaataaaataaaatataagagagttgtagtagtaaagtaaagagaaagagattgagaaaaaaaatagtggaaaaggttcatgttttttcggttgttgtggctattatccatactactaaagcgtggaagctaacgacacttgtgggccacaagttcttaagcccataatattcggcccaatttccattctataatttaaattaaaaaaaaaaaaagaaattacactatagaatttaaaaggttcttataataaatataacacatttaaatttaaccaatttatagggtattttttttgcttttagatctttttatgatatttgatatgccataaaattagattttcaaattctatatttaatgtttttatttgtttaggaagttttatttgtcactgataccagaaaagttaccggagtttgttactggtaccgaaaaaatcaccggagtagcggtcggtgctggaaaagtcatcggagttgctgcaagtgctggaaaatttgtcggaattggcgttgtcgccgaaaaaattactgaaaaaatcaccaagaaaaagaaaccactttcttggtgattttttgttgacaatgccaattctgacgacttttctgacgctagcagctacttcgacgactttttcggcactgacagcaaaatgccagtttcttggccatttttttttgtgattttcttttcacacttatattttgttttaga

SEQ ID NO: 30498 - DNA, 2088 bp, Cannabis sativa
agaaaactaccctagtataaactcttaacacataatttgtttattatgattgtactgtagtgggaaatatggtgatgaagtaagtgtggaaaagttgaaagattttcataggagaagggctcaagttctggctaactctggggctgatcttattgcatttgaaacaactcccaataagatagaagctcaggttattatttacagcttatagtaattattatatataattcaattgtttttaatcaaatttgtatatatgtgcatatatataggcttatgcagaacttattgaggaagaagaaatagatattccaggttggatctcattcagttcgacagatggaatcaatgcagcgagtggcgattccatcatggaatgcgcagccatagcggattgttgcaaaaaaattgtggccattgggattaactgcactccacctagattcatcactactctcatttcatctattcgaaaggtaccattattattgtatcatctcctgttttcaatattactattattaagtttaataatggtggcccttcttaatggacattattattacaggtatctagtaaaccaatagtgatatatcccaacagtggcgagacatacgacgctgaaagcaagcaatggatagtgagtttcagtactagatagatcgtcttaataaataataataataataataataataataataatgtttttttaaggatatgtaattaatttattaatgcagagatcgaatggattggtagatgaagattttgtgtcgtatgtgggaaaatggcaagaggctggggcttccatattcggaggctgttgtaggactacaccaaatacaataagggccatatccaaacttctttctgctggaaactcttctaaatacaacacttaattaccaatcaataatataaatatatataagtgcacataatacatatgtatggcacacccagctgtttagttctttttgtcttgttttgtaagtaaataataataacaacccaaagagaataagaataaagacgtacggaagtaacaaggttgtttagtatgttttgtggtttcttgatctattgtccttgaagattatttgtcgtttgctttagatcaaaatgctctcctctcttcttttgtgtgatcacttgttatcgtagcttatggctatctcaatattatatatatcgacggaaataattctttggtttagaacaaaaaagtatatttgtttccacgatattctgttcggccagattaaaaaactagtatatgcaatttagtaatgttaactgatttaattgacattattgaagaaaattaattcgatcaaaatgaattttgcaaaaagaaattgaaattgagtagttaatttccatgatctactagtagagctgagcatgccaatggaacctaatgatgtaatttgggggtctttcttgaacacatacaagtatcaaaatggcaacctatatgcagcttaaagaaagtcttagttgttagaatttgagataagataatgaaattccattttaaaatcaattagcaatgacaggaatagtcaatttatcttatatatggtaatttatttctacacattaacaatgtgtaattaactctaataataacaaaagtaaggctgcattggaaggagaaagagatcaccaaagtgcccggtacaagccaatagaagttaatgaaactattcatgagttcacctctactgatgagtcacccagagaagagttaaatttcacttatgctggaagatataaactgaagccttagagttagagatgctggccatgaacctgatttggctgatgtcatctaaacagactgagaaacttgctgtggcctatggtcctattatcaccacaggtcaaggaatgccaattggtgcggttaatgaaccacagatttcactttttcagggacggacatagctcttgtaatgattattggtaatacatgtttttatcctccgaaaagaaaagatatctttactttgtaactggctcaatactaaattccattgttggctctgatatagcataaatcaaaacctatctgaatactga

SEQ ID NO: 30499 - DNA, 954 bp, Cannabis sativa
ggagtctatatatggaggtttaatgtaattcaatttattattgaaattgaagccacaggaagaactgaagaacctcgtgaagtgttattcaataagccttgggttttgtttggaatgtgtgcacactaacattttttcacatttttatacttaaattctggtttagtatgctgtattgtattatattgtgttagattgtattagtattatttaatataatactatatttgatattgactaatattaaaaagttgtgtaaaaaaatctatttttaataaactcgaccctaacaacaacttcaggttaggccgggtccagttttggtctcgatccgggttcgcgtctagatcccatgtctaggtccgggtcggagttcggattcgaatctgggttacgggtccgggtctggggtttgggtcctagttcgggtccgaatctcgagttcagtccgggttcgtatctgggtcttgggttcgagtacgagtctgggtccggatcggagatcgtggttgacctcgtatcttttgtaaatattataatacaagttaatgtagaccatttgttatatattaaataatacaacttatattgtattaacattttttgttataataattaatataatacattgttttatttaaataaagtcttatttattatttaatacaatacaaccctcacccaaataatttatatatttatacaaaacaaacatgatcctttaatatatattgttaatcatccaacaaatatataaacatgtccatatatataagatacttatgttacattaaatgtgaatatataaccgtagaaaaatttgactaattatgtatttattggaccaaattttttttaaacctaaacaattcaatattggtaaaatatgttattttttttcttaaaaccccattctacctctctcatttgaacaattctctctctctctctctc

SEQ ID NO: 30500 - DNA, 3019 bp, Cannabis sativa
ccggagaaggcaactaaagcctcgaagcctaagaaagctgtaacggcgaagaaagccaaatcgaccgcttctcatcctccatttgctcaggtattcaattcgtattagtcgcctttgaaacggttcgaatttttgttgttttagatctaaaatgttaattcttgtttgttcagatgatttcggaagcaattgtgtctctaaaggaaagaactggttcaagccaacacgctatcacgaaattcatcgaggagaaacacaaacaattgcctgatagtttcaaaaggttggttctctcaaacctgaaaaagcttgttgccgctgaaaagctcgtaaaggtcaagggctccttcaagcttccatcggccaaatcagcttctcagaaagtttctgcaccggctaagaaacccgccgctcctaaatcaaaggccgctaagccgaagtctaaagcagctgcgaccaagccaaaggccaaagccgctgccaagccaaaagcagctgttaaagccaaggttgtcgcaaaaccaaaagccgctgcgaaacctaagcctgtcaaagccggagcccgatcatcgactagaaagacgccgccaaaggcagccaagccggtggctaagacaaagaaagccgtccctgtgaagaagccaaagagcgttaagaagtcaccggcgaagaaagctaagaagtgagaatcgccgttattaatggtggacaatagaatttgaattatgtaaattagttggttattcgtgcttagtaatattaatatatataattagtttttaatttttgatattagtaactttcatagttaacattactaacaattatcttattttaatttttctaaaaataaatggttaataatagtagtaacaataataacagaagcttatctttttaacaccatacacataaaccaacccaaatataaccaataaaacagagtagacaaagaaactataccaacagacaaagcaaattctttatttttttttttcttttcaataaaaataaaaatgaagagaaagaaaaccgcagagtatctctgttaatatcgtccataatcagaattgggtcttgtatggcagggttggttaggaggccattattgatgttgtttcttgtaatggtttggtatgtaaatgtaatggtactattatcaaaagcagaacctctattagagttggtgacacgtgtgtgcagagaggatcgtgtggataacaatactgtttatgctcaaaactacgatctgatattgaatagattggcagaaggtatgtctcttaaaggttattcgtttggggaaatgggagacccacctaatcgtgtgttcgtcttctctcaatgcatgggcgatctcaacaacaaggaatgcagcatgtgttttaatgagattaaggatatcttgtctggttgctttccttcttctgggggtcgtattttttataatggttgctttattagagctgagaattataacttctttaatcacacagttgagcctgatgatttaagggtaattaattaattcattaattattatgaaaatcttctctttatttttttgttatgttcttttgattttttttatatatagagatgtagtgatggacttgatctgagagaggaatacacggagataggaaggaaacaaattgggaatttggtgagggtaacaatggagaataatgggtttggagcagtgtataagaaagctggtgaagtgtctttttttgctgttgctatgtgttggaggactctcaatagttcattgtgcgaggaatgcatacaaaatgccgcagatagttgcgttgcatgcctacccgccgccgagggtcgtgttcttaattccggatgcactgtgcgttatgctgattatgattttggcaacaagcccgatgtccgtagagccaaaggtaccctacctattcactctcatttaaatgtgtgtttggaggtgaagcaaaactgttgtgatacatataatgtcaactcaattctcaattttcatgaggagatattcattttgggagtgcaattggaatatctcaaactatatagttactacagtgtaattaactaattaaacaaacccatcaactaggctccattctgagcataggcgggttagggctatgcttagggtccaccgagcccaaaccccccaaaaaatgctccttttaaaattatatatttcttttagtaattttaaaaaataccacattttactctaaagaaggactcaaatttcttttttcttttagagtccgccttgctatctaagacccaattctaattacaagataacttaattttcaaacacatccttaaacttagagcttacttttaatagtttaataattaagtagacattattcccatctcatgcggtttgaacgtttagagtgttttatacaaataatacttattggtacaatctctttcctaaccaagggagatagaatacttgccaaaacaattttatgcacttatgttgacatgggttttgctcttcctaagaatagtttatccttccaattcaataggtgtaaatttaataatgcatgtacttgattacatatatattttagtccaaattgtcttgtataaattaattacttggatgttcaattaacattgcagaaattctattgacgtacgctacatatgttcttgtggggttggcagttagtgtatttgtggttatggttggtgtgtatgccggtaaagctgcttacaaacgaaaaattcgccgcttgaagaaattaggtacataattaatgttcaacacttacaaaacaacaattagtttcaaaatgatgatcatatattgtataatttaattaataaacaacagcaaaaggacgacggctggacatagtagcatcaaagaaaggttcaaagtttttggagttcaaccactcaacacttgaaaaggcaacagaaggctttaatgatgcccacaagcttggtgaaggaggttttggagaagtatttaaggtataattaaacaatgtgt

SEQ ID NO: 30501 - DNA, 2211 bp, Cannabis sativa
atgtgaaaagaaagagctcattgttattgtgactcatgacgatgagagtgaccgaggttgcgaggaggactcaaattctatgcaagaggaggatctcaacctagataatgcggaatcgatcggtactgcagaagtctctttgattcagtcacaggtgtgactgctcccaagaccatgaagattaaaggaatcgtcagtagccaagaggtaactgtgcttattgattcaggagcaacacatgattttatttccaagaacttagttaagcaacacaacctgcttttgacgaaaacaggggcttatggagtgactcttggttctggtaaatcatttaaaggtgaaggaatttgtcaaaaagtagtttggagttacaagggttgaccattgtagatgattttttaccttttgggttgggttgcattgatgtgatacttggaatacagtggctggcaactttagggaccacccatgttaaagggaatcaacaaacaatgaagtttcagattgggggtcaaccggtaacaatttaggggaatacttccttgggcaaaagtgtggtaactttgaagtcaaggaagcagcctaagataagtggtgggcacaaccaaatatgttcaacattgaaaatagtggagaagacagaacaaccagtttttttggaagagcttttggtgaaatttgaccccgtgtttcagtcgccaaaaaggttacccccaatacgtggtcatgagcatgcaataaacctcaaagaagggaccccagcagtgagtgttcggccttatcggtacccctaattccagaaaaccgagattgaaaagaagacagtagaaatgctacgtgtgggaatcatacaagatagccagagtcctttctctagtccggtcttgttggtaaaaacgaaatatgggacttggagattttgtgtcgactaccgggcactaaatcgggccaccattcttgacaaatttcctataccaatcatcgacgagctcttgggtgaactccacggtgcacaaatattctctaagctcgatcttaagtccggataccatcaaattcgggttagggaagaggatgtgccgaaaattgcttttagaacccatgaagggcactatgagtttaaggtaatgccgtttggtctcaccaatgctccagccacctttcaatccttgatgaatgctattttctgcccttatttgaggaaatttgtgctggtttttttcgacgacattttggtttatagcccgagtgacgaagaccacattggacatctcaccatagtactacaactacttcaacaacaccaactctttgcaaataggaaaaaatgtgagtttgggcagagccaaatggcttatttgggccacatcatctcgggtcaaggagtggcagctgaccaaagcaaggtggctgctatgacaaattggccggttcctcgaaatatcctcgagcttagaggatttttgggtctcaaagggtattatcgtaaatttgtggttgggtatgcgcaaatagcttggccattaaccgatcaattgaagaaagattgctttgggtggaatgaagaggcaagtaaagcattccgagaattaaaaacagccatgagtatagttccgtgttagcaattatgcgcaaatagcttggccattaaccgatcaattgattaaagattggtttgggtggaatgaaggggcaagtaaagcattccgagaattaaaaacagccatgagtacagttcctgtgttagcaatgcccgatttctctcaaccttttattatagagaccgatgcttcgggatatggccttatggcagtactcatgcaaggatctcgaccagtagcttatttcagccacactcttggtccacgaggtagacttaagtctatttataaaaaggagttgatggccattgtgtatgcagtaaataaatggagaccttacttacttggtcgacgtttcattgtgaggaatgactagcaaagccttaaattcctcttagagcagcgggtgataggtaatgagtaccagtgttggatagctaaactcatgacctatgaatttgacattgtctacaaatccagcactaggaacacgttgggtttatgataagcctaagacttatcttatgtatcacaaaggattaaatgaaatgcttagtctcttatgtacacaagctgagttgtcttagtgttttaattctattggtccaat

SEQ ID NO: 30502 - DNA, 2482 bp, Cannabis sativa
aaaaaagaaaaatgaaaaaaagaaaaaaaagaaaaaagattattatttttttatttttaaatatttattttattaatattaggtggtctaataaaatttcgccaagtgtacacttgtgtacacaacggcaggtctatttggtacttaacagggaaatattaacggaaggatcattgaccaaaacaattatcgagttgagggagtttagcccgaatttttcgagtaaaggagttaaaccataacaaatgtaaaaatttaagaagtttgggcgcaaattgcccttaatgccaaataacttcaaggcacacacccaaataatacaaacccaaattcacatacccctaatccatccccatttcaatccaccctaccctaccaaacaaagcataagtgcagagttttccccctttctttctcttgactctgaagaaatccaaacacaccaaaaaccaaccaaccacgcacggttcgttgtcatttcccctctctctcttctctctcttctctctctttcgttcggattgacatctacatttttcttgaataattaatatttaggaaacccaacacaaatttcatcttgtctaattgtatagattgttatatttcactctatgaatttgggatgtggaaataagtgaagtggtcccagttagtgttttctgtgatgcttacccttacttgcaatttttttgttcaggatcatattactatttactttggctccaactacgtactctacttttagagggagcgttcattttcaatctcgttatacttttagagggtttcttctaatatgcaacttattttcttctttctctttaggttcccttttccaatgtagtgtatatagaacgctccgaaaagattttcggatgaagattcaaaagattactaccacattactagtgtctctctgttatttattcgaggatttgttgtagactttgtcctaatacttcttcatgttgggttcagatacgctttccctatcaaatgcacggatgttatcctaaggagactgttcttgaagttcgggccgagtatgatccatctaagaagacaaagccaaaggtatttgttatgatccgaggtctttacaaatgcaccttctttcttgttcattctttcattctccttagaaaatacattgaaatttaactttattttattctttcaatgcacattagaatcctggtgaacttgaagactggcttgctgatctgaacccgcaatccaagacggttacacccaatgcatacgctgtttaattaatttgcatgatataattgcagttggccaaaactataattgaaggtgtttgatccaaagtttaaccatgtggtgtagggtattttgtggtcgataaggattcaactccggagaagcctgtctttaatccgacggtgacacttagagacagctacaataagagtggaaagttcttttttcttttctgtttgtataagatgttgtaagaaagcattcacaaattctacttgagtctcatatagatttgagtaatcaactactaattgtaatggtttgctaagtttttgagaagtttagtgagtccccatgtcctcactaaacttttggaaaagttcctgttgaatgaagtgtttggtctttagcaaaaaagaaaactactactggatagcatagacttgctaccactgtaattccaaattcgatagcataaaccttgcaaattcagaagggaagacttgcttttagggcaagtcccaaaagatgaaatatccctctggacgctctcggagcactggtacgagtatgtgttcgactgtgagtggacaataaagccaaattcgatagaatcgtgatccaaagtatggctccacataaggctccactacaagtactgcttgtgctaatggtcgggtggaatggggctgttggcgcacaaatatcctgggaatcgggaggaaatcggccatgttaattggcggcaccagatagtaggggtgtggcggtgggaaatggcggtacgacccagagtgggcaaatgtggtcaaatgctcaaaagttgagacgggcggcgtatccattttttagacctgtttttgtttgaaaaagagaaacacaatcaataaatatatccaaacaattaatgaaagaaactggactaaaaaaaaatttgcatgcaaagtttcgtgctaagattgattggggtattgtttataacacacaagacaaaaacacaacatctaacagaattgcatgagtgctggtagattgttagggacttatttttacttatttgtccttacaccgtgagcctctccttccctttcctcattatatgtatatatatatatactctgttcacctatatttctaattcaatcaatacatttgctattctctcaagattttctttctgcaacaacatcatacatttgctattctctcaagattttctttctgcaacaatatcatacattttctattctctcaa

SEQ ID NO: 30503 - DNA, 1452 bp, Cannabis sativa
ataaagaaaccaaacaccttgattgagctttccttaaggaatagcaagtccattccaatgctcattcatgtgaaccaaacaccaccctagttcttaggaggagcatgggccaggtattcttcacctggcaggtcagtgtcaaggcccccgaacaatttttgactacaaggttcttgaacctcgttggagtaagtgtagagggaagagacatccaagcagcctctagctcccctatttggggcaaaagctctaggattgtcagttcctccttagcatgatcagttcctacacatgatggcagctcatcttcattcagaggctccctagccccattataccccctaaggggttgtttgtgagaacgcacagtgtttgacagatctccgggctggtcgtgccctttcctcaggctcagcaggcctctcagccaactaaataggcctcttagcctgctcaataggcctcttagcctggttagcctatgcagcctgtccctttgccatcagttcaataatgagggtcagtagaaggggttgcacaataggtctgctttgtcttggccaggtttggatcctgactaatatactgtgcaactttaatggcaacctcagcctcaaatggtttcttcacaaaggacgatctacgtccctctggcaatgtgttagggacacctagccagataatatatgtccaagaaactggaagaaatttcctccaaccccggttcagttcccaaatgaaatgaccgcagttgtctcctctaattcattcagagtggtgggtggtgttgtattttgggttcaggggaaccactagttatttccaagtcagagtatttgctggaagagctagcaggagaattattagatgaagaaccacttgcctagacagattggcatctattcagtgctcacctccccagtagtcatgcgaattcatctgtgcaaaagggaaagggaggtgaacatccagacagcataaaaaccatacgggtagcatctaattatccagccagggtaaaaataccttgtataggctgaccagggttcctaacagatccaaaacaacctactctgcaaaaagaaaccatgaaactctggttcttcatgttcttcaagacccataatttaaaatgtgggaaacagagccaaaactcaacttttttcagttaacaaccctacatttacctatcctagcacccccgtgcaaccattaaggatgggtttccctaaacccacgacatggaggttttttttcacctccaacaatgttgtaaaattaaaaaaacaacataacttttaaagaaaaaaggaaaggttggagaaacttactcagtgggtgaagcttaatccgagcttgaatgctcaagacaatagctagattcccacttcatgaacgatggttgatagagaaacgcgaggaaaaacattttcttagagtttttcttgattt

SEQ ID NO: 30504 - DNA, 1966 bp, Cannabis sativa
gatgaagagccagataggtatgtttaaccacataggctcttatgaaaagcaaatggtcctgtaaagatagatcaaagttttggggtggctggtggctctgaataagataaagatgatggattatatatagaaatgatgttccatcatggtgtgttctttgtaagttgagttttgagtttacagttcacatcttcttacattgtcagtttgcagggaaattatgggtacagttatgaggtgatagtcctagacttcataaaaggccttgattagaaaggaacattatatggagatgttgtgtgtgggtattatatggacaatttggcttgagaggaattgtaagatgttttaagataaggagaatgagatggagtacataatggaatggattaagctttagatcgccgtatggttaaagattgtcaaagagtttgcctcgaaagatttttcctcatatggggtcgagtgtttgttataataattttctcatgtttgtagatttttatatctttttttttttttctggtatttagctatgtcctgggtttgctggtttttactttgtgtgagtgaaccagttaggtgtgttgcctaagctattcttcttttgtatgattcacttattatcaacagtttcgttttctctataattctcttaattaaagattgccacttttcagcattccaagttgatgttaatatttggaggttcctgttggccaaggttattaaacaagactaaaatgatatttgacattgtaggtattgtatgcagtggtacaaaatagcatcaaaacgtgttaactcaatttggtgggatgcagtccttgcaccattgagagatatcgagtcaagagcaaccggtggtatggtcctttcggaaaatgaccatgtagattcctcattcaatcctaatgattcaatgagagtttcagaaaatctgaaagatgaaaacttacctaacaatcctgtcttgcttgggaagtctggccttgaagtcttaaaagattttggtgagaggactggtgtgaaatcttctttgagaaattctttgatagctacaagaagctctcttgaggatatggaattggaaacaagagctttgactgagccacttcctacaaatcaacaggtttctaggaacttaggatggttttgattgcctcaataattaagtctagtagttgcaaattttcaatcatattagatttatttactttttcttcttttgtaggcatacaaaaatcaccatctatatgccattgaaaaatggcttaacaagtatcaggtacttcatccaaagggtcccattctcggttattgttctggtcatccagtctatcctcgagcatgtgttcaaactctcaaaacaaaagaaagatggctgcgagaggcattgcaagtcaaagtcaatgagctccctgtaaaggtgttgtggatgattcaaattcggattgttatgtgctgagttaaagtgaaccagatttgtgagctttttatcattgttacatttccaggaatcgaaatattctaggaagcttcaaaaagtaaaatcttttgaagacgatgattgtgccaggaataactctgaaggaacactcgaactgtatgggaaatggcaactggaaccattacagctgccacatgctgttaatggattagtaccaaaggtgcttttcttcaccctttgtttgtttatattaaaattctagatggtgttggtttaacaatcaattatgagttctcatgttttcacccccaatcttctgcgctctttaacagttcctcgctcaattcttttatagtccatgctgttaaactatactaatgttagcattagaatattctattacacctgtgaccaccttggagtatctgcaattatcacatgccctagcttgataatgcacactaccactttataagtctccttctttcttttacttttattgagactgaatttgct

SEQ ID NO: 30505 - DNA, 6669 bp, Cannabis sativa
tcaaattttttgattttctaagcatagaaaatcaaatttcccttttattataccacattacttagaagattgtcgggagggtgcttcctccctatatatacttaagcctatggttgacacattttttataagctctagatcttttccatgtttattattataacaaatatccaactacctcagaatctttaaattaagcaactgctatcaagtgtaaataagtttatcaagtgtatctaaatatgaaaataaatttaattattaaaatgtagtgaattttgatagcagtactctttcaagcggattggtctggagcagtagtttgtagtactactttctttgaatagatagtattggccgatcaatttaatgataccatatggcttaggaagatactcaagagggtgcttcctccatatatacttatggttgacacaacttttgttttttttaatgtttatcaataaaagttctttttaatgtttatcaataatattttttgaaaaagcacatctcctctaaagactaaagtcctaaactagccaaccaaaatgaaactgcaacataaaatatgaaaatctgacctcagaatctctagatccaagtaaacttctatcattaatatttgaagatccaatcaaagcagcacgatcatctacaattatcaatttgctgtgaacataaacctgcattcataacaagttaattaagtgctcacaaaaccagaaataacactctatactttaagcttttaaatatgtttgaattgaaagtgtttaagtgaaaaaataagctaaagtttgatacatacctgacttgtagccaaagggccaccttcgaaaagtctaccgtgcgatcttaaaccatagaaagagatgtaatcatttgctttagatccaagcaaagcagtaagattatccattattgatgttttttcccagctgatggttctatactgccaatgcattaaagctctaacagttgctgcatcaccatcatccaatcccccctgttacaaattatatcatcacaaaaatcaattttagatgatctcaattctcatatgtttgttcataatgatgataatgtatgtgcctacctgaaagccaggtaagagtggtatcactacaataactcgaaagcacttttgttctttgtgtgctcttagaattcgtctgtaaattgcttctaggacccggttttgtataatatcatcctctgagagacctgaaatgaagaactgattctgcaaaccaaaaacatatattgttgggattagactcacttaacttgtcaagtcagtatgtccatctatttgttcatcagatgaatatgaagaaagttgttgctagttataacagttggctttaatactaacttaaaggagacccacctctattcacattaagagttctgagttctaatctccaaaagctcatactttagattcagtttaaagagagagtccaagatcacggtgagtgtgtgtggagggatgtaatgggagtatcactcttgaggtgatttccctcaatgtgaggtatttctttgtaatactttattgtgttgagttgtaatcttggattcattctattgtgtactactaactattcctattcaatacagattcatcattcatttattatcaagctaagttttatttgtctatatttcaattaagttcaagttttgattttatgatggattttagttttaaattgtgtttttttggacattgttactgctgtaatacaacatagaaagaaagaaagagagatcagaaagtggttttatagttaattacctcaatgtaaacaaagtgctctgctctctcaataagagaacaataagccttatgaatgctttcttctgtttgacttgttccagctgaccactggcttacacttctaataacctataacaatttcgtaacgtgcttaagcactacaagagaggtggcgtcttatgaatggttttatagaaatattccttacttgacaacgacatgtcgttcggggaccaacttgtccagagtcatcattagcagaagaaggcctttgattggtttcctgatctggattttgccaccactcctttgaattatctaaagacatttcactatggagattgctgtcattatgagaatccagtaaaccatcactttcttgaggcaaaagcaatgggatatcttgcaatgctgagagtgaggaaaatgagttatgttgggcgaaatcgtttctcttatcttctgctgtcttgttctcaatatcaatttctctgcttattcccatgtaatgagggatcaccatgtggtggtgaggcataagtagtggaatggtttgttcatttggggccttgtttctctaataagagtaagagttaggaacatgaaacaaacaaaagagattgcaaacatcatcaccaaccttggcatggttccaacgctgaacaaaatgcctagctatgtcacgacatggaggtccccataccgcgcaatggacatcatgccatggcatacgagggtattttccgcgatccaattcatctttcattgtgtcttcccaagaatttggttcagattctctatcacataccaataaaaaaaatggtttgagtacaacaataacactttcataacagacacattagttagaattcactctcaaaagactaatcgaaggtaggagagggtgcccaagtacttataaaccattgatcaatctcatacttagtcgatgtgggatcctaacataaatacctggggttgtagtagtccttgcctggccatataatagagggagaatcacccactttgtgttctgttgtgtcataacgaccaaagcataagtctaatcctccaatgaagcaaatttgataatcaacaatgacaagtttttcatggtgagacctgtaaagagtagtagtagaaaaacaaggtacatcaaaacgatttgctttgttatttttgtatagaaaagcaatgattgtctttactaaatgcttaccacaaatatacaccagtagataaatggtctggataacgcaaaactttgacattctcatgaatgttgagaagctttctttgactgtatgaactattgattttcaaagcaatagaaacctctttgtatagaagaatgtatatctgaacaccttgcttggctttcaattctagcaatgcatctagacgagacgagaagttcgaatcaaaagggcgtctcagatacaattctgggcaaacccaccagccagtaatgaaaatctacatgaaaaagcaatattcaagcatttcataacactttattattacttattagggtaaatataagtagctaaagttttatgtttgtaagcggcataaacttaatgtttatttttagcagcataagtacctaatgtgtgtaaaattgtaattttcttccgatttcgtcagtacagactctgttttgaatttattaactgatgctacatatttctatctagatccaatgatcaagaatttagaccttatatgtgccctgtttaagaaaataactgtactcacaaaattagaaaaaaatttatgccgttaaaaataaatattaagtttatgccgcttaccctatttattattaatgtgttataaaaagagagagcaagctacctctgattttgcatcttctattgctgaagcaatagcttcaaaggctgcctttccatctacaaaccactgggcttgactcccatcttcaatcaaacccctctgcggagcataggactcgaatcggtgagcatgacaccaaccttctggaggctttaaaccagcatcattgattgcagacacccattgtctaactttagcattgcttgtggttcttatccttatgctttgatttccattgctaacctttggaaagttttttcaaaattggaatgaataataagattttatgacattgtcatttagagcagagaaattaagaaaaaagatttaccttgaatgtgtaacgtagaggatttctttcctttatttgatctgctaaattgattggtgatcctccatttacttttgaatgtggaagtacattgaaaattattatgtctaagagtttaatgtcaaaaggatcatccaataaggctatgaaaccaggttttaaaacagcccaaacctgtaatattacaatatgctcaagtaaaacaacatagacaactgatatagaagcttaattactgatttagttgattggggttgaatttggcaaaaaaaaaaaaattgggaaaatataggaaaataaaaaaaattattatatttggtacgaaaagaaaaattgtgtcgaaaaacactcaattatacaattttttccattaaatttgaaaaattgatttatctttttgttctctcaacttttcttttcctaaattttccataccaaacaccccattaagagtgaactaagaaaagagttggtgtttagtaaaacaaccaaatccaatgtagccttaattagttgacaagagttatttcagagatacttaaaaattaaatctttacattaaaaagaaaaacggttagtgccaaaccttgtgccaattgtgttgacagcaaaagacccaagagaaaagacagcaatttgtatcagaattccttcttgggatatttgatagatgctttaccattacgtagccttctttcaactttggaccatactcatgtagaaatgacaacctagagacctccaagaatttgcacacctaaaaacccaaactcccttgttatgtttttttactttgaatacttaaaaaagacacatcattatttggtaacataaacataaaaactcattgcctcacctcttgagaatttacaatatccaagtttcccaaaaaatggttcaaatagccctgcattgcttcctttgctctgtccgaaatcgattgttgtcctccgattgccggacgaataattggcaaaacagctctggaaggcacatttctgcataaccaaccaacaaaaaacatgacattttatataaattaagaagaaaaagagaagaaacacatgttatatgagtttgtttgaacctgtttttaacagtgtcttcgttattatgtaaaggaacagccccatcatcaggttcatcatcatcttgtactactgctgttgtttgatcaactattccaattgtatgaagccattctttaacctttttataatgaaaatattcatgataattaattatgtttcaaacaaattaatgtcaaaacataatgattattattattgattattataaggacataatatatgataagaggcaaacctgttcttgcttctcgtaaatctcctcaataaatgcacgtttcttcaaagcaaaatgtaaatatagaacttgggaagctttctttactaaacgccacttgaactgtgaacaaaggtataaaagccaaacatagaaacttgtcacaaatataattatgataaatttccttattgtaacatgaacatattaatttgcaaaataaccacattattgaaaatgctaaaaggcacaacactaaatacaagtgtcaaattgatatggtgtaattaagtatatgatgtaatttaataataattataaaaaaaatcattaactatactaatactttatattgtaaaaacgattagccattttatgtgctcattgtgtaattttttatgattattttgctaataaaaatttacaacaaaagatcattttgaggtgacacaatataatttcagaatggttccggagaccaacttgttattttactaaataatttctttttattacaatattaatacaaaatatatgtatatatatacatattgttattgataaaataaaagtcaaattataagcttgcctgtttgtactgaaactcaatggtataagagagaagcatgggactgatatcgccggtgtcgggacgtgacacctctaaaattgttgccataggaagatcatcgaaaatcctcgccgccggttctccccattgccggaaagagtgagacgccgccgccggcatcccacctagaagcttctccgacgacatgatcttctatatttaatacttcaagctttaattttactcaaaacccaattgtcttaacatatcagtgtgatattgaatataacaaaatttcatggtacgtcgtggtttatatatataaatataaatttaaatataagtatgaaatatctttttcatgtttccctttatttttcaagaatagaaggagattgtgactctgctaacctacggtaaggttactgttcttaatgctgataaataggatgcttccacgtggcataataatgagtttttttggcttcatctgacaggtggctgtacccgaacacgattgcatggagttcccgaatgagtgcgtaacatgcaattagtagttgtgttttgccaaaactaattaattgattaattacacaattggatagtgaattgtctaaactgccctccaattattatattatatcttttattatagcataataacaataccaaacactataatcttttggaatttagacagagaaagagaagaatatttaaatagaaataattacataagacactattttttgtaaaataattatatttttatgttcaaagaatgtttttttacatttttacggttttccaaaaaat

SEQ ID NO: 30506 - DNA, 2555 bp, Cannabis sativa
  modified_base (498)..(501): a, c, t, g, unknown or other
  modified_base (1960)..(1960): a, c, t, g, unknown or other
aataatatccaacaggtacatggtgtatgtggtacaacacttaacaatactcggggtacggttcataccctacctacactagtacgatggtggtactacgtgcatgtggtattgtggtacatggtcgtatcttagttaagaatattcttactcatttgttgagccttgtaaataggtgtatgggcacctagatacaagtcggtattatgtgatatgttatatacttttcttactgagtctatctactcacagttctactttcatgtgtaggtaaaggaaaggcgaaggtttaataggagtaagcttgagctaggatgggatagtacatgtcatggcggcgcgacctggagtgtttggcctcgggacatctgtggtttccattttgtagtgaatgtgcgacctgacatttgtattttttatagtttataaaagtttaacaacgggatcccgacccttgttaatattatgttaatgtttataaagtttcatagttagtannnnaagttttaatttgacacgattttgaagaaaattctttgattagcaaagatagcactacaattgaaaaatcactgtagcttgcgttagcattagggcgttacaattttggaatcagagccgctgggtttgtctaccgaagctcgccacgacatgtacaatcatcatcagagaaagctcagctcacggttcagtaagcccgtacttgtttagtattaaatgtgagtattaaagcatgttaggaagcatattagtttatattcatttatttttgttagaatattagttgtatattagttgaaaaattatggtaacttgtatttaatagtgtcctattttgtaattagtagtttcccatttagtctcctagctttgtacataaatatatactattttattgaatacaacatataattctattcaccattctctacatggtatcagagcattaaagttagaattataattcgaaatcaaaattaggattcataagaaaaaaaagggagattaggatttgagtttcgggttattttttggaaaccctatttggtgtgaaatttttttctcgtcgcccatatagaaggactgcccatccccgcactacaaaaccccaaattttggcgtccaaattcaccgcgcatgggccccacacgccgtcgtttgtcactacctagaatcccatgcggcgctgcatgaggccacgtctggcatcgtctccgatgactcttgacgctcgtcacactcttgccccttccctgtcctccttgcattggtctccggtggttcttggcattttgggattcgatacttttgccttcttcgtgtttgggtatctattcttttgtgtgtgatctcttccttttctgtttcaattattttttgcttttgagattatggtagagataaaacaaaattcgaaatcagtcgttgtttctgatgtggttcccgtgatgtctaaaatcacggaccataaattaattagttcaaattatttggaatggagtaagacgattcgactgtatctgaggagtattgacaaagatgatcacttgactgatgatcctcctaaagaaaaagacgattcaaggaaaatatggctttgtgaggatgctggcttgttccttcaaattcgaatttctatcgacaatgaggtaattagtttgattaatcattgtgaatttgttaaagaactaatggattacttggagtttttgtattctggcaaagacaacatatctcgcatatatgatgtttacaaagcgttttattgtgtggagaaacaagataagtctcttatgagttactttgttgcatttaaaaaaacatatgaagagcttaatgtgttattgtgatttagtcctgatgtgaaagttcaacagcgccaacgagagcagatgactattatgagttttcttgtaggactcccatatgaatttgactctgcaaagtcacaagttctctnaggttctgatgtctcctctttacaggatgtgtttactcgtgttctttgcacaaaaactacctcttcaactcctcttaatagcgccttggtgagtcgcaacaattctgctccatgaaaaaactctactccaagtgcatacaaaggaggtaattcacaaagacctgataatcgaacaccaaattctgagagcatcatgtgcaacttttgtaagaaaccaggtcacaccaagtttgagtgtacgaagttacagttcaaaaatcgacaacaacactatgccaatactgcaagcactagtgatgcatttgacaaatctgtccttatttctactgattaattcaccaagttctcaaggtatcaggaaacacttaagtcttcatctccttctgtcactgtgattaccgattcaggtaactctaatgcatgccttctttccaaatcctcaaaatgggtcattgattctggtgccacagatcatatgacaagtaattccagcctcttttcaactttttagtctcatagtcccacttccattgttaccttagctgatggatcaccatcttctgttcttggatctggcactgttattcctacacct

SEQ ID NO: 30507 - DNA, 2022 bp, Cannabis sativa
  modified_base (1747)..(1757): a, c, t, g, unknown or other
gaaatacatgacctataccgtaggtatcttaggagttaggaggatataatcttttaccccttcttgattgatgtgattcctcataaagtagtcgtcactagccttattgattatagtgtaatagttgaaaaaggggagttacgccatctgtcatgtcgtttatggaaatttcaatacgtcttcccccatgcggcattaaatgcgaagggacttttcaagagatctcagttcttcccggaactgccttatcatacctctggcctcccggagggaaaaaaatacttcttatgctctcctccgggagacaccaacctgagatactcctctttcgcctaggacttagtcgatttcttctaagtgttaattcttacagacccacgtgtcagttttatccaggtccacgtatttcgagaaaagataagggtaacatttaccctccaagcctcatttagtgaaggatgaacaacacttgtttgatgcctccggttggcttattggtttattggcacgtgcttcaagcgtgtgggccgcatttatgatggccatcattaatattgatttccttttgtaggcaacgattcacttcccgtccattgagaaaccggtgcatttaatccgagtgtcagtaaagtactaaaacgttttcaaccgccctggcgtccatttatctccaccgttgaattcgtagaatgcgaatcgattacaattcccaccgtacgatggtgcctgatcacagctgtcttgcaccttttctggtctataaaagccagccttttttcttcactgggccattttcaccacttcaccgtttcgccccaagaacatcttcgagaaaaattccagaaaccatagagtttttactgccattcctttgtcgttgccaatctgcattctaccatcgatcactaccagcccccagttcacaacctttgtgtaagttttctgtgtactttatacttttgttgttcacttgcatgctagggtaatttttttttttttggttaagtgcttgatttctgggaaatgactttggcgaagactgccgtgtggtgtatataccctcttttatttgtgctctgcaactttccttttcttttaattcgcaatcaacctttctgctgagagattgctcaaaatatgagacagctttcacgcccacgttctgtttcttttatttttcttctttcgctgcttttaagatatttgcacctgatgtttgcctaggggaatccctggaatttccatttttggcaaacatctggagggggcctctttctaacggttaggggacccccattccctcttttcacgttagggtttggttcgggggctaactgctggattttccttttttcagaatcttattgctcttcgagaaatgtctgtctctacatccggagctaaatcctccagccaaggagcggttaccctggccaccttggaagaagtgatgaagggacccgttgtccaggagaagtacacgtgtcgctccaacgtttgggaggcggatgagcttcactcaactttgacctgtgcccatcagttggagaagattgtgactgtgtctgggattaagccttccgcctctggggtcttccaccgcttgcccaaagatgaggagacgcccaaccataactatggtggttttggagcttggagtcagacccaccttatgtccggagccatgcttccacttcaggactattttataatttttctagtttttgttggccttgcgccttatcannnnnnnnnnnaagcataccgcttgctttcaggctggtacattttttatgtagccagaggttggacttcacctagccccgccgagattttatacttctacgaacttgtgtctgtccccaagaaggggataggcttaaagacggttttttcacactccgggcccatcctgctaatgagggtccgattccttttaattttcaaaagaatgtaaaagagtatcgtcaccagtttttcttttcttgcggcttccaagccgtggaacgcccagaattgctc

SEQ ID NO: 30508 - DNA, 2040 bp, Cannabis sativa
gaaatactagttcaccagccaatcaagggattcccagcactggagttccgccagcaacaaatgtgcgaacaacagttggagacgacaccgagatccagaacctccgtgacactcttggactcatgcaaggccataccaatactctgcatcatgatcaggaagagatccgtggggtagtgaacctcgcatttgaagaacaaaggcgtctgttccttgaatggagggataaagaggtggaaacattgagggctcactcagcaagcagccatcgacaaccaaacaagacaggccactgtactgatacgtagggcctaccaagctactaatcagcaacctgcaaccagcatcccgttgggagaattcgacaaagatccagctcggaacacttctcaaactctgaacggtcagccgcccaatccctggtcacatgttccccttgtgggccaagttgtaggcggccagaccttatctagtaatttttcaagagaggttatacctaataactcaacctaggttaatggttctggccaggtggtggaccaaaccaaccagtcactgagacaacctggtgtatctatacttaatagactgggaacatctcatgatctcagggatgatctaaatagaaggagagggatagatgagcattatgtctcaccaaccattcagctcggagcccatgctcaaaatccaactcaaagggatcctgatgtgactctggtcagccaagagaccgaacaagttaatccacccgtgcaggcacagttggatgaactaaagaacatgttccaaggtctggctgggcagaagaacaattatctcgaattggagcgagcacgtggatcccctttttctgtagagatcaatattctagaattgccccacaagttcaaaatgccgacctagaagatgtatattgggaaggaagatcccttatcacatcataaatattatgaaatgaaaatggacttgcaaggagtacgaggagatgtatgttgcagagtttttcctgccacactctcagaagccacccagtaatggtatttcaagttaacacctggaaggttcaactcttggaaggctttctcctaggaaatccatgtgctattctcttcttctcgccaactcccattgcatttagaagacctgatcgaaatgaagcaaaggcaaggagaacctctccaagcttacatcagcagattcatgacggaggcaacgaaagttgcacggttaaccgaagaagggaaattaaccgcgatactggggggcattgaagttctcggagaactttggaaagacatcaagagagacggaccactagattctatgagtgatttcctcgatcgcacaaatggtttcatcaagcttgaggaggccattcagtgagcaaaagtcgagcttaagcctggccagccacaagctccctctattggaacatccgttcagctccctcagtatccaagcaatacaagctctggcagtaaacggtctaacaacaacaacatgtaaggaaatgggaaaaagggaaagttcactggcaaaatcgaacaggcccctagagaaaattcttctaagttcactgctttctctgtcttgactgaagatttggagactatctacatggtcactcagttactagctccgtacaagaaacctgttcctatgaaaaaggaggtaagtaagagagacatgtccaagttttgccgttttcatggagattatggccacgatacaattgaatgcaacaatttgaagtgggaaattgaatttctaattagaaagaataacccgcacgtgcaaaaatatgtcaagactgatcaaaatcagagggctacccaggcagacaataatcaagatttactgccaccaccagtagaagggcatttacaagtaattattggaggcccgcacatagctagagattcaggcaaagcccgcaaaaggtatgttcgaacaatgtagcacgagcaagaagaggtaatcctggtccttgaagaaaggaagccaaaaattgttggaaatttattttacaaggatctt

SEQ ID NO: 30509 - DNA, 1466 bp, Cannabis sativa
aaaacaaataatatataaaataattctctaaaaaaaaatatatatatttttaagtgtaaaaataaaaaaatttgaatagtatattaagagtgaaacgggccctttactagtagtagtagtgaatctaaaatgagttcaagctttttataaatatgaactagaattccatatgatatatgtgattacatatttggataattttaagaagttgttaatttaattattagtgtctgtgattaaatagaaacagtacgaatgtcggtgacgttagaatgagtgagtctgacaggtcccttaaaaagagaagtttcgtggaaccacgttcggtggccacactatataactaccttccacacccaacccctcacctcaacttctctctctctttctctataaataaaatatgacccaattttctcacatcaaaatctaaccatttaagaccaaataaaagaaaccctttcacttggacaaaatctcatcaatcacagtagtctttacaaatacatatatatatataatgggttggtctgaatcggagcgaggatgcaagaggcatccaacgacgaagctgacgccaggggtttgttcggattgtctaagagagagactctctcaactctcagattccttcaatagaagaacgacatcgtttggccccgcctcggccgctggatattctttcttctcttcttcttctactgctttttcgtctcactattcatcccgcggcgcgtcaccggcgcgtgggggaaaacaccaccggaatgcgtcggagatgatggggtcgattgctttatttttcagcgtcggcggcggcggtggtggactgaagaagagtaggtcgattgcgtttattccgaagaggagcagtgcaggtggtttggatgatcatcatggttttcatgctgagggtaaaaatggaaaaaagaaaagtgggttttggtctaaattgcttggaaatacggggaagaagaacaaggaggctaggaattttagagaaagttttagattttaatataaaatataatatatttttttatactttctttatttcaattttcatgttgtaattaaagttaattacttactgtatattttctgaaccagaagaaaaaaattaagtgaattttgaacggagatttgatgttagtttcttttctggtttggtttatggaaatttagagctcaagtagacggcaaaataagaatattataaattatgacgtcaaatttacttttttttttaatttaaaattttaataaaaaaggcaatacatatagaaagttaatatgagaatttagaggtcatgtataagttgttgaaatttcaacaataaatttaacctaattggtaggaaaaattaggctcatccatgcagttgacttggaaaatggaaaaggaaagagtcgtgtgacccttcgacacgtaacaaatttatttcattctttctaatgaaaacaaa

SEQ ID NO: 30510 - DNA, 7925 bp, Cannabis sativa
tgattgggggctctcgtgtctgtgaacttttgcatattttggacttctcaaaaatatcacaaatattaagcaaatttttacgtctacaataattatattagtttatgttgaatatgatgatattaatttgcacaaataaaaatatataatgcaatatgatatacttttatcggttctcacataaggataatattatgataaaggctccctaaaatttatgacatttttaagaaaaaatgatctcgagatgtaattaaagaaagaaaaaaaattagtttggtaactattcagatttttattaatgaggccaaattcttcttaaaaaaataaaactaaaaattagtttcgcttatccgctgttgcaatatattaccttgaggttgtactctttttcgtttagagttctttattattatttatgtattatagtttcatttttaaaattgactattgagagaggatgtatgttgtagtaattatattatatatatatatatataacatcatttatataactttattttaaaaatagttcaagaacttttaaatcacttatcagagcatccgagaacaaaattcatccataggaaccatagtaggacactttatattatcatcaagttgtgtacaatgcatgcatgacatcgatcatacacgagttatgatacgaatatatatatagaaaaataatgataatgacgacaatggcgttggaggactttcccctccccttcttaaatcagagagtccacaattacaatcatatatgatgtatgtcgcatcttattatcttatcaatgaccacacaactgtgtggtatttaagtttgtttataaataagacatgtatattatgtatgtagaaaaatgctacctttgttattcttaatttgactattatatactctgactcgcatattcgcatattctatacgtgttatatcactcatagtattattattattacaatacattattgaattgcttcatctgatgatctcatttcattattaattttacaattaccgtacggtcccttaattaaaaaaaagataatatgaatcaattgagcacctttgccctcgtcgtctctcctcttattatattattttatctttaattattttgtctcttttaagatccaactgaaaaataaaaaggttctgaaagtagactgaatctcctaatttcaagcttggctagagttgtaccttctaggccacgtaagtgcctatctccaaaacgtactacccaacaaagcaccgaaccacactaatgcttctaacaaagaaaaagacagaaacgcccttttcatattaatacattataatgttcctttacagacatgatttcaagtcattaatatatagatatttctgcctctttcttttccgaaatttcgaaacttcaaatcttagcaacaactcagatcagataataataaagacattttcggggaaaaagaaaaagtagcccaaaaatgtcggtttcgttaacggaaaacaataacgacaacaacaaagtaagtaatattggtccccgtgatgatgagtactacggctactttcacagaagcagtagtagcataagcgaaatagaggaagaagacgaaggatcagggggaggaggaggaggaattattagccaaaacgacgacgttacgagggatattaaggagctattcgagatcaagaagtttgcgccgatgccggccatcggagaagaacaatcatcgagcggtgccggcggcgagaattgcatttacgtggcggttgggaaaagcacgtcgagcatggacgccttgaattggactttgagacaggttatggatctgtcaccggcgatcatcgtttatctcattcatatttatcctgagatccgccaaatccctactccatgtaagtgcgatcgatcttcttttttttgctggtgcatgagtcaacgatcataataataataatattcaaaccgactttttttttgacaattttatgtatagtgcaaggtacttgattatatatgttgcttggcttattattaaataaaccagttaataataaagtagtgtgtataaattaattacatggtctaaatgatgccgttgatgtcaatgcctagggttaatttgtcctactcattcatgatattatgtaaacttttgtttgcactgaaaattttagagatgtatatatatactcattagcattgaatcaattatatatattagttaatctatgctgttgtgttggtaattattttgaaatataatttgacagtaggaaagcttccgttaagtcaagtgagtccagagcaggtggagaattacatggcacaggaaagaggcaagagaagagagcttctaaataccttcctccgtaaatgttcgtctgccaatgtaataaaaagaaactatttatcaattataaaattgaattactctgttgactaatataaactatagaataatatatcaatttattaatattttttttatgacgaaacagattaaggtggataccgtgttgattgagagtgatgcgctggcgaaggcaatcatagatcttgttgcaattctaaacataaggaaactcgtcattggaatcgccaaacccaacttaaggtaatacataattttttgtttacataaataacaattacgaatattatgataattgcataagtaattatttaaattaaatacaatgatattaggaaattaaggtcgggaagaggaacaggattggctgatcaactactaaaaagtgcaccggaaagttgcgaggttaatatcatttgcgaaggaaaccgagtagagaacatggaccaacccatcatgagtgaaccgccatcgccagctccacgtgtcagtgttgataaatccaatgattctgagcataactccacaaagtccttgcaagaagaagataaacccgaaaaggaagcgcccgtctcctgcatgtgttttagatctaaaagtttaaccaaaaggtaagactaaatttatcacgaagcggggatagctcagttgggagagcgtcagactgaagatctgaaggtcgcgtgttcgatccacgctcaccgcatgcttttgtatatttttaaaaccatttttttttgggaatcttacatttttttacataatataaattataaatatcctaaagaaagaaaacaaaaatatagcacagccctgagatattttttggtgtattttttatgaaattttttctcccaagaaatgtgattattaatttattttgtataggtgatggtttttttatttattttttcttttaagttgatgtacaacaaaaatttgaattcatgaatcaggagtagtcaataaaatgtgtagcttttcttaaagaataagctgagcgaaacattgggcgattacaggtacagttgatagcagcctttgtattctcgtgacaaaggacaaacaaaaagtaaagggtaaaaaaacaagtttggggcaccattttcatgccttgaaggtgaaagagaatccatacaatatgcaatacaaatttgaaaattgtcaaagtatgcaacaacaataacaaacataagattgattcctcagcatatctatcaagaaaatgaaacccactaaaccttcacctcactaattaaggatccctgaaatgtccagagacataaagcattttgtcttgtttaacatccctaaaagaaatcaaactctagataattgtttgaccctttttgttctggagctcctataatggtgggagctttttcacttgttgatgctggtggtggggtaggtatacgctcaagctcaaccggctttgggatctccggtggggtcgcgcagcgtatcaaagcccaatttacaccttcaaagaaggggtgttgcctaatttctgttgctcctcgtttgtatgccagtctgttctgtggttccttaacaagtagacccctaataagatctctagcagcaaaactcacaacaggtgattctggaaatcttagaggctgtcccacaacattgaacaatgttgctcgattccccgatcctttaaatggagttttaccaaacaagagttcatacaaaaagataccaaacgtccaccagtcaactgcacttccatggccttcgcccttaatgatttccggtgctaaatactcgtgggtcccaacaaatgacatagaacgagcatctgttggctctgcaatgagctctggtaaagggcttacttgatttccaacctcgtttttaggttttctgtcttttttggacttgctagaaaatagccggggagaaaagcaagtcgtgggagctacacatgatggctggatgcatgaaggaggctcaatgcatgttggctgcacacagtacacattctttcgcatggggtctgactccattatagtgcctttcacgagagttggactaacagtgcatcgcagggaaaggtcaaagtcagagagcattatatgcccatcttccctcaccagtacattttctggcttaaggtcacggtagacaatcccaagcatgtgcagatattcaagagctagcagcacttcagctacataaaatctgcagttgacaatagcaaaaaaagattgacacaattactctttgcactcaaatatgacctgttatggtgtaatccttctttatgaagaagctacaagatactattcacgttccctagttactgggtaactcaaatcttactacatttatttagtttaagtctctgcaatctgtcctggagtacataccaaaatgactcattaaatgttcctagcaacaagacattttccgataatattaagtagttggttacaataaaatcaccatcttacaagaatcagattgaataagcacgaagataaatagaggtaggtttggcactttatgacaacaggtatgcatgactgcaccaaatttggaagaatgcagacagtaaatggggagttctgagaaattttgttttttataatcagattttggtgggatattgatgcttatataaacaggagaatctgacgaaccacctaccagacataaagtgtaatgcatgtgaaatactagcaataatataaaagttaaattaaacaaccaatttccacaacactaaaatgtattgaatcacaaatgattcctgaaaaaacagtgagtgagatatctacttttttgtttcactatcacttaatcatggataatgcaaaagatgaccaagaacacacagaacgtaagataacaaagttaattgagcatactttactgcttgctcagggaaatatttccctggctgcctctgccgaagcgtgtgcaagtctcctccagggcagaactccatcaccaagcaagagaacttctcagtctcaaagtgagtgtataacgatggaagaaaggggtgatccaaagattgaagtatttctctttcagtctgagcacgcagaagcttcttacgacttgctagagaacctttgtccataactttcattgcaaaataacacttagttccacttaattctgacagataaacacttccaatatccccacaacccaacctctttagcagtctaaaatgtgtcaaaccgagcatcccctctttttctcggacagcttggatagcttcccacttgaagtcattcgctttgtgaggtttgtttacactgctactaaagctgctacaactgctctcatcactaacatcactgcttgtactccctctacacatactactctttccactctcaacaaaatcaatccgatcactgatctttgcacttccactagtcttgccaagactgctggccccatcactaacttttccggacacagaactgttcttcacacttccatactcagatatcttcttttcttgatctaccgaactctctatagagccacgagtatcagtagcagacgaatctggttctactgaagtttgttctgacaatgaacttgcatttaatttattaatcaaggaatccaaagagccattttgattcgaattcggaaactttttcttttcaaaagcttctactacaccctttgatgtgttttgtaaatatttgggaccctcttcttcaggagtagtggcaagcgtgggtttgcttgtccctaaaactggtggtctaatatcattactctgtatagtttgaacaccagatgttttctgatgctgattcgaagagcctctaaaaccagtttttgaagccattagtgataccaatggtttctaatgtcaatcagacttgaaatcatttgacatcaatcattatcaacaataacttatcctccctcagcaaccttaaatatccctcctcaactctgccaacagcaatgctttatctatcagaatcagaaacatttttaatgagttacacaacattatttgcaaacaatttcatgaatcttcataccaaatccatactggcaaatctaaatcataaatagaaaacaataacagagaaaaaggcccaaaaatcaataaatagaaatcctagcaaaaatgaaaagaaaaaaaaaattccatttgaccccataatggatcgcacagtatgattaaagatcagcactaacagaagaaagaaaaatgagaaatacataacactccgatttcccaataaggcgatagattggttagaagttttcgtacgaacaaggccaaaagcaaatttcaagagcaaacaagaacattacaaaaaaaaaacaattgatcagtaaattaaattactttcttccaaaatattttaattcaacccgtgaactgctgcatgcaagccctgatcagaagatatgaaatatatatacatgtttacatatcggttaaatacgaagcagctatatatgcaaatcccaaacccaaaaactaaggagaaaaaaaaaacagagagacagagagagaaagagtgaacaaatggaaaactgaaagatccagagggcaagcaaaaataataaacaagcaaacgaaggggaaaaagagcagtttttagaaagtttttttttttttccaagcatatctaaaatgggcgaaagtgctagaaccatcaactaccttactaaacatgatcaaaaccagatctaaaatcacataaacacaaatttgaaggaaaacccagtacagatccaaatacagagaaaacccagatgaaaactaagaggactcatcaggggaagaacgccataccagaccctaaaattaaaaggggaaaactgaaaagaagaaaatagtatacctattaatttgaaagacgataaacctgagagttgaggtgctttgcttttgcagtgataaaggagaagcactgtagaaaagagagctcttgtagttgtagcataagaataacaatagcaataataataaaagaaaaaaaaaaagcaagcctagtttagtgagtgtgagaaactaaataaagaatagaacaaacagaaaacttgagaaagcaatacaaaatgaaaccggccctccgcttctggtggactattaggcagagaaagaaagagacagagaggggtcaaagccaaagtaaagtttttttcttttctttttcaataaattataataataatatttatttattttttttggtgacaaataatatttattttcttgatgcaattatttcattggttttttttggtccggaaactgaaggcttcctaatcaccaaagagaagagactctctcatatcaaagaagtgatgcacttcacacttgtctcccatgcctttttctcttaactgcacttatactctttggaccaaaaattggactcttctcatcttataattattttattattttattttttaattagtgaaagaatgaactgttattagtttataattggactcttctcatgttattagtttattaaaagaaaaaaaaatgcacatacttttttctaatttgattaagaaaaaaaaatagtaaaatt

SEQ ID NO: 30511 - DNA, 1257 bp, Cannabis sativa
ctaaaatgatgttaggatttaaggtttttaattaattccttttctttctctctaatcttattagtaataaatatgataaatttgttaaaaaataaataaataaataaatatgataaatcatttgatagttatgttaattttttcaacaaataattatgttgattttgattacacaacacataataaaaaatgtagttctaattatttacatccttgatatcattaggctatattttctctatgttttttttaataaaaaataattataagataatctatatatatatataatataatgatttcttttattgaaaaaaaaattatgagtagcatctcaataataagaatttttactgatgccatttatcaataatatcttctaatttttggccccattattttttttttgtttctctttgatgttgttttttgaagttattttctcgaaataataataataataaaagaattgtgtgagtataaatttaattttagtctaagcttttttaactattatttttttttataataataaaagctttaaaaatgaaacatggtacatatttcttcttggccataaattaaggataatttattattattattatatccataaataaatgaatacttaccaatccaacaattaaatcctttcataatggaaaagggaaaataaagaatttgataaaaccatccacctatttttttaacataattaattatatctttattgcaattaaacttagaactctaattatcatactctttttctttcttgaaattaactttattaaatattactatttatattttctctaacttttccaaactattattatgtttagtgtgctatattacacataataatatattttttttttaaaatggtacataaaatataatcaacctattaatatttatagcccaaaaaaagtacaaaatatataactaatcaattcataataccttcagctcaaaatattattgtgttcaattttgagtttagtatattattatgttctattttaaaaaataaaatgtctaaatttttatttaacgattcagaaattctaacgttaatttttactaaatacaagatctaaaatatcatttagtcaagatatttccaaaatatctaattgcaatttaaatttacttttagggcatgcatatcattttaaaacataattataatttagaagaaaatattaaaatacctcatatttagaaatcaaattgtctaattattttaattta

SEQ ID NO: 30512 - DNA, 1337 bp, Cannabis sativa
aaatcgttcacctgtcgtcgactcatcgttaacgattgaaaatcaagtcgattgaagcttttatttcataagttaggcataaaatggttgaagatgatcttgattttctctctcaccttcttcctcgtcatttcgaacttcaagcgatatacagtgcccttcatacaatataaagcttcttattcttcttctccgagcacattcagttgatagtgagatttcgaatataatgattgaaaatcaaatcgttcatctgaaatcgttcacctgtcatcaactcatcgtcaacgattgaaaatcaagtcgatagcaaatgcacgtatgctctcgccaagcttagtgtgcttcttgtctcacatgttcgatgattttgcatcctcttaaattgaatatttaaatggaaaaattcaagaataaagttaatgtatatgaaaaaaaaaaaaacaaactcaaaatataaatgtaaatatataatgaaaaagtaataagtacaataaaatatttttttcatacaaatgttagtagttaataattataataaatatattgatattgaaaaaataaatacaataaatataaattattgctatattctattcaattttcttttagagagttgcaagcaaaattcaattgtcaaagtcataccgatttccaaaaacagcagaacaatctaatgagaaaactatataaaatcacctaaactttaactaattagtctttaaccagataaaagagtcttacactgagactcggagtttgtaattttataccgaccaacatacttgggttcagctatggtggcttggcaccctaattacatagatgttaggtgccaagccacgtatgcatagttttaagttttgttttttattttcttttttttagaaaattatcatatgtaattttaaaataaataaacttattttcattgagtattgataatgatagaaagcatgataattttgataaaacaaaaattaagtaatattttaaaaagcaataatgaatttttgaatttgaaagttaataaaaatgagttaggtgctgatattttttttaaaataaaatctatatcttaagttttgattaaagagaaaaagtacgaagttaaaattaaaaagacatataccactttgaatgaaagaaaaacattaaaggggatgaattattaaatgaaatttttagaatgaataactgaaagaaaacattattcaatgaatccaggtcaagaggacctgctatataatgaaagcaatgcagacatcccaagagtgaaagcaatgtcagtggtcttgacatccatatgagccttaattagtgtatgccacttgcac

SEQ ID NO: 30513 - DNA, 1085 bp, Cannabis sativa
gcatgaagaatttatgtttaatatcttgtatcattacttactttatatgtatatgtaggtgacaaaagtatgataaggaaacgtaactgtttcttaaatgaagaacacctaaagcaaaacccaagattggtggagcacgagatgcaaactctggatgcacgtcaagacatgttggtagttgaggttccaaaacttgggaaggatgcttgtgcaaaggccatcaaagaatggggtcaacccaagtctaaaatcactcatttaatcttcactagcgcatcaaccactgacatgcccggtgcagactaccattgcgctaagcttctcggactgagtccctcagtgaagcgtgtgatgatgtatcaactaggctgttatggtggtggaaccgttctacgcattgccaaggacatagcagagaataacaaaggcgcacgagttctcgccgtgtgttgtgacataatggcttgcttgtttcgtgggccttcagattctgacctcgaattactagtgggacaagctatctttggtgatggggctgctgcggtgattgttggagctgaacccgatgagtcagttggggaaaggccgatatttgagttagtgtcaactgggcaaacaatcttaccaaactcggaaggaactattgggggacatataagggaagcaggactgatatttgatttacataaagatgtgcctatgttgatctctaataatattgagaaatgtttgattgaggcatttactcctattgggattagtgattggaactccatattttggattacacacccaggtgggaaagctattttggacaaagtggaggagaagttgcatctaaagagtgataagtttgtggattcacgccatgtgctgagtgagcatgggaatatgtctagctcaactgtcttgtttgttatggatgagttgaggaagaggtcgttggaggaagggaagtctaccactggagatggatttgagtggggtgttctttttgggtttggaccaggtttgactgtcgaaagagtggtcgtgcgtagtgttcccatcaaatattaataaaagataataataaatgataaaaa

SEQ ID NO: 30514 - DNA, 1044 bp, Cannabis sativa
catattattccttattctccaccaccttattgaattttccatgaaaaagtaagattgtcccaggaaccaaatccaatccaagaccaatgttaaagaagactccaacacatggaaaaagttggtgtctgcaacattggctgctgctgcggtttttagcttcagcaatgacatgcctgcaactgctgatctcaacaaatttgaagcagccacacgcggtgaatttggaataggctcagctgcccaattcggctctgctgatcttaagtactttatttggcttattcactattccttgggtcacttgataacattggcttttggcttttggctcttctaataagaacatgtggtttttcttttttttttttacttttcacaggaagactgtacatgtaaatgaaaatttcaggtcagcattttgtcttttgtttctaaagttttggtttttattgttctgcttcctttgaaacatgaaacccaactcagaagagagcgattgataattgaaaattttggcctttttatgtatttaagcgaatttttcatagtactattgtgttcttgtaagtttagagcttgatgcttgagttagttatgaaagtgatctaagattacataactactgatacagaagagccaatttcacatctgctgatatgagggaatctgattttagtggttccacattcaatggtgcttaccttgagaaagctgttgcttacaaagcaaacttttcaggtaaaactcaagtattgaccaatttcactccattaccaaactaagtacactatgagtttttgctacctttttggtcatatcattatcactaactgttaatacatgacatacagctaaataattagaaaatataatgcttttattcttgaacaaacaatgtttctaacattcaaaaattcattttgacactgatctaacaggtgcagatttaagtgatactctgatggatcgtatggtaaagccttaaagccccttatcaactttattacaatatatgtactcttatgtactgaaattaataaacaa

SEQ ID NO: 30515 - DNA, 5929 bp, Cannabis sativa
gaactaaccataccgacactagtacattagaggtaatgagtgcatatggtaaagaggttaggaggttcaaacaaaccctactaacattattacgttagaggtactaagtgcatgtggtacagagataaatggagattcaagggggtatggactatttgtactcttgtcaagaacgttcgagacttgtatgcgttggacgcatgataattactcggtataaggtgtataggcgcctaagatataaaggcaagttgtatcttatattatgattttcgtactgagtctgttaactcataaatatgtgcttcatgtgtatgtaaaggcaaggcaaagactaaataagcgatgagtttggagctcgatgaagattgtatatatcgagatgattagacttggagggttcagatcttcgggacatcatgggctcgattatattatttcttgggtgacaacttttgaactattgtattttgtaaatgtttgaaaaatgtatacatatcctaaagtttgtaaactttatattttgtttatatggtaaagttatgtttattataaaaaaatttgttaatcatgtttttcaataaactctttgattcgtaaattgcacagtagctgagaagaacattgtagcgcgcctagactagtaaagtgttacaaataatatgtgtaatatttacttatttgaatatatatatatatatatataaatataaaacctgtctttatctttaattttaccctgtcaaaaattcaagacaaatttgaaccgttaactattaattgtaaattcatgaacaatttgtgaatttgaatctaaaattgtgtttctcttatgatataaaaaaattcaaatggatacataactattttttttctgtcgataaaaaaatatttatcaatttgaattataacaacgattatgggtatatgtaaatcccataacataacttattcgatatatttgatcatgccctctaaaatatacgaattgttaaaaattcttcctgaacttttacatttacaaaaatttaatctttttgcaaggtttcgtcaaattatttcgtttaaatgctgaagtgtctatgtaaatttacaactttatctcttaaactttgacaactatcaaattgtgcctcttccaaataaaaatgagaaagaatcatctttttttataaatcttaaaaaattaatttagatcttaaaaaaaaattattttgaatgattaataaatttttttaaaaaatcaacattttaaaactaattaagcaaattcaaaaaaaaaaaaaaaacatttacatatatatataaaaaaaaaaaaaagtattgttaaaattctaaaaactaaattttatcggaactttgagtttatcattttaaaaaaatctagatttgttaaagtaaacgactaaacataacattttttagtataatttctaaattttttttaatattttatatttttattatttttctttattttttaatatgtgtttgtaaatataaatagtcttaatttgctcttcacaaaattttagtttgtttaaattttttattaaatttttataattttgattcaattcttaagatgtgtttattaataaaataaaatttgaaaatattctttttaggataaatataagtttattaagtaaactatattttttttatcaatttaatatttttaccaagttttttaatgttttttttttaaatttttttttagaattaattaaaaaatcaattttttaaataaaaggaggaaaattttagtattagttaaaattcaaagagtaaaaatgctaatttttaactgtaaaaaaaaataaaacccaacaaaaaggatatgattttgtaactgttatatttaagagaatttttaacaaattatatttaggaggcatgaacagatagtgtccaaaaatactaattcttcttattaaaaataatttaatgtataatttatatgcgcacatatcacaactcttataattaattttaaaaaagttggattaccatgcttaaatgtaaagcattaacccaaattaatccacccattaaacacaacaaaaatatagtattattccacctaaatctaaaaatactcctctcatttcaacttctcttttctctcttcttcctcttccttttctctattaacatatttaagttatgtgtttaatgggtagattaatttaggttcattctttacatttaactatagtaacccaaattttccttaatttttgtgtcgtaaatataaacttgtggaagaatttcgtcaggctttggtgatcaattcagaggctttgcaggagaattctggtgtgcgcagctatattcctcccgatcctaaggatttcaatttctacgtggatgttgcagttcgtgggaacgaagccttcattgttgtcgtggtgtttgacagagatgggggatttgtggatgctttatctgcaaaggctgccattgcctctgttcttgaagctgaatgtttagccttgtgtcatgcattttcgttgtgtgtgaagtggggctgcagggaggcaaacttctttttagattgtcttcagttagttgctgccattaataagtttgtcatcccggtttggcagctctcttctcattttctgcatttgtttaattgtctttcttttgtggctcacgattgtgtgttttggctgccccattcggctaactcggcccacaatgtggcggcttgggctgcgtcccataatgttttccgtccactgttggaaagggaagtagcaccctttgttgttactataaactaatttctttttgttagtttttaatgaagtttttgttataaaaaaataataataataacattccctaaaatggaatgcaaatgggagatatcataaataatacttaaaactttacccaatatcaaaatttagcttcccaataattttatactaatagatacctacttatattttcccttcctattctacccctttcaattaaaaaatcacaactctctatctccctcgtttttctctttctctctgtttgctcagcaccactaccgaaagcccccctcccttcaaccttagtgacgacgaaacctcaaaagccccaaaaacccacacaaaacccaaagacccaaacctccatagcattcaagcattgacaaaacccaaaggccccaaactttgtctctctcttcatctacgaacatcatccatactgagaagacaacctcacctctgagcctgactagaagcccacgaaattttgccatcatcttcatcttcgtttttgttttttttttttatttatttattggaattgggtttgtttaagaccttaaatggtggttgttatggttttttctgaccaaaacgtgtttatcgatagtttatcaataatttctgtttgtgtagcacaatttcgtcaatttgacattttccgatagattattaataagttatcaatagattatcgataatttctatttatgaacaaaataatggtgcacggacaaaagccatcaataaagtatcaataactcatcaataacaacgttttggccgaaaaaccatacccaccaccatcttaagtctcaaacaaacacaaattcaaaaaaactcacaaaaattcaagaaatacaataatacaatacataaaataatcaaattaaactaaatccaccaaacaaattcttaactcacaatttttttttcgaaaaacaacaaaatctaacatttcatcaagaaggtgggtcgacggtgggggaatggcattggttggggactctaggttgtcaaatggccaaatggtggagtgggtcgaattgtcgagggtgggttgaaggggtattttgggtagattaggaaaatattagaatggcatgaatattttgggtagattaggaaaatattagaatattatggtacaaattagttaaaggtctagaacttggtaatgggtaaatttttaagcgtgaaatttcccatgcaaattcaataaatcttaaaatgcaaaaatgcatggtatatacaatatggcatgtcgaaaatattcttgtacaaaaaagaaaatatttaataactataacttgcaattgtcttgcaaagtaatcgagcatagtaggtggctacctgactcaaaacaaaataaaaaatatttagacaaaattaattgttaagtaattctaacaatggcatcgatcaaacgatctaccaagatatacagaaattagaattacccccaagaaataaaagtaaaatgctaaattaggaggcaagtcattaaacttcaattgccactggtaataataatataacccaaagaaaaaagaaagaaacaagtacgtacagtacagataacagaattagaagccagtctctcactaataatatcttcttgtttttccttttcttttatattcaattttatgttttaatctttcaatggaacacagttgcagcagcaactgaccgttatgttgatgaatcgagtttgggacacagaatataaagatttcgtcaatcagaaatgcaactgtgatagaggaaactagtttgatgtattcacaacatactaggaaacaacctattgcattcacatattacaccaagatgttccattaaccaactgcagattctgataagtaaagcagataacaagagtacctcattccatagacaaattgccaaactgccacgggttaaactcagttgatctaacatcagccacatcaatggattctgagttatcaatagcagcccggtgttcagcatatttcccattatattgatacacttccagttcaccccaaggcgtgggggtaacttcttcagtcaaatcaaaccatcttggtgcaaactgatgacctttggcctctctctctttcttttcagctctctgcctctcttccaaactgtaatgaacaaaaagacagcaatgtaattagaaccgaagaaataacagcatatacataaaatcaaagagaaacttgataattttttacaagacctgctcttctctgaaccagctttagaaagatcaccatgctcaagtgcaaatctatcaggacgcaaacgcgagtccgatgctagcaacttcttaggagcagtatcaaagctgtttattttatgtgcaaaatacgtgaactgaaatttgtcattcttaggcacatcagcgacatgccaaacctgtagaaccagattggcatcagctatagaaataacaattttaccagctcaaacttcattaaataaacgaattaacacacattagtgactgagaaaaatttggaattttcatctaataactaattccgtgaaattaagagctagatcactcagaatctaaccctaagaaagtacaagtgccaccagtcgtatgaaagcctttcatttgtatgatatacatattcccatatgaataaggaaaataatttagaagaagaaagtacagtaagtaacctctttcaactctgcccctggaataggttcgccttccaaatcgcatggttggcacttcagcgactcattccatttccctgtgatcagtattttaggctcctcagcagcattataaatatatccatcaacttcatagcgaccagctctgcaattacacaatcatttctaaaacaccactaacacaaaacaagttttctttttctcagttgttaaaggggaaataataaaagttgaaattcaatataatcttttgacgattaaaacacagcacagataagaaaaaaggtttctttaaatttagtggaattggaatgtatggaaataaatttaattactacactgaatcatctctgtcttctctcatattcctttcgcacatgaactgacaacattattttaaaaaaagggtggtggaaaatcgtgcttttaggtttatgggcacaataacatgcttgatgcctttaagattatga

SEQ ID NO: 30516 - DNA, 4159 bp, Cannabis sativa
gacagttaattgtgaaaaataaatttcaccttaaatttgctaacaatttagtagtttggagggttttaccaccaaaatttgagcttagagggttaactgtaagtggaatgatagttgagaggctttagctgcgaaaaactcttcgtaaatttgatagatttctatattttaggttttactttggagatgctcttatttcaccctatattattatttgagcttttttcggttatatataaaaaaagtaacaatattataattttacatttggccagcctagttagcatttatgcaacctaaataaaaaaaattactcaaatacctcttacactaaccttgaagtcgtacgatccagtcttcgcagactcgaacccttcgtgcgatcaaatgaggacgacaacaataaatcaaccctaacaggcgaagaaccaccattaattctagcaatgtcacttgagaagacgacccaaatcaattcaaacatctgtaattaccagctgatgcaaaaatttacagaaaaactagtttgagacataaattcaaccatgaatgataattcgaattccagaaaactaattctcctaaattcattttgcagattcataaaaatatagatttgtaagaaatagatttagagttctcggtcaatccgaaaaaatatatcaatacaatagctagtattttactcgttgtattgtccttgttttctagcttttcaatggtgaatttatttatatcaaatcacgaagtctaaagtaaaactgcattcatcttaagccacgaacatgaaaatattgttttgatttttatatttctgagtagttgcattttatttgacttaacgttttactaacgaactggaaatggacatgtcaataattacatgttgataactatacaagattttgcatgatatttgtaggtgtttcatatcaacaatctaacacaaggctcttttaaaaaaacaattataatatgattagattttttcatatataaaattggttgatttaacgttgatttgcaaagttataatagttatttctccacaaaaatattattaacgtaagagtgatttttaatcagtgccaaaaaaatattgatatatttttacttaacgatgccaaaacatatttatcatccatagttgttgtgattatgttgtagatctattgaataatagttgtgctactacaatattattatatattaaaatagagctcaaaatttgcaatacacaacttatacagaggaaacttgattgtggtaagcttgtttatttcacataaggggttataagttgttttagggttttatattagatgcctaataaaaaatatagttgttgcattattgacttatcatgcttgaatttttaaattgttaggaaaaagatatgattccatttctcatattttataatgggcagtttgatcaaagaatgaattaacgaagctactggccaatacatctcaatagattgcaaatatgaagagctagtacacaagttgaaatagatgctggaatgcaaccaagaaaatactcaactataactgaaatacaaagtgaaagaatgataccaattgttgaggataaaggacgattaaagcctattcttccacatacaactaaaactaaaagaacctaacttcacatggtatccattctgtgtgaacgtgatcagcaacacaacaataaccaacaatctatccttctttgaaatgagcaactcattagtcacacaaaggaatataacagcaacaacaacaatgactagaaatacaccaccaacagaagaatcaattacacaacaacaaaacatggaaggaacaatgatggggaaacaatatttgacttcatcgactatgcaaaactggtggtagaagaaatggtggagcagatagaaaacaataaaaacaaagagccagaagtcactgattatgacatttatttaatttctttaaatttttttgtgaactatcataggcagaaatgttactttaatacattgctattacattttctatgatattggtttttaaaaaggttgcataacaattgtttgataattttatgcgatattcaaaatattatcataaacataaaacattagcaacatcatatttgaaacattaattataggttcaaaaaaattttcttattacgttaactagcaagttgaatattcaatagttgtcaaccgttgaatgatagttgtatataagttgttatatatatcacaaagattaaaaagattcatgtattttcaccaactaattttctagatataataattagacatgttgaattaaagttctcccatagttgaatcaaatattttatatattggcctaaacaagaaacttgcatgaaaacatatgaattagaacccttcttaatttttgagataaaactcttaccagccttattagtctttgatttcttcttcatagggcaatgatcgagttctgctaaaggtgtgttatccaaatttctacacggtgatgtggcatccgtctaggtgacacgtggaatacatttcataatctggacgagaaattctacacctaatgggtcatgcaggaagattcgataatcaaggtcataaataaaggctaggacatctaagcagggtacacatagacattcgaccaatctctatcaagcaggttgctcgcatgcaccaaccagagagtgggagttggataattttagagatatatcaaatatatctcaatgcttacactatccctaaattcacaggatagattcgtattcttagaaaagacagacaacctgtcttgtttcttttttttttcttattgtaattatggaaattaaactagtttcccattttatttcttattgattttaggaaaccaatttgatgtaattaatccctataaatagtggactcatctcatcatccaaggacacaaattttattcagagagaacactcaagagagaaacctcaatctaacagtaaattactcagatatcacaataagagctttagagagagatcaaggctttcttgcttctcttctcacaagtcaacacaactaaaggggagtaggctattactatcacagggccaaacctatataaattcttgtgttctctttactttatgttatttttgttagaatttattttaccaggatatttactaacatgtatgtttgattataatctataatctaacatcctaaatatgaatatcctaaaacaatgaaataaacacataagagattaaaaaatccttacattgatggcagcaaaataataatgactctttccatttagaatttctagcccttgattcctttctgtagcatagcattatcaagatctaaacctggatcttctctccttcagtttggttagacacaaccttcctcactatcttaggtattactttgacatgagtggacatactctcaatcatcatggaccatggaattctatgaaaaaaactcaagagcaattcgaaattaataattaaatttaaggtggcatttggttgggtggaataaaaatataggaataggaatgagaatgggaataggaataggaatggaatggaataaaattaaaaatacataaaaaaaaatattaaattttttctcatgttacattggaatggtcttttctttcattttaaaatagaatagtcattctcccaaaatggtggaaagagcattccattggaatgccattctaatactttaaaatgcaatcaaacaaaggaatggaatgaaatttttttcctttttatttcattccatttcattacctccaatcaaacaccacctaagaggttttctttcgattcagttttgtcaaacaagagagagtctatagtcttcttcttaaatcaaaatccttaatgttctctttataaggattcattaggtttagggttagagctaaatgggctgattagaaagatccaatggcttagaatcctcctcatggcgaaccccttaatgaagcccatgagttagaatttttccattattttgtttccttaatgaaacaaatttgtatttcttcagtaatgccattttctgctctagctatttaaatactaattgtatctatttaataattataaataattatcaaataaaattactatttaaatatatttatta

SEQ ID NO: 30517 - DNA, 1502 bp, Cannabis sativa
gtttggataccattttaaagcatcaccattatttatctaaaaacattattctaatgtactcttattcctgatgtatgaactttagtaaaaacaacagagaaatgcgtgtttctggtttctcttcaaactaatcaacccctcttatgcccttatttatttatttctttcatatttcattaacattaactctttgcttcaatttgatagtttacacaaatcatgcactgcccttcaagttactcattttttcgtattaatgtatgttgaacaactaaactatttcaggcctatgatgtgactccatttttggaagaacatcctggtggtgatgaaatcttacaacaagcaacgggtatgaattaatgcccatcaatctcttttcaactttgttcatttcacttccaataaatctgtggaatgaaattatgctccaacttgttgcagagaaggatgcaactgatgatttcgaagatgtaggccacagtgacagtgcaaaggaactgatggaaaagtattatgtgggagaggttgacatttctactcttccaaagaagcaaaactacaagccaccacaaccaattcctcatcaatcagaccaatcttctggggttgtagtaaagatgttgcagtttttgttgcctttgttgatcttggccatagcttttgctttccaattctatagtaaagagaaatagctcaaaattttctaactcctttccaaacaatgtcgatcttagttaacaattggctaagtgataaataatggaattctagttgatcccttgtagtgttgaaatgtttttgtattattaaaatcctatgtgtatgtgaatttccaataatccaatccaatatccaatatacttgttttcttgtcaagtgcctcaaaataaatgttgctcctacaccccatggaatgatagaacgacatgtggctgagaatgataataacctatgaaggataggtaggagagggtttgctcttgctaattaattaggcaaccgtgtttagcggttggatattgtattactgtcggttcccaagaccaatgtttatgccacaaatgcaaaatgagatagtataggcatttaaacagttagtattgagtatttccgactgtttgtaactaacgacaataagagagaataagtgattataagggtcaggttggcacaactgtgctgtagaaaaaagcaaaagaaaacagctgtagctatgttgtaaggaaaaacaactgtagcaaaactgtgaaaaaaagctgagcttagtgtttggtaaattataatttttaaagtgctgcaacttgttaagattctattataataatgataatattttaatctaattcattataatcacaaatatatgtataaaaatatgtgttatttaaattttttatgtataatcacaaatatatatataaaaatatatgttatttaaattttttattttttatatatttttaattatttttttctatagtataaatttatatacattt

SEQ ID NO: 30518 - DNA, 1652 bp, Cannabis sativa
ttggctatattattatatattatatttgatctgtctttctgcatgtattttttgacaagttggcgcggtgtagtcactactaggtctttgggatccgaaatacattttcaggattttatttttccattatataaataattaaggaatctaaaatttataaacattgtgtgtgtatgatttatgacaattacacccttgatgaatatttatgcttatttttgccttggagggcattttggtcatttgaccaactaattatgttttcaataaaatccaattttgagagaaatgaaatgcattttctgactttttcctatccctctagctgactcctctcttgcttcatactctctttgatttctttgttttggagaccaaaagctcagcaatttgggtgtaactcttggtgtttggagcctgactttttggtaacttctagttcttcctttgttgagtttaattgttgttaggtgaagcttcaaaatcatgttcttattggtgtttaaattgttggatgcatgtgtatgagatattggatgattgtgttgttttaagcttgattttgtgagttattctccttgttcattttgtctgtttttaagatttgaattgtagtttgaaattttggtattgaagcttaatttgtgtgatttttattctgaaatgttgggttcacaattgggttttgatgctttagtttccaagctttgaatttgtgtaaagattgtaacttgtattgattcttgaggagcttggttcaaatgcatgaattgatgttgttagagcttgttttaatgcttttagctctctagtatgttgattttaaattattgagatgtttatttgagttgagaatgctttggtttgaattttgggatgttttggtgcatttttgagttgctttatttgcatttttgggttttcaacccaggcaccgcggccccctcacgtgggcagattgcatgttaaacttgtattgttcataacttttcgatctgggctccatttggggtgctccaaatatctttggaaagctcgttccaatctctgtatgtttatttgtatttcaatgccaattatatgattatgtgaaagtggatttagggattaaccctatttgtgaatcctagtaattatgactaggattactggcacttgtgctggagcagtacttggggatttggaatctccatgtacttgagacatcaagtaagacagtagttagcacgtagagttaagcacggtggtgctaatgcttgatattataatggtgattaaatgagagcagggattagggttaataccctaaactgagcggttatatggccaagggttattaccctagtgattaatgattttaaatattatgccatgctatatatgttgagtaaagaattatgcgttcaaggcataattacgttagactctgtaattagaaccgagatagactgttctaaggccttattgtaaatacacgtgagagcgtaacacgtgggtctatgccacatagacatatgtaggcgtgtgagcataacacgcaggtctacgtcaaatagacaataagtataatgccattaataattatgtgttatatacattattgtagttaatgatatttatactgtcttgctgggcttggctcacgggtgctc

SEQ ID NO: 30519 - DNA, 1799 bp, Cannabis sativa
acttttttttttcttttctttgttatgtaattttacttatgttgatgaacaggtcatggagattcgtcctagaatcgattgggataaaggtcgtgccctgcaatatttgctaggcactcttgacttaggtacctctgataataatgtcctcccaatgtatataggggacgacaaaactgatgaagatgctttcagggtatggacacctaggaataatatatctcaatcttctttctatatttatataggctatttattgtcttttcagaactatgaattctacattattgtctctctaaatttttcaatcttataaaattggtcagtattgtaaatttgtcattctatcaaattttatcacacgcgacaaataaattgaagacatattgtttagctagtttccacgtcaatacaatattaacgccatatatatattttttcgttattttcttaatcattaattgacttttagttcaattcatttaatattaaatcatacttgtgacgctgatacggtaattgactaagctgtcatcttatcatattatttgtcatgtgtgacaaaatttgacaaaatgactaatttataatactatgaatagttcatggaccatttgtaagggattacataatatagttgtaggcaaaaattctaaatagcatatttatatataggcgaaattatgatatattaatgttacccttttgtgtaggctatacaagttggacaagggtttcctattgtggtttcttcaacaccaaaggagactgtcgcttcatactccctcagagaaccaactgaggtcatggcttttttgatacggctagtgaagtggagaaaaagtgtttcatagagccaatgttcattgcctatgaaaagagcttagctattaatatgtttatataattatggttattattagtagctagtgtgagatgatagtaggtgattattaaatttgcctgtgttttttgacttggcaaatttaggtagctgtgtgtttcactcctcaccacttatgtaaaagtgatgatgctgacatggctttgatataatggtgagtacttttgcagagtagtaatcccaaaaaagaatagtattaggtaatattatttattataggggagaactatagaaagcatatgatttatgttacatattgagtttgagggggcaacctcttcaactttagtgttgtcttttcaaatataatagattaaattagtggttgatggtttccttttctttttttgctatgttcttttacaattattaaatggcgaaaatgcatcaactttttcttttgaacatgatgaggaatataacaaggtaaattatcacaatcacattcacataatcaaatgaccatacatcaatatcaactcgagcaagttaaataattgttaacgattatgtaaagtcccgctttaattttttattgggccctaacactcttagaatgatggctcttatacacgattatgtcactttggctgcttcatagactgacgtctggccctacagacctttagagtatttccagcatgctttgtcctcactcatacgtttcctgagaaaatttcccaagaggtcacacatcctaaaattatctcaggtcaagcacctcaagacaatgcaccttgttttttggtagcccatcatgaaagaactccacagttaagtgtgcttggcttggggtaatttcaaaatgggtaaccttctaggaagtttttccaagaagcgggcgagtgaggacaaagcacgctggaaagactcgtgttggtctgtagagtcagtc

SEQ ID NO: 30520 - DNA, 1398 bp, Cannabis sativa
ctatatcgaaattcaattctatttcactatagtataattgacattcagttctcaaattttgtatcaaacataaacaattaattgatggccaatcaatcaaaaagaattaagtacgaattatgaaataaaatacatagaaattgagaggaaattaaatcatattaaaaccaaaaataattgtcaaataatatccatctagtccctaatgaactgtttagctactcatattcatcgtagcaatttcacacatattaatttaagaatagaagaagaaaatagagaaaaagagaatgctaaaaaccctggtgaaaaagccttgaatatcaattttgctctctaaattcgtactccttgattgcttcttgaaaactattgaagtccattccttttggccaaaaaatgataaaaaaaaaagataaatgatgctgaaaacctattcaaaacttaggattagaaggggcgaggctgcaacatggaaagcctatgcctaggcataaccccctttatttgggcaatgagctttctactgcatcaattgatagtatttagttcatagatctctcgatattgctcaaaatgggacgattcaacatgttccgaaaagaaaaaagagagatttagaatttttatgtttaaactttctcaaaaatctgaacagaaaatagtctattttaagcttgaagttttagctttattttcttgcacaattttatctattttatagatcatctttttgtgagatttgaccactttatacattccaagtgtcgatgcttgaaattaacgaaaaacaagagtaattatattccaaaaaatgataataaagaagaaaattaactataaaaataacataaataataggctaaaaatatcctaacactattcattgtaaacgatcgacaaaaaattaaaaagaacatagaaggaaagtagaagaaaagaaatcatcaaaaaaagttgttggaaagtcttctaggaatatttttcctcactagtcacaataaattcgtactactaagacgttaatatgaagactcgttttatgtgaaatttggtaaaaatggcccccaaaattcacagtaaattttaacaagtttttcttactattacactcattagtattctttaaaaatctcacactacacatctcaaaaaattataaaatttcacaaggacaaagacaagactgttgtgcatcacttttctattcgtcacattgagagaataagtagttttcaagaactaataataattttttaatcaaaatagtgaaaatctcaaatttctgatagtggtactacccctttgtgaaatgtggctcggacccatctgaaaatatttttctccactactcacaatgaatttatactactaatacatgaatatgaagtgaaatgg

SEQ ID NO: 30521 - DNA, 1532 bp, Cannabis sativa
  modified_base (304)..(305): a, c, t, g, unknown or other
  modified_base (1491)..(1506): a, c, t, g, unknown or other
tgttttataaaaatacagtatttatgaaaactttttcgtgtgacagtatttttgtaaaaattaactcaaattacagtatttttataaatttcccttaatattatggttataacatttagggtttcattagttggctgctattgtgtttgggccgaattacccttgtgagaaaaaagtctttactcgtattgggccggaccattgttgtggatttgggtggtctcctgctgcaatagcactccatgacccagtacactacgctatatcaattttttaatttttaaagaaaaagaaatttttttanntttttatttttaaaataattaaatttttatttcaattataaatatttattacgtggactaattaaattgtgtcacgtgtacactgtgtacacgtagacattctaacctggcaaacacccaaaaatggatggaaaaccaggaagttatgccgcaaattactctaacaaactactaaagtaggtaagacaatctatattaattgtcatcgttttgtaatatatgagaaagttacttgttattataggtaactttcgcaattatcatcaatattaagtgtggaaaatatattatacatcttaatttaaaattcttaatgatataagagttatagtgtgtgcatgaattacaactctttattgagttcataacatccattagagattatgagttggaatttcaaatagtgatgatatcaaaaaccctaaaaagagatttttggtgcttaattaggatagactaagtttttttatcaaaaaaacacattgctaaaaaactctccctaagacttaatagttttcaaacatgagttccctcagtgcttagagatagaaaattcaaattttttagacaaatctgtaataccttgttcaagtcatggtgatttgtactaatatacactcaagattttgagtgagtatatatatatatataatatcttattcttcatattatattatatatcttgtatatgatatgtgttattgatctcttctatttttttttttttatattgtatatatgtgtggtaatatttatataattaatttcttatatattttagtctttgtattatttttacaattgaattgtaatttattttaatttattttctattaatatattaaatctctaaaaaaattaatgtaacaacttttgtaaaatattactaacgaatcattattgtattatattatattgaatttgattataaattatatttttatataatacattgttaaattttaatttatactaaaatattatatatttagatttccataaaaattaatactacatatagttttacataaaaatattacatgaaatacaatttaatataatactatacaatctaatacgatgtaatacggcataccaaactaaccctagtgttaaatactattataccaaataacaccgctcgagatctatatcaactccacatattgtgacagtcagtagtccnnnnnnnnnnnnnnnnaaataccgggtaagctgtgcaatccc

SEQ ID NO: 30522 - DNA, 1491 bp, Cannabis sativa
tcctctcaacttgtattaacaatgttttgccaactgaaattctcataatacctgaagatcacaggagagctataaaattttacatacatgactaaatttttcatgtataaaatcaattaaatgtgtaggaattttaatttggctcaatgaaaaaggtgatgatgaaaccatatattaattaaaaggataaaattatttgctttaaaaatgtattggatataattacagttatgttaaataagaaaggaaggttatcacctatttctagaccaatttttcttgaagcacgttagaactcttgaaatacactcgtggataacagatgtccattgttcatattgcaaatcagaaacgataacacagactcgtgggtgtccatccataacttagcgtaaggcttaattattttgatcgattaaggagttagaatatggaggaaagatgttggcgacataaatttgtacagaacaccaaagccattttcatattctctgtaataacgatcgaaaataattttcttcaaagaattcgaatacatggtcaattgcaatagaggttggttttggggaagaaaatcgcaataattaagtaaaaactatggaatatagttttgggtttaaggatgaagaattgtaaattaaatgcgattaagagttttgggtttttaatatataaagatttagatgtaatttatttttacatatatatataataaaattaaattttttatataaaatatttgcataatttttatttttaaatatatataataatattataaaattaattagaaatattctgttaagtaattgagatattctgttaactttaacgtaaaaaatcaaaaaatattattataccaaaaatttgttacataaccatattttatataaaataaatatcttaactaatccaaaaatttaatatatatatatataactattcttaacatttaataaaatatactaaattaaaatgttaactttaatagaagaatataatatattactagcacacttttaatagttgcattctcctacataagaagcacccattgaaaatactacataaacacctatttactcaatcattaatattataaaaaccacatattatttaacacacattactacaagcaaagtcatttattccaattttcactaaaataaaaaaggaaattttaaattttatgcttacataaggtagaaatttttctcttcaaccctaaataccctatattggttagatgggacaatattttgttaattcccacattaccccctcattcaaacccctctctctttcccctctttctctctttctctctctgtctcgagaacccccacgcgtccacgcacgcacaccggactttgacggagactgcccacaccgtccacgccggccacctacactcgaccgcccacaccgtccacgcaagctgcccacacccgtccgccccaaccctcattttttttcaatttttgttgctta

SEQ ID NO: 30523 - DNA, 1831 bp, Cannabis sativa
ttgtaaataaatactaagtttaatttttttgcggtaataatacataagttatatttttagaactctgtaggtatctaactgttaaatatcaagtaattatcaacgtatcatattcttactgctatatataaattaactttttaaaaattaaaaaattatgacctggaacaattaaggaccacgtgtgcatatttatttgcaacaaagagttaaaattatgtatttatgccacaagttactcttattctaaaatgaacacctgtacattcttaattagtctaataatttaaaattaaaactaattaaaataaatttgattttattttgtcttttatttgtttccttctttccctctgaaactaaatctgaaagaaacactaaacctaaaattaaatcccaaagtcgaaccaggatattgactcaccccaaaagtcaaaccccttctaacctagaagcgtgttattacaacccatccctctgccggtttcatcactgttagactctgacgaagggttggttctcaactcatacattttcttgttgatcattgtcgtcagagggagcttctcctcccaatcaatggcggcatcatcgtcgttaaggtgactgctcttgtcccaatgctctctcgcacccaaactctttcttatgaattccacagaagttcctcaactttgtttgtcgttgttgttggtccacaatcaaagccacacatatatctacccattaaaataattttcaaatttttatcaatataaaaaacaaaccctttattctttatgcgttatttttataataaagggagaaaggaagagagaaaaaagatagtagtttataattgtcataaatatgggttaatataataacgaaagaaaattgtgatgatagaagagagaagaagaggagtatgttttggggtgagtcggtatttgggatttagttttaggttggaatgtgtttgaactccaagtgtgatcatataaacactataaaaatagattttggtgctcatttggaatgaatcaagttttctatcaagaatgcacatttctagatacccgaaggcttataattctcaaagttttcccttagtgcttagagataggaaaaaataagcttttggacaaaggtataatactttgttcaagtcatagtgatccccactaatctacactcaagattgtgagtgaatgtatatatatatcttcttcttcattttatattatatatgttgtatattacatgtgttgtaattcatctattctacttttttatatatataatatatagtgtgtgtgtatatatattgtatatatgtgttgtaacatttatgtaatcaatctcttattttagtcattgtattatttttacaattgagttgtaatttatcttgatttatctttcattgatatataaaatctctaacaattaaaagattatctaattttaataaaagaagagataaatcaagattttgagaatacaaggataagacattttgtgtgaaagtcattcatgggtgaacatgataccgtattttgtgttttactatttaaataatagtaatatatgtattaacatattttcttgtgttgagataaggaagtttttatgttaatatatagagaattatatatatgtgtggcatatatatgtgatcatgagtttatatcatattttatatatagtggtatataatatgatatttgaatttataacatatttatatatgatatatgtgagatatataatgtatatcatgtatatatgagtaatatatattatatatgatgagcataatataatatacatatatatattgtgagattaa

SEQ ID NO: 30524 - DNA, 1314 bp, Cannabis sativa
ttttttttttatttttttctttcttgtttcgttagaatctctctctctttttaaaaaaaaaatattagaatctcattgtttgttaattaatctaacaaacaaagactctcatcttgttacgttaatttcaaaaacaaaattaataaaataaagataataataaaataattttttttatattaattaactttacaatcatcattttgattattatagagattggttccatcatcaatacccatggccatctcaacttcctcagtagaggaaactttatcatcttcaaattcaccctcaagagtccaagccttcccagacttgggttcatcaacaaaatcctccacatgtgtctctctttcagcttcctcttttttcctcttcaactcctgccactcctgaactctcttctgtttttccatttcttcatccaatttaagttgttcattctcgaccatctcttcacgggtttcttactagaatccaattctcaaacatttctttcataatgataaaatttcttacattttcttcataaatataattatacataaaattcaatttagctatgtacataaaaataatgtgattgagataaaagttttacatacatgttattgaattgtcatatattctttctttcacaatgataaaatctctttattattgatgtgttttatatttatatatatatatatatatatatttaaattattaccatgtttgtttgatattttgccttcttgttttgtagtttttttaaaatggttgatcattaataatcattattgtcattactcccattttgaatagaataatatatagtattattttgtatgtttgtttatgtaacacctgtatttgaaaattactaaactcaaaagctaatcttattatattatagttaaataaccatataggtcgggatcccgagcataaaacacagttaaaaattacatttactattagaaaatcccttaacttttttttatatgacaaatgacaagcaacatcaaaaagcaactcaaaatgttgaaagaccgaaaccctacaggttgcactgccgcgatatgtacaatcactgccaagctccagctcactgttcctccagcttagcttttcttttacctacacaagagagcaaactgatgagtcaacaaactcagtaagatatgcataacatatatataagcaatgctattccagctttatacttaagccgccctgagcccaaataccgagctaaccaaatggttaagaacgttcttaatagaagtacgaccactataccatatgcactaaagtaccaaccctgta

SEQ ID NO: 30525 - DNA, 1238 bp, Cannabis sativa
aaatgatggttgtgacaaaaaattacgaaattcaaagaggcacaacaatccaaacggtagcaatgtttcatcgagaggactcggcatttcatgcctagtttacatgtggtttgaatttaacaatttctcgagaatgatttgaacattcctcaaggcagtcatatcttaaaaatgggaattttcattactaattagaagttatgaagtcggataatttttgagtactagtgtttttgcttgaaatgcttgatcgctaagtttgtacaagtctcccaaatagtcccctgggagatgatcttagtaatcctcactaattaagttgatgtctacattgtcactatattgaagacttagaaaagaaatgcactgtgtttggtttaaagaatattgtggtggtttctgagtgtagctgttttcttttgggttggtcatgacttgtcaatcctagttgatctgaattagtatttagaaaagtgttgcagaggtgtttaatgtgtggaattttactatgtagatgagattttttatttgctgtagaatcttggtcttctctaggtcttttgtgtacttcatttttctgacatattttaagtaacatctgaaggtgtgtttcaagtgcttatagggtttatatgtctttatttataagtgtttataatattttttatttagacatgatttaacaggatttagtttgatgcagtaacaaaatggttttatagggtatatgcttaaaggttgtgattgacgtttgttcttgtactttgtttactgtatctgacagtaatattataatttccttgaaaaaaataaaaatacttaaatatgcaggatggagctgctgttgctggtcttgttattgccggagcatcactggttgcagtaaacattacagggaatggaatttatgatcccataggctcgattattgttggcaacttacttggaatggtatgtgatgtttcttgttcgtttaatctttttcattaaatgtttcaagctgttttataattttattttccgaaaacaaatttaagaaacaatataataatgtaaaagatgacaacttatcatcttagattagaaccgaaggtgtcaattattattcagtatcaaaatagaagaagcttaaatccctagtttaaaggaccgaaatagccacccaacttgtaattctttcccaaatgtatgtaagaccgtcttccacatcacagatttctttggggaggtttccaaaa

SEQ ID NO: 30526 - DNA, 1507 bp, Cannabis sativa
aatttaactacattaataacaatgttgaagacaatattataatcctaaacaaaattaaatatacaaaaacatgcatgataaagatagtagtggttctttcttgaatttcaaagtatcgagaatgtgtagcacaattgactatattcaaaacaaatttagagtctaataagaagaagcacatgccatatcttgaatatatcaaatagagaattgctaaataatattgttgggtacttagtacactgctcaatgttatactattattggtgtaattaagtaccgagtcccgtataacttaagaaaatagcttttagaaaatatcgctaactaatcatagaacgctacctataaaaaatattgggcaccactgatacctaataataatgttctatcaaatatacggtcaaagactctcctcatgccttcaaagttcttcaatgttataaggacaacttgaattaggaattaattatgaggggtgtttataaaatagtcaatccagtttaatccgcacaatctaatctaatctaattcataaagtgtggatattctcacttttcagattggattgaattgaaaattttaaaaaaattacacttgtgcggattgaatgttgattgattagtaaaagtaattgattcaatccaatacataaatatttatataaatttttaaaaattatataaatattttaatgaaaataataataatttaaaaatctaacacataatacaaatgtaatttcaaaacttaatagattaaatgtataatctatttttacatataattttttttctacatacattttaaaacaaaatttaacatttttttctacatatacaattcttttttttttttctttttttgaatttgttgtttatttattttaatttgttgttggagatatataaacaacactaatttattttattttgttattagttatatgaaaaaaaaatacatatatgatttaataaatattaactaatataatactaaaaaataatcaatctaaaataattaatctaatccgcactcactatactaataatctcaattagtaacatttctaaatgtcactattattaatatttagtgacattttacattttagtggcatttgttgaaaacgtaagctattataatgtcaccaaaggctcaagtgttgctaaattaatttttattaatattttaaaatgacacctaaatataaattgtcactttaaaatgtctctatgatatttattatttatttatttaatattttcaaaataatttagtgacatattttcaaaatgtaaaaaaaaagtagtctttatttttttaatgcaattaaaatttatttttataatatatattatttattttaatttaaaataatacttatattatatttttatgagtcatatgtacaccatttttttaaaaaaaaagtcatatacatacaggattacgtaattgatttaaataatttttatgtatattttaatatatctatatttatgta

SEQ ID NO: 30527 - DNA, 2357 bp, Cannabis sativa
  modified_base (1563)..(1592): a, c, t, g, unknown or other
atacccaaaagagactagaaccatttgagggataaactaatgaaatatcaatgatgaaaagtaaaacagaaaaattaccagcattaactaaaaatttcacagatggcccattgggacactttgacatccatagataaaggtctttttgtttcctgcactgaaattgaaaacaccaaaaaggtacaaaatgagctagcaaatatttgcaagtaaccaaaactttgtcctttgatgttcttatcaaaaagctcacatatatactcacaaagattagtacaaacataaattttcaaatagtgctaattacaacttcttaacctctataaaattacttgccgaaatatttttttttaaatattttttcatagtcataattgatatagttaaaatatcattccaataaatttttcaaaagttctaaataatttaccgtaccaaaaacggaattcttgagaccgtgttcaaaaaacttcaaacctatgtatgaaactttaaactattcaaaaaatttatagaaatgacgttgtaattataataaacacagcatatttttttttcacatatattttctagaaaagttataatagatggtttatggtaccactcccataaatttatagccaaaatttataaattatcatatatatactcatgtaaaggcacggtctttcaactccaatcaaatatattcatgaaatacaaaccaaaaactcaaatgaaaacatatgggttgatcagttaacaaaatatcacctcaaaaaagagacaggaagaacaatttttgagctcaacaagctcattaagcgccgcacccttactttgcttagactcaaccttgttatctttcttacaatgaggcaaaagtgagacaatattcaacatcaaatgacgatacctgtaagcataataatagttaatcactaacaaaattcccaatttgaaaaagcagattaagaaatttgattgattctttttacaaacctgtaattaattcttcgagaacaagtaaccaaaaccttctctttgttcctgaaaaacggagttgattcagtttctgcttctgcttcattcttcttctctttccaacccaaaagagtcctttgaggcctctctgcagctgtatcatccttcttcactggtgccaccaccacagtctcactgtgctttctcttcttccccatagatttttgtttatatactcagtagcccagcaaaacggaattcctcttctccgacaacgaaattgataatctttttagcgagagaagaaaaccaaagaatgaagccctatgaagagagaatcagcaatggagagagaaggtgggtgttgatgccatggacgacagagaaaccctaataaaaccctaataaaaatatgatctttggttttgggtctgctattattgtaactgtgggcttctgttattgggctaagtcttaacaatacaatcatgaccacacttgtattagcatattttcataaataccataaaatgataaaaatgaattacaaaaatacacttaggagtttttctttcaagtgtaatttgcggcataaatacnnnnnnnnnnnnnnnnnnnnnnnnnnnnnntaagttatatttctgaaacttttgtaggtacctgatcgctaagtgtcaagtcaataactacgtggcagttgctgattggtccaattgacttgacatttgatggtcaggtacctacgaaagttctaaaaatataacttagttattattacttttaatagtttatttgcaactaaaaattaaatttaagtatttacgccgtaaattactcaatattttttaaaatttgaattcattatatttatttttaaaaaaaaaattaccggcttattttttacattgtttccatattactttatatttttattatgttatttgtacgttatttttatgttatttttgtagagttttgtaaaattatcactgaaaaaaaatttccgtaaaaggataaatcagtctttaaaaatggtaaaaaaaaaaaaaaaagaagtgtcatgttagacaatttgtgaaaaaaaaatctatattacaaatcctatcgactttaaatttacattatttcataactttaaataaatactttacaaaattgtcatgtgaaaataaaagattaaaaacacacacactttcaaagcaaattagtacaaagatactccatatagttatagacttagaattttacatttaatttaattcataattcacaataataaatttgtaaaattatgaagaacatatgacatggatatatttttcttaatttgatttatgtttttttttttctaaattttaattagctatatgaaatgatttatataaaattgttat

SEQ ID NO: 30528 - DNA, 1186 bp, Cannabis sativa
  modified_base (855)..(858): a, c, t, g, unknown or other
  modified_base (1099)..(1101): a, c, t, g, unknown or other
tctccctcagcaatttcgcctatgtccttttgttcattatttccctgtcgtttctctactacatatatatttactctttttttatatgtttattattattattattattattattattatttacagtttaaattttagtaccctatgaataactcagtctccattagtagccataggatccaaatgaacggccatcgatcacattacggaacatgcattaggattttcgtaactgaacatttgaggcacgtggtaagggtccataggaactccgtagccattgttcatcggaaaaccatggttccttgcgtactattttggagttgtaaattacaataggtgaaaatttttaagtttttgatattaaacacgttccgttgatgattgaaaataatgtttgcagcttcaagtcaatttttgactatgatccattcacttttagaaaaaaattctaaataaaagttatagatctttctttctactttccaaaatattctgagttataccaagagagttgtgaccaaaatactattgattgtcgctggaaaaaactgaaaatgggaaacttcaaaaaacagcaaagaaaagaggaaatcgattgagaggcggcaaccttggtatttttttgggaaactcaaattttcactataaagagagggctgagggcaaagctttgtacactattcgaacttggaggccactttggagcataggttgaaggctaggagtagaagacaccattgaagaactcaaaacaatgttctttctcatctatctttatttttaatatttttgattaatgactctttattgtgttagactattatgagctaattttcttttaaggattattannnnaaccacttgaatttattttatggattaatatagctattcaatttcaacttctcttaattcaattacaatctgttttaattctgtaattatttactgccatctatattatctatgaattcaaattaaaattttagaagataagatttgaatatgctcttattattaatgatgcaaattgattgaggacgaaaatatttaagttgtttgattctattagttgttatgcttaatgttatctttnnnattaaacttaccatagaaatataggaagtaaaataaaaaatagttggtgatcataataattcatatatttattatttatatttct

SEQ ID NO: 30529 - DNA, 1503 bp, Cannabis sativa
ctaataccttttaacatttctcttattaataaaaaaaaaatatatttattcttcttattttaaaagtaattatataagtccttatggaataaaatgaaaatgaaaatcttttagcaattctcaaatgaaaatgaaaacctttcacaacataataagtccctataactttttttttttgtggttattgtcaaattctaaataataaattttatccatttgaaataataaataaataatttttatatttgaaaggaaatcatttttttttttgacttttgtacatgatttatgtaatttgaataaacattaatgtttctaataatatttaaaattagtaaattttagtaattatttacacttaattcttaattttttttaaggttaattcttaaaattttaatgttattagggtacttttttttacaagtgacattttagctatttttaagtgttaattgtgttttcgaattaatggcacgtgtacttctaaaatctagcattagtcaggctacggctacgattatggctccagattcggatgcaagtctaacttataaatgcgataagaccagaccgctttgattcgagaaaaactgtcctacccaaaagttgaaaggtccatcaagacaaatctagataccttcatagggtaatccggaacgggcaactgaagagacatctagaagcctctaaataccatcctatgtggcatcctccaaacacagggtcctaccgtgttaagggcttgtctctaatgttagactcagggagtgcgcgcaccaccaaaagaaatcacatttttgtccaacgtcgtattccctgacattctcagtaccaatatggttgcgcataaaaattgtaatcaccaaacagtccctactcgtatggatgatcattaactcgagaattgagcctcacctaattagcctaaagtcaatatatattgtattttaccccatctatggccttagttgacacctctaaatcctaccgggtccgagttcacccacacctaattctaccctataaatagaacattattccttcatgcaaagtgttggaaaatcatttctgctattaagggctaagaatcagggttcttaaactttggtaagaacactcttgtgtaaaatacttttaagcttttctaactcaataatatatattgactgacttgtgtggactaaggtaaggctctaatgcctgaaccacgtaaaaattcttgtttcttcttctttaaatttatttctgctttaagcttaatttatttcataatcggtttccaagaatctcggtaaatattttggtgctttcattgagagcttgaagaaagtttttccatagttgtcatctacacaatggtcgcaacccaaaacgttatggccaaaccacctactcgagaaggtaaagataatgtcgccaatgatgacgagaaccagctgcccccaataaacgatcaggcaggtgtcgtggggtacgagaacgcatgggaggtaggtagtc

SEQ ID NO: 30530 - DNA, 1426 bp, Cannabis sativa
  modified_base (655)..(656): a, c, t, g, unknown or other
actaagcattgggttgcggttccacatttaaatttcgagaattcttagagtcagccatatttagtgtcgggttttatcacaactcttggtgtggttcgtatcaggaaggagaataggcatcattacctcaggaaagattcagttcgtatcaggaaggagaataggcatcattacctcgaaatcttcaatgaacaggagtggattcttgacaccagatgcacttatcatatgtgtccgagttgagaattatttttcgattataaataaattgatggatgtaaagttctaatgggaaattatcattcatgtagggtcattgaaactataaaggttgccatcaaatagtaagatagtggaatcaaggtgctaacaaacgtaaagcacatcccagagttgagacgaaacttcatatccctaggtacgcttgaagatgagggttacaaatgcaagtccatgcacgaaatctttaggatcaccaaaggttcatttatagtgatgaaaggtgaaaatatcaatggtttatatgttctctaaggagaaactgttgtagccggagaggaaagtttggtgaaagggctagaatcggatatgcagctgtggcctcacagaaatgggcatatcagtgaacaagcctcaaagaactgcacaaacaagnnataattgaaaatttaaattcttgtgccttaccattttttgtgaaccttgtattttagggaaacaaaataagttgaagctcactctagcaagacatataactatgaagatgctcgaatatatgcatgttgatctttggtggccatacaaagtgcctactcactccgataagaaatattttctttctatactggatgactataataggtgtgtttggacttacttactagcaactgagagtgagtgcctagaatagtttagagtttggaaaactccggtagaagatcaaacgaatcttaaaattaaaaacctttggacggataatgggttaaagtttattaactctaaatttgacaagttgtgtcaataatatagaatcactaggcataaaactgtagagaagaccccagagaaaaatttgttgcgaaaaggatgaaccgaaccctgttgaacaaacttagatgtttgttgttcagttctggattagagaaaccatttttgggggaagctctagcaactgcaacctaacttataaatataagcccaaacctagttatatgcttaaagaccccgtatgaaatgtggtacacagagctccaaacctaacacacttaagaacctttgggtgtacaacttatgtataccaatctattgacaagctgggacctagaccagttaagggaactttcctagattatgccttaggtaccaaggggtatataatttgtatttctaagaaaggtagacaaaaggtagtgattgctagaatgtg

SEQ ID NO: 30531 - DNA, 1006 bp, Cannabis sativa
gttccatgtgattaagcaggttagattaagtggccataattacaaattttgagttctcatctcaaattatacattgtaatatataaatacttaaataaaaaagaaacaccgtgagatattacgcataaatgaggtataataagtactatacttactgcatattgtattcgtttttactttttacactaaataataaatactacgtacataaagtcatttctaaagaaaccaacatagagttatatttgtatatttttgtcattctgccgtttaaatcaactaaattttaattatttaaattcaattcaattataattaaatattatttaacttttttttagaaaactaacaacagtttttttaaaaatttaacgaaccggactaaaaactttggagccatcattcgcgatcacaatggcacttatgttgcttcttcggtgttgggtgttcttcctccttctgtggtcgcgttatggcaattttggtgagtctccaactagtcttggctatgtcaatattgaagtcgtaacgaattctcaagtttttctaatttgttataaacaaaaaagagttgttctaggtttttattttacaatcactcaacgaattttattattcataatcttgataaacttgctctctcaatttttataatgggagaatttgtggccaaaattaccgaagttgatgtaaggtagtgtttggttggacctgatgaaatagaatggaaagaaaataatttttattttattcctttatttggtaacattttatagtgttggaatatcatttcaatagaataatttttctattattttgatggaatgactattttattttaaagtaaaataaaggaaataccattttttaatatttttttatcaattttttatacgttttaaatttaattccattctcactacaaaaaactactacttttagtgacaatataaattttttgtgactaaatgtgatttttagccacaacaaaaagttacttgtgact

SEQ ID NO: 30532 - DNA, 3552 bp, Cannabis sativa
ttttttaaaaaaaaaaaagcaaaaaaaaaaataaattataattactattagttatattttatatttattttattcataataataattaaaaaagtaatttattcaatacaaaaataacttagaaataattgtataaagatagagtgaatttatcatgtaaagacgtttaattctctgttttcgttacaaagggtctgaagtataatttattcaagaaatatacaagtagctaattaccaaaaaaattgatgtctttattttttattttttaaatcaaggaaaaaaaatattaaaatatatattttattatttttttgcgattacatattaatttttttgaaataaaaatatgaaaagataactacatgtattttaaaacatatcatcagtaacaatagaaattactcacaactatctaatatttatacaagatttatatttaactacaaggaatctattagtttcaaacttttatatcatataattttttgttgttaatagataagttctttttattttttgttatacactttgttttcgttatgttttgccttctaaaataagaatataaaaagattaatgatatataaattaaaaaactttacacacataatattattaacgaccatttaagttttaattatcaagaatttattagctttaaaattaacttagataatcattagcctatatgatttttgctaagtattttattatgagtaaataatattagagtccctaagcaaaaaaactcatgagattctatttatgtagcatttatgtacatactacatataatttatcaatttataatttttttaattatattttatatcataataataaatgttggatataattaatcacattacactattttatttattttttttatttgaatttagaataattaattgaaagagtagttatcattagaaaaaaattaaattaatgataaaaaaatataattgtaagaattaagttgtatataatttttggaaaatactaagtatatcactttttcttctattataaaaatattttctatattcaatacttaaagaaattatatcccaattttatatataacaatgtatatacattatagttatattaggtttttttttagaaaattttaaataatttattgtactaaaaattaattaaatgtgtataattctttatatatacatgtgtgtgcaacttgctattttgaactttattttttaatattataaattattttaaaaaattgaatatctgttataactacattatacattgtcataaaaagaataaaaatataatttttgtatatgttgaaaaaagaaagagctcctacaataaaagtcaaaatgatactcttacctaaaaaaatttctatagtttttttatatatttaaaaacaatcgcgtaaaacacgatttcattttctagttatataaataaaatgaggtagtgtaagagaatggaggctctttttgggccatgataagacggaacaaagatcaagaatgaataagggataaaaggttctcaaaaaataaatttttgactgatttttttattaatgataaactatttttggtcaaaacagatattaagacaaaaatataaaataaaaaattatatgaaattttattaaaaaaaaaataagaaatatacttgattttttttttttttaaaaaaaaaaaagttaagataattattaaaattaacataaattaatgcaatttttttaaaagaattattaagagtgatttttttttatatattaaagtacatttataattttataagatactaataaatttttcctgtagaaataacttcatctactgtaaataaaactagatataaaaatttgcgtcaaattagatctctatttaaaaatgaaacgaagatgtagcaaaataaaaataatagaggaaaaaagatcttttgttcattgtcaagtcagtagtatttaaattcaaacacaatcatactcatgtaaataatctctatgtgaatacatattgcttcattcaaaatacatctaaataaaaaactgtattacattaaactaaatcaaaatgggtgtcctgtgtgtcatttatattaaaaaaataagtttacaagagagatgtcatctaccatttctcactctctggtctaggagtgtcttgtgtgttggtgtactctgtgtatttgtttaggtcctatttctgtgtgtctttcttgtggttgttggtgtgatttttgtggtgttttgttttttctctggtttgacttttcattggttttcttcccttccatttcccatgctttattcctttcttggcatgtgttttctttgtttgtggctgtcgtgagttggtagttggtcctaggtggttggtgtgtgttgcacgtggagttttattttttgtttcctttggttaggttggttggtggttggggtgtcatgaatttagttaatgttagtcccgaggccgcgagcaataagtgtgtggcctttattgacaccactgtatgattggacccctgtacaactactgtgtctaaaattgtgaaattttgtgttgttggctttgtggtttcctagaaacctgtgtttgtgatggatgttaaggcttctactgctaaagtttggaagagacctgttatggtgtctagtttctcccctaagtctaacaggtccttttccttcaaatttggttttgaaaaagaggtggataaggtttgggtcctggagaataattcttggtgcatcaatggtgagcgtctcactcttaaagactggaagcctgatctgaaccatgtgagttgtgttgctagtgaaacttctttctggatccaaatccatcaactaccattggaatatttttctcataacaatgctttaatcttgggctccctcggtggtaatgtactgagagtggattttgatgaggaaagaccagtgtcatgggccaaatggcttagagttaagattgtgttctccactgtaaatcctcttttcccctggtgtttcctaaagaaactaaatggtgacaaagtgtggcttcattttaaatatgagaaattgagtaacttttgctattgttatgggagactcggtcattaaagaagagactgctcgctgaaagaccccgtctcggtctcgaaccatttgggtatcctgttcccaatgtacggtccttggctcacgacgttctcctgcttcctcttttgtttctcgggtgagtctcgtgagtcgacgcccaatagactggcacctattagaggcaatatcatcaagctattacatctctggcaccgacgacaagatacacaatggttgtggctagtcgtgcttcaactattgctggtccaactttggcccctagttcgagaatgaaagtgaaaaggactgctcagtcttctcaaaagttagctgcagtttcaagaaaaatttgggtccccaaggtgttgaagttggcttcaggagctattcctagtctaaatggtgttttcaataatctgcaaatggaaaggagcctgcacattatcctgatttaggggaaggtc

SEQ ID NO: 30533 - DNA, 2576 bp, Cannabis sativa
  modified_base (1974)..(1977): a, c, t, g, unknown or other
cttgtttggtataatcaaagagtaaaacatattaaatcatttattactctgtttaaaatatttatacatatatatagagataatagaaaaatggtacaagtgttttttctctttttggcggtggatgaaataaatctgatgataatctatggaactaatcctacttgcccataattttttttttaatcagccataaattaaattaatatatatagaattcattctcttgaatcatacctatttttaatatatattatgtctaaaaaagtatgcattaactaattttttttacaggtgcatcaatttccttatgcatatagattaaaacatgttgctttaggtaattttaattgaacatcattcacaacattgcagaatccaaatctagatatgaaaatttacagaattatatgtatttttatatatatatatatatgagatgtggaaataatactaagtatatattgcattgagatcctattatttgatttatatattggtattaagttatgccttccaacttccctagaaaaataaaaggcacgcatgaagttctcaaacaaaaagatgattttcttttttgaaaaaaaagttgaagaggttttttttctttctgaaaaaaaaaatgaaggttttttctttccaaacaaatcttaatagagaattaattacgaagacatgtgtcagtttttgattattgggacagaggatttcaatcccaacaaaatgttaacttgtaatttactatggtgacatgtattttaattaaataaataatatttgaaaaaaaaactaactattgcatccgtataatgtattgtatggcatcctaaactgcctgtaatatagttcttttaaataaaaaggtctccaaaaattattcttcaaaagttatctgtctctcggaagtatgttcccgaacagacctatcaatctgaaagaagtcctatgtaatgatagttgacatccagaaagaagttttcggatgactttcatgtccactccgagtgtacagtaagatattcttcctagaaggaagtcttggatggttgagttcagttttctctttcctatccgtgatgctcctttagcgagtgccttggtccgcagttccaaaagccatcatacaagctcctgaatgtacacatacttatgctaacgttgagacctctctaaaaggcgaatgggttaagttgtttattacctaactaacttaacaacctcacttcttgcaaccattgactttagaatcttgatcttaaacctataaataccaccaacacttatcatttcaaacagaatgatcaaattgagttgagagttagaaagagaaaatatttagaggtagaaagagaaaggtacaaagaaaagagtgagtttggattttgtatgaaaaatcttttgtagatgaagaaccactacaagagaaataacttttgatggtgagttttctcgctggaaaactaggcataaatcatcagtattattttgtcagcgagcttttgtgctggcaaaggttgttgggtttgattcatcaacataaggcgttttgccggcaaaacaacttacatcactggcaaaatattttatgtcgacaacttcattggccggcataagtccttccgtcgacaattaggtgtcagttgaggggtccttgatatgaggttaaaatcacttgtcgacaaaactttcgcgccaaattatttacctgcaaaagttttgtcagcgtagcttacttcatcagcaaaactttccaaaaaaactttcttttagttttgtcggtgaaatatacttcgccagcaaaatgtttttttttttaaaaaaaaatagcacccgaatttaataaaatagcaacaacagattcaataagagttttatttttttttcttcagttctgccattcattttaggttaataagtcttatcgtgtaagattccatgtgagttataaaattcaacaaaagcagtggaatnnnnttcagtgcctctatcgctacgaaacttcttgatctttttactaagttgattttcaatttcagctaccaatatgtcaaacatatcaagatcttcacttttattttttattaaatacacataggtaaagttagaataatcatcaataaaagtgataaagtagcgtttactatttttagtcaaagttcaatcaagttcacaaatatcagaatggattaaatctagaggctcagtttcgttttctatcactgatttatgtggtgttttagtaatcttggcttggctacaaaatttgcattttttaaagtcatttaaagattatttaggaattaggcctaaattactcatgttctttattatgtgtttatttacgtgacaaagtaaaacatgacaagtattaaaagaacacaacatatacagagaagcattaactttattaacttgaacattcaatttaaacattccctcagttgcatgccccttccctacaaatattttatttggttacagtttacaaatcagctcctatagtctgtgtgaaccctatcttgttgacaaggtagcccgagaccaaattcttcctcatctctggagtgtgcatc

SEQ ID NO: 30534 - DNA, 1489 bp, Cannabis sativa
  modified_base (966)..(976): a, c, t, g, unknown or other
  modified_base (1155)..(1155): a, c, t, g, unknown or other
  modified_base (1457)..(1459): a, c, t, g, unknown or other
tttacaccaaaattaataaagtaaaataaagaagaaggaaaaaaaaaaagacaaaattttggtataataactactaataaaatctaatcatttttacactgattttgttctctatttatagagaaaatattgttcataaagatggaattttggtgcatagtataatggaaaaagtggcttgaaaaactgaggagatgggagacgtgatagacacttgttgtgaggagtggtgaaatatgtaaacagttgggcgcatgtgagatagtgagatcattgctatttcttcgtttggaccaactgaatacttgaagccaagtgtagagtctttcatcttttatgatctagtccatatattgagcacattatatacatatattgagcacgtagaaagccacgacaaagtggaatcaaatattggatttgaatccattgtcttgactagagatataatacttgggcttgcatcctttgttcatttttgcaaaaataccatccattgagttggattttcaagctccaaacatgttactatttattgactcaaatatgaaaataacataaaattaaaataagttaaatattttcaattaaaataattttataatttgaatcatgaaaatatttaattaaattaattttatatacacaattaaagacttaaaatgtacaaatttgagtctttatcaatggttaattattttcagtataacctcgcactactataaaaatagtttttctcgacgtttttaaatagtcgtttaaagtattcccgtcggtttctataaccgtcgcctatacgaccgtcataaaatgggtaaaataggtgaccatcgttaatgtagacttccaacggtttaaaatcgtcgcctataacacggtataggcgatggttttaaacagtgtcctatattgtaggcgacagtataggtcactgtttgaaaccatcgcctataccctgttataggnnnnnnnnnnnaaccgtcgggaatgtaaaaaaaaatatagatttttcaatcattaatggcagaaaaatttgtattttcccttattttttttcctgcattagttttataattttacctaaattataataaaataactaattaattttattacaataacaaaataagtatatataataaataaaaaagtatntaaataaataaatgtatttatacctagctcggagagagagaaagagagagagagggagacggacgtgaggtggtggtggtggttcgacgtataagacggagatgagagggacaccgacgggaggtggtggtggttcgacgtatgcgacggagagtagagggagaccgacaggaggaggggtgggtggggatcgatggacgagagagacgagaagaaagggagatcgagagagggtggaagacgacaagagaggagggtgatggtgcggaggcgtgggtggggttttggagagttaagatttnnnttttagggtgtgggaaatggagaagaaata

SEQ ID NO: 30535 - DNA, 1247 bp, Cannabis sativa
cctagtggaagtggtaacttggagtcaattttgttgagtcattcattacatgaaaattttcctatattatacaataggattttttttgagaggtatgaaaaggttagttttatttatatagtagacaagatgcacaacactctctgtttggtttatgtcaaacagttgttatttcaactacaagcttaaatgtacaatggtcccccaaacaagatccttttttgttttcttagttatctctatcatcttcatccccaaacccaaacccaactccacatacataacatcacataatataataaccctatttctctaacaaaataattcctcaaaagaaaaaataaagtgaaaagtggaagtacactacacaacatagtgggaatcacacataaaaaaaaagacttaaaataacttcatcacaatctttacttgtttggacagctgtccttactccttattgaaccaaaaagtgattagggtgtatgcactattggttactctacacactataccattgctcttgatttttaaggcctttttttggtttgggaacttttgaatgatggacaactgtaactcttcattaataaatacttttctttttttttttttttatgaaaaccaacttgaacttttgcttatttatgatttctcccctcaatacaaaaatactttattaaattgcattaccaagactttcctctttctactcttcaactctatgcaaaaagctctaatatataatgtattaaatttctcctttttcagaggctttttcatgcttcacatgataataccattaattcctcgacaaagtgcaaataataacaggcacaaagacattggtctccatacctaagtttagtgtgtgtgtgaccatacccatgtttttcttcttctttattcattattaattattctcttacaaatgttgtccatacttcatttctagtttcatgtgtgtttataatcattataaatgaaaaacaaaaccaacaaattggagctaaggtattcattgataaataacacttgagaacttaaccttatgggtgatctaatcaatatattctcaaaatgaactcttaccaatgttaccatgcaaatatgttatttatgtaaaatgtcaacggttgtaagttattaaagtattttaaatttgtgctaaacaaaatttgttaagcttgtaaatagtagaagtggttgaggttggaaatgtatatacacttttatgttgtcttttactt

SEQ ID NO: 30536 - DNA, 1800 bp, Cannabis sativa
  modified_base (31)..(37): a, c, t, g, unknown or other
  modified_base (1402)..(1405): a, c, t, g, unknown or other
ttctgaattcaaataaatcaacataaataannnnnnnaatatcaataaataattttcataactaaaccctaattatatggtattttctaaatttaaactatgcggtctttacaatatgtcactaaaaaaccaaagcaaaaaggcttttatagcatgttgttgctacttttatagtctgacagtgcatgactctaaaagcttacagtgacgtgcattgagagattctaaaagggtttagtgatccacactgaagagtcactaaatactgtctttccagtcagccacaatagtgacgcgcagtgaaaggtcactgaataggtttagagtctctcaatggaagtcactgaaagccatttttcaagtagtgtatgttattattttttctaattcacaaaatacaatgaatttaatttcaataaaagaggaatataattaaataataaatgtactttaaaaaaataatgattaattagtatttttttttcaatgaatgattaattagcattgataattaaagaatataataagtaatagaatattgccatagtagttaattaaattgaaggaaattttgcactttacacttttttttatctaattataaaaaataatttggtcaagcatcaataatgttttttttgtttgagtttgtttcaatacctcatttataccctttctctctctctctctctcttccctctttaaatataattctggtcacgttgttacttagacgagcctaaaaaaaccattgtgatctgctcttcaatttgaagatttcaagatgtgagaaacatatatttttttcgttgtttccaaaaaagaaactattttgattgctaatatagtgattagttactttttttactttttaaaaatcttagttgacatttattttagaattttattaaatgaaacatattatataacaagataagtaattagctttcaaaataacaaaaaaatatattaaataattggtatataaaaatggtagcttgttatattacatgacaacttgttagttttaaaaataatttttaaggtaacctaaatatatcttatattataacctaccataatataacttaaaaataactaattaattattaagttacagattaatctctaacctcaaaaattggcggtaatagtccccaaagtcacattttctgtaagtccgttggtccccaacttaactgaaccgtaaacacaaataaaatgccacgtgtcaatttttaattggtctaaataataatttaactaaaaaaaattaaaataaattaaaaactaaaaaatttaattaaaattataaaaatatattttttttgttctacttcgtcttcttcacgcatccaagccctgccatgacctcaccataacttctctctctctctctctnnnnctctctctctctctctgtgtgtctctctctctctctctctctctctctctcttccttagcatcaaagccctaatttattttttcagactttttcatctctttctcgtcactgttgagtagaacagaacacactaggacaaacaaaattgggaacgatagcgggcgggctggagctatgggcagtgggcgaatgggaaggagcttcggatctcaactcgaaacaccttcatagtcgcgcaatggtccattatctctttccttactccttttctttcactcgtcggtgccttaccctcctccgacgactggtgtttcttgactgttcgtgttcgacgagggctggagatctgggcaatagatgattgcgaaggagctgttggaaattattttacaag

SEQ ID NO: 30537 - DNA, 6716 bp, Cannabis sativa
  modified_base (4499)..(4507): a, c, t, g, unknown or other
  modified_base (6531)..(6539): a, c, t, g, unknown or other
gataaagtcaatggatctttttgtaattattctgttacgagtgatcttgtagtacgtattagacacttgctatcgtttagtcctacctgtatactctcttatgtacctcgtgagttaaataaaatggctcacaattgtgctagggcaggtttaggactagatggtgagtatatttggaatggctgtttgccttcctggctttcctgagggttcttgttgttttgtatttctcttctcaggttataaagcacctttttcaaaaaaaaaaaaaaaaactcatacattctgaaataaaaattaaaaccggcagtccaaatatttttttttgcctaacatttaatataaatgaataaaataattattattttaaaaaaataaaccattactgtagcagtgtaaagtggctttagtgacacacaatgcgcgttggtacatattttctcagtctctcctagagtgactttataggtgaacatttttaattaaaaaaaattcataaaactatgggcattaatctttactgacacttctcatttttagtgactcaaattacaggatactaacatcgaattttagagactaattgtgtattttactaaaattactcctaaccttttagtgacccgcacaaatgtgcgagtcactaaaaggaaaatttgtagtagtgaattatcacctttaaacaaacactttgtcagaggaagagattattctaaatataatctaacatttatcaaatatgttcacaacatggttctaatactccattgatcctcctagatatcaatcttcaagaatagaacatcatacaattttcgctttaatctctataattctcaataattttctttagctcttaacatcatcatagccaaagatatcaactttgggatttcacaagattagactattctttcgtatgaattccatatcctaatttattgtataaattgtctacactaatagacaatatattgactcagtatgtctaaccactactactcgatcaaaatcataagatcccacagtacataattcatatttatgtctttctattcctcctatgggatctcctaagctgatctattgacttaacttaataacaagttaagtattcgtttctgataaatattcaattagagcatttcttatttctgcttactaacatatactcatctcgataccttgtaaatctttacttgttaacacatcccttcttcttaataatctctagaacgactatcgattctgcatcctaatatgaatctttctagcgtactttatccttactcgtgcgcttttcgagatgactccccgaaagatttcccatcttgagatacctcaagttaagtatgcttaactccaaggtaagctcatggtgggttatcagaaagtagatgcttctttgccattcctaattgtatttcttaatttcattctttcgttagtaaaaattcaatttccatcactcccttcattagcctcttacaattcctcatcgattttgttcacataactatgaggaaattccactttattatcaacttcaatcttgttcatctccacttattttaacttgcatcaatttcctttgaactgacacaacttttaaatttcccaatcacttacaattaaccaccattataaagtgaattaatgtaacatatatggtagaggcaacattactcatatcgggcacccataactaaagcggaaatacccattttctaaattctcaactgataagaattaatcagagatcattccttgatctcaaagtttcgtttctgtatttggtagaagtcttaaaaatcctttcaaacacattcagagatattcatacctcaagtataaactctgttttattgacaatcccttggcatgaactaccatgccaacttatagtgagtcccccgttgatgatactaatttatcaacatctaagactctcgtacacttttctcattattaccactaaggtttttctccctagttcatacgccactattgctcccttgcaatcatcacatcttcatacttggttaacctttctaaaacttattttacactcaattaaatagttcattgtctagtaaacaacctactttgtgattcaccaaccacttgaatacatgccccttaaattgcatcccagtttataagctttttccatttttggtgagcataccctttcatcattacttaataagacaatcttttcttgtaatttcaatagtcaccaaagaagactatttgactttacttatttatttctttgttgttttcaatcccctattgggctagaactggaaaaaggccttaagacaacttacagattgaccattcggtcagatataaaagtattctccatcattaccatatcatcatgaataattcagctaatctcctttaccttagtgataccactactctccctaatgttctgttatacatcacccttgtaatgtcattgcttcaagcctccattgggcattctccccacgaactattggcttttatatataggtacgccactctggctacttcctggattgataactgacccttcaggccaattcgagtgttcctaacgtactttgctctaactcgcacgtttcttagaaaaacttcttgaaatgaaatcaccccaggtcgagaacacctaatcgtaaatttctttcacaataggataccaaaaacaagatacactttgctattataagcggtctcaatctacccattcaagtcatctacaactatgtagcctcatacctacaaagtctcaagatcatcatatacgaccttcccccaggggatatgggattgtacagctcctagtattttccttgtagatcgcggggttctaactgttacagtttaactcatgtcccttttgatcttattttcttctttgttatgaataggtcaactcacaaaatcattgccttcaattcacctagaattccgggcgatactcataaattgtcccacctttactaatactagattacttttagataaaaatattctttactctgaatcaattaaatggatgtctccattggttactcatgtcttatattccacttaggaataccagcaaatttaactcatattgttatttccctaatttgtctaccccgtcagatgagttaccattacctaacatacatgcacagcccattcatatcttttgatgttccctcattgaacatacaatatttaatatcgatgtcaattgaaatagcaattataatattgcccataaaattctaacttgagtcggtcgaaggaccgatacctgagtctccttgagccataactgacacttgggcaagacccgtacacttttcttctttaacgtcaatctttcttaactgcagacatgttcttttcaaatgacccgctacaccacaataacaagatctggctctacattaacccaactggtgccttttttgcatcttgaacactcaggataaggtttccatttcttattcttaccttgaccgctatcctggtcaccttggaaccttttgttctgtcctataattggaagttcatttagttttcacttcttgatctgctcgtaagttggcttcacatatttcaccacatctaatggtacaacaagaagtgtcgatagtacaagaatagatacaagacgagcccgttgttctctcagatctcggatttattttcccttgttgtctaatcatatcctgcatagaaaaatttacatattcccagtattacggcaataaaggattctcttccttaccatttgctccgagcctagacagctcactgattaggcaatttgattgcccttattgcataacttgtcacacatttaattcacatcttccaaggatttagaattgagacggatatcaatatcaatatgcatatatcacatattcttatcataatcatcactatactacttttcccaacatactttataatagtctaggcaggtaatctaatagcaaacaatataaatacttactataccatgagttgacttttcttcacaacaaatgtacatattcgaccagtcttaacgacctttaaaaccatggctgctctgatacaaagttgtaatgccctatagggacgccacgtgtgtgattttataaaccagtttaatactaatatattcattaattataaaaaacagtgataatattaaaaatttaactaaaataaaatactaaaaacatatattacaacggcataaaaagcatgttccggggatccctgttataaatttttttcacaaaagaactaaatacaacgatgcctcaaaagcataaaaccaaaatatacagtagatacaacccaaaacaactcttcacaacccggcacgtaagctgatgaggtcaatatgtacattgttggagaagactgtcacctcatgattgatcctgtttttctttgcctttacctacaccatatagcactcgtgaatcacaaggactcagcaagaaaagtannnnnnnnnatcatatattttattattcaaatattattatttatacacaattagaatcaaaccgtcacgcattgttcataaaataaaatccaaatcactactggaatctaccacgaataagcatcagtatacaaatatctagtaatacaaaactattataccaataatagaaatcatattcatttaataatataaattgtattatatatgatacctcataaagtaatcatctttattacatcacattgcctaatcagacaagttgatgctttagtctgataaacctatattgcattgcctaatcaggaaagcctgtgccatagcctggcacccacagatcacataattgcatcacctaatcaggtgagcccatacctatgctcaatactcatatgtcactaaatctcattcctacgtctggtacgttgtcaggaagaaaccctacatcgatttcaatctatgccataacctcgcaattttcatatcactgacgtttgtatatacacgtcgctaggaggaaaccctacaacgatttcattctatgccataacctagaaattttcatgtcactgacgcccatctctacacgtccccaagaggaaaccctacaacagtttcattctatgccataaattgacgattttcatatcactgacacatgtatctacacgtcaccaggagtattgcatcacctaatcaggtgagcccatatattatgctcatagtatcatcacaatatcattgattagccaatcaatctttctgttatataacaataataatcatgtctcaatgtcaatattaatcaattcataacaatattagttgtattacaatacaacgtagtatgcagtacaatatatttttcttacctttaatacaggttcatacatgtcggtcaacccaagtggagaattatcctcgatgatcttggacctatatcacaacaacagtaaatcagtaagtgtttatccaaaaacactgcttactatacataagacaaatctaagggttttctatcaaaccctgcagtacactaaaataaaacttatgttttggctctaaaatagactccatattgtagagctcgtttcaagcttcaaaacggtgtatagaacgtccaaaacggacacttaagtcaaaagttatgacaaaaatacgatatctgatatcttatgaatttccaaaaactatgaaatacgaaaatctcaaatttcacactcaccgaaacactaccaaaacttatccaaatcacttcaaattttacaggacacatacataccataaatattaccatcctcatataacaaaaattaaaatcgagcccttaaataaaaaacgccattaacattcggactaagctttaaaaagttccaaactcagtttctaacccaaaatcacctcagtttcaacaagaaaatatcagaactagttccatgactacccgagaacaatcctataaggtcagaaccttcataaccattctaattcacaaaactcctatatgaaaccaattatttttaaacttaaaataaaattaaaccataccttaagctttccctcttcaaggatttgctatcccgctactaccagagcttatatcgctaaatttcgagttgaaaattgaagaaaatagatatagggggagaaggttttgtcgtaagagagtaaatgagagttcgttcgttcgttctttactattatatgtataacttaatatatatatatatataatcaaacgaaacatatcagttgcatttatctataataataatattctaatattaataataatattactaaaaattttattattagtagttattttattatttcttagccattaagaaatttatatttctagggtatttggccaacttcgagtatcccaaaataattcggtatttctaaaattaacttatcccaataaccccatcaatatttctaactaaaactgttgtgacatttttagcctctaatcggttctccagggttgccgaacctgaacatatttttatttcacaaataactcnnnnnnnnnccacgtatttcaaataaatctccgtaattaacaaattacgcttatttatccacttatcgagtcttcaaggtcgccgaatttgaaaatgtttttattccacatatagctcatattacattcacacatgctataaatctctgtaattaacaaattacgcttatttactcacttatagca

SEQ ID NO: 30538 - DNA, 1072 bp, Cannabis sativa
agagagagagagagagcatgtgatgtaaaaaggaaaacaaagaaaaaaaactaaaatttacaaaaaatgaaggaaaaacaaatgtggaagagaagagaaacccaagaagccatgtgcatttgagaggtcaaaaattaaaattaaaaaaaaattaaataaatattagagaattcatttcttggccctttttaagatgcccacattttaatttttaaaaaagattaaaactttaatttttattgtagagaagaaagaagaaagattgaatttttattaaggttacatacagagttttctatattattaattaatctcatctcatctaaaaacatactttctctctccttaactctgtagatgtagattgtagagtgagtttttagagagagaaagagcaaagaattgtttttttggttggagaaagataagagcattgatattgggagaaatactaaactgcactattagtatttagcacaaaatcaatatattaatctcgttattagtttaattaagtattgaattctatatggtttaatataataacttttggacaatatcactagctaatcgcaaggtaacatgtttacaggtgttaggcactactggtgtccaatagcaatgctcttgttattagatattaatggtgctcagtagcgtcttacaattggttagcgatattttttaaaagttattttcttaagcaatagcaatgctcttgttattagggatcaatggtgctcagtagcgtcttacaattggttagcgatattttttaaaaattattttcttaaggagaaatgctaaaaggtaccaatggtgtctaatattttcctatcaacattgtaattggtataactaagtatcgagtcttatatgatttaatataataacttttagggagtatgactagttaatcgcaagtgatatgtctaaaagtactaggcaccattaatgcctaatagtaatactctttcttaaattatatagaatttgatactaaattacactattaataatataacattgaagaaaatattaaataccaataatattttttaacaaatatata

SEQ ID NO: 30539 - DNA, 1305 bp, Cannabis sativa
taaatgcgagatgactgttcagataggatatgacacctccaggagatgctttgctttgctctccgggagtatgtgcaactcacgtgccttctccgggaggcacgtttgaggctgattcctgtggctaatgggacttagctgaattatgtaaacattaagccctttcagtctacgtttcatcatccagttggtccacgtattttgggcaaaatcaggggcaacaaatgtagtatatgaaacatgattatcgattagttgaagtgtcaatcccacatgaaaattgttatgagaagtgtttttttttaaaacaagtagcatttagtttctgatattaagaatattaagtttgaaaataagaaaaaaaacgtaatgcatctggaccttccacttgtcaatatcacttgtcaatatttatgaattaacggaagtggtagtaatgagtgtaagagaattgtaatattgagtatttttgcctctaaaaataaaaataaagtatttacgtatataaaatctaaaatattaaatatttatgctacaatttacccattaccaatatagactttcaacctaacttaagtatgatttaaggtgaaggaacatggtcatttgtggttcccttagagcatctctaatggagatgttatgaaggatgcttgatgacatggattaatttttaacattttttaattgatgcttaccattaaaataaaaaagaatgctacaaaaggatgtctatcatagtatcctttacatcttctctttctttttttttttttttgttattttattataaagtaaaaaaaattgtttaatatatattacataataatataatattattttaataattttaagagatatttattattggatcattttagaacaaaaagtgtcaaaaataatgtgcaagagataaaataaaataatatatttttaagtgatatgaatgtttttgatactcgtaaataatgctactattggagatacatggcagccaaggggagaccgttcaattaatttttttaattatttactagggaattaagccgcactttgcgcgggtttgattatatttttgtattttttattgattgcttaatataatttaaaatataatattttgaggtacgaattattaataaagtaaaattagtaaaagaaattaaagaaaacaaaataaaaaacattaaaaaaaatcctagagacgtgaaggctaattttctaacaatctcccattcaatctctttatttgcccatattacaatggcatatcttaataaaataaaattaaactacattatactt

SEQ ID NO: 30540 - DNA, 3590 bp, Cannabis sativa
attattattaatgtaattaatattctttttttcagtttttttttttttttttttttttttgaaaagaaaattagttttattaaccttcaaattcagctaccaaatgaggtagaacaacagttgggcattccccaaactgaacatacgatcaggataacaaatggaagctctagcaaaactatgaggtaccatattggctgaccgttttacaaaacataatgagacatttctcaactctttaagcaaatctctacagtcacgaattacaataccaaaacaagataacatttctacttgactgcgaatcgcttttacaatcgtaagacagtccgtttcaagaaagacatgctgccaattttattcttaagccaactcaaggcctctctcatacttaaaacctcggcaaagaagatcaattgattgtgtaaatattgggctcttatgcgtgcaagaagacccaagcgatcttggcagcgactctgcaacccttccatcagtcaaacaaccagcttttgcccttagaaggatcaagtaacacagcttcttctagtaagcctgaaacaacgaacactgaaataagttacaccatggaagaaggtcgatagtgtgccgtgaaagaagaatccaggtgtgtcttatgatcgattaattttagtaacaagtctttgaattctttgtcaagcaatcatgtattatggattctactttatatatttgttgttcttattttcttttagttttgtttttacatttttcaaagatttcttttaagcatggtgatttttaataagagccgtctctattgtatatccaaatcagttgttctttatccttaagaggagatatacttgttaattactatcacaaagttaactatacagatgattttgctataaaatagaagtacaaacacaaaaatatatattcatcggagcaagaaatgtgtacaatgtaggaaggtgtacatgatcaacggccttcatttatggtatttgtcaacacgttttcagagaattgttcagtacaaccgtcataagaaacagagcttttcaacacaaaagttggttgttggggacttgaaatactgccaacttgatcattttcaagcatggagactgcatttgacatgatcggacgatcagctgggtcatcttgtacacaaagtaatgcaaccttgacacatctcaagaattcaatttcgttgcaactctcccttaatgttgggtacatcagatcaagtgcattgttttctttccataatttccatgcctgcaataccattaattaattagttaattaactagagatagagaataatatcaacataaccacagagaccataggaaaacagtagactttggagaaagcaatacttacataatgaggaaggctcatagctaattctgattgggaaaatcttgtgttttttcttccacttataatctcaagtatgacaacaccaaaactgaaaacatctgatttttctgagaataatccatataatgcatattctggagacatgtaaccactacaaatgacacagtatgagagaatcagtttgttgaagcattcagataagtgattttctcatccaaaaggtaaaaataaataagaacttactatgtaccaacgactctgtttgtgctcgcctcgatttgtttacctccaaaaatctttgctaatccaaagtctgaaacttttggattcatttcctcatcaagtagaacattgctagatttcaaatctctatgaataattcttaatcttgaatcgcgatgaagataaattagcgctcttgcaattcccaatatgatattaaagcgaatctcccaattgagcaactcacacagcttgtcatcttgattgtccattttaaacatggagtgacattttaaagttagaagcagtagtttatcaaaataaatattcacaaaaacattggctaaaaggacttaccgaatatgaatgtgtccaaactcttattgggcatgtattcgtaaagcaacaatttttcatctccttcaacacaatagccaacaagtttaacaagatttcgatgctgaagtttggctatcaacaatacttcattcttaaattcttctaatccttgagttgaaccactcgagagcctctttatagcaatttcttcttctccaggaaataagccctgcaacaaagttttgtagcaaatataatctgttacctttcagaatgaaaataaatgttagctagtactactgtaatgtcaaatgattaccttataaacagggccaaatcctccttctccaagtttgtttgcctctgaaaagttatctgtagctactagtatgctttccagagttacaaatggaatatgtatgtctctcttctcatcttctccgaattggtattggcctgaactcgaaagtagcaagtttgagacatgcctctcactttcatccgcgctgactatcctgtttatctgactgtttctcctaaaacctgaattgaaacataattatgaggtcaataacataccactaaaaattacaataaacagatagaaagttaccaacatattaccatctttgttggccatctttcttcttctcatatagtataagaaaccagcaatgaaaaagatgagcaccgcaatgcagacaaacaagataacatagaacttccaatttcgtagaagtcctttatgatccgaaacagcttgtcgaacaaagagagtctttcgattgctgtcaccgactccaagctgcaccatattcaacacatctcctttccaaattgaacaaccaagggtgtcataagcataagcagtacaagagcaattgatcaagcatttcgatttgcattcatctgaactctttgcttccagagattgtttattttcaggcaacagcataatatggatctccaaaaatgtatctctctcgttacccttagtactaccattaatcttctcacactgcaatttagtatctctaatgcaaccacccgaatagtccttcttggaatcccaatcaattggggactttggcttaaaccctttggagcaactgcaatgaggcgacgagttttcattgcagctaccatatgccccacaaaagccatagacatcacattgttggctcggaaatgaccaaaatacagtccatgggttaggaggcaccagattaaatatcttaacctgtcccgaaacatctatttcgagatgagatatatctacagaatcttctttgatggaataagtgaaatagctttcgtttgtattgttaaccaacttgtaatcatagatatacctgaacttcatcgtggggtaattgctaaaagtactactgctccaagttccactatcccaatacttttgagtcctactccatagtaacataaaagtgttatcttttggatcaatctcacaagagaaaaggcctggagcggggtcttcagagttcttccatgaagtgataacctggctagtgttggttattttgttatacctaaatttagccccaggcagccacacatgagttgggtaatcaaaactttcccacaatgattctgatggacctgttgtagcttttaagacaaggttgccatca

SEQ ID NO: 30541 - DNA, 2865 bp, Cannabis sativa
  modified_base (2679)..(2679): a, c, t, g, unknown or other
tacaattgtgcttaaaatttgacatgcatgcaggaaaaatgcgctagatgttgctgcaatcggttcccttgttgagattttaaagacctcaaccccaaatttacagaggaaagctgcttccatccttgagttcatcgcacttaataactcaacaaaggacatggttctctcagtggatattgaatctggtctagatgttgttttccagcaaaaagttctgcaaggtaaagggaacattttattgaactattggttttgtgaaatgctttgtttcatctatgatgtgctagtgtcatgtttcatccttaagaattaaaatgggatcttccgaaatgtgctttacttgtactttcatgatagcttcttctaccattgtcaatatgcttttatgaactactgttgatatcgtgaacttcttctctgatatttggatagaataactctgattgcagctacaaattttatctgaattcatctatatatggaggttcttcttctctagttgtattggtttttcagattagtcaatgatggcagatgcctcaaatgttgactcttcctagctactagtacaattttgttggtttagtgtatctgtttccttgaaattttaattgcttctttgtcattttattttgtaaagctggaatttttctcgtcggtacaacaaagtaagacatattgaatgcttgcccatattttcaatttcttgtttctgttgtacttttgcagacacagattcagatttggagggaaaagagccagaaagatatgctcttgaagttgaagaagcagggcttgcaatttctgcagcctctagcttactaacaaaactactagacttggatcagtttagccgcaatataaactcgagctatttcaccaagttgttgcgcgatatcctcaagtctagtatacccctccattgcaaagattgggttgctgcttgcttagtcaaactcagttctctttcgggtcccaaaccgaacctcgatgatcctatcaacatggaggtaaccctgtacgagacaataccaagactcatagagcaactcaaaacatcagcctctctacaagcgaaagaagcggctgtcatagaactcaacagaataatctccgaaggtgtcattgattccacccgagctgttgcttcagagggagggataattcctttggtggagttactcgaagaagggagcgagaaggcaatcgaagcaggcttggcaatactgtataatctgagcatggacagcgagaaccatatggaaatcattgctgccggaactgtgcctgttttgaggagaattgttctatcgcaaagacctcagtggactcgggctctacatttgctgaggacattgcccacatgaagagactttgttataaaatgactgctaaaagttaaaacaatgtagtgaatttccattgttatcatttttcacattcctatagatctaggatcatacccttttgagcaatatacaagaaaatccaagctcaccttttttattttctatggaaaggaatctatgctcacttttgttagctgtaaatgattgtgttgtttaaccacaaattacaaaagcatgtcatttctataaaattacaatgtctttaaaccaaattcaaaataccctcctaggaataaaatgatgagatgaaaaataatctggtataatatagtcataatcacattcatagtcactttttctttaagtcctaaacttttcttgccttaaaaatactctccaaaagaacacctacatgacacaattgtctgtgtctcaaatcttgctccttaaattttgaaatgtacctgttttttaatttttacatatactaaattgtattttctaaattttaacatgtatcgaattgtgtcttttgtactaatgttcatgtcaagaggctatttgagaaaaaaatataacggtctaatcagttcaacacaataatttaataaatattaaagtttaaaaaaacatactaattagcattgattaattattaaaagcttcttaattattatattcaagcacaaaaaaattaaagaaaataagacatggtttagggtctaattcttggccctttttttgaatgaaattcatctttatcaaattcgaatttcagctaccaagctaggcaccaaattagttgggacttccctaaactgaaaaacacaatcagtatatgaactagaggccctggcgaacgcatgagctactgagttcgttgatcacttaataaaataaatagaaacatttctcatagtagcaagcaaattcttacaatctttaataaccaaactaaataaaaaaaaaatcatactcactgaactgcgtatgacttgaactactactaagttatccgtttccaaaataacatgatgccaagagaaaatctataattattatttatatattccattcgtggaaatatataatgatcttattttatatgtaccttctaaagggtttttttagtacatacccttatttattttgacattcaaaataatttttagtctaattcttttttaaccttaaggtatgttatagttatttaatactacacctaaatttttaaagaatttaaattaatttacaatactaaaaataagatttatatagacgcaattttttgtaggagaattactgtatatactattttttttttaantttacgatttgggtttctaaagtatttgcagcgctagttgcaataggggtttctatataattttttgttgcaatttaagttgcagtgctagttgcaatagcggtttctatgtagaatttcgtaaaaacgcaaaaaaaaaaagaaaaattattttaaggtgtcaaaataaaaaaattccattatttt

SEQ ID NO: 30542 - DNA, 2272 bp, Cannabis sativa
  modified_base (726)..(726): a, c, t, g, unknown or other
tagccaattgcaagtcgacacatttagaaggtgctaggcaccactcgtgcccaatagcaatgctcatatatatatataaatattctatcattatcttttgcagcaatactcgaacccgccctttttataaatttggtgttttgagtgtcttgctaatttttataattgatctatatgtaaacctatacaggctcatttgctatcatggttgggttccttgcaactatttatgtgtgtcatttagggaaaaacaagagacaaaatggactgagaatcgaaaagtttttggaggactacatagcatttaaaccatcaagatatacctatgccgatgtaagaaatatcacaagtgagttcaaagacaagttgggagaaggagcctatggacaagtatttaaagggaagctttctaatgacatatttgttgctgtgaagattctgaacagtgtttccaagggaaatggtgaggatttcatcaacgaagtagcaacaataggtcaaattcaccatgttaacgttgttcgtttggttggttattgtgctgatggatttagaagagcattaatatacgaattcttgccaaatgactctctggataagtacatatcaatacgagggccaactgatattaaaatatgttcacttagttgggagaaattactagatattgttttaggcacagccaagggaatcgagtatcttcaccaaggttgtgataaacgaatncttcattttgatattaagccccaaaacattttgttagaccataactttaaaccaaagattgctgattttggtcttgccaagttatgctcaaaggatcaaagcatggtgtcaatgagtactgctagaggaactatagggtatattgcacccgaaatattctctagaaactttggaaatgtctcttacaagtcagatatttacagttttggaatgttattacttgaaattgtaggaggcaaaagaagtaacaatattacagaagaaatttactatccagaatggatcttcaatcttttagaagaaggagaagatctgcgaatctatatcgatgagggaggagatggtaaaatttcaaaaaaattagcaatggtaggacttcaatgtattcaatggcatccaatagatcgcccgaccatgaaagttgtagttcaaatgttggaaggaaatgaagagttaagtatgccaccaaatccattttcatccacagatctatccaaacaaaataccaagatgccacagaaatttatgaaaactatggaactagaaactatacttgaatgaaaaaagaaaacaaaaagtttttttgatactaatgcttttattcggttaaactcacatgtaattgatgtatatttataaaaattactagaaaatatttatattattgacttcgcttttaaccaacaaaattgagtctttaaagtgatagtgattgttaattaattaatgaataaaataagaataggtaatgtttatagaggtttgaccccctgataatggtaataacctactccccttttaattgaattacttatgaagaattactaagatcacgaggtccgactacgtgagattcttagtaatccttgaaaaagcgcactactctctcagaatgcaaaaaatggtccctaaatagtgatacgacctcattatttttagggaagtacagttacatttgtcacaaattaattggagataaattagggagatttgaatatgcaatcccatgatttttactatctaacagatcaatcccatgaaaataagaattctaaatgagctataattgtggagacatttaaggaaaatatctttgaagatctttatccagtacatatgcttctatccggtaaatagcatatgcttctatccggtaaatagcgattgttcggcatgcttggtctactcaaaatacattgagatttgtccgaatcacggtagctgaagcatcaaactagtgatcaatcttagctctgacttgctctggacggtacgatagagagatatactttgtccaagtctaactatgtgcaacacgtgtcaccttgctgagtgctacgtcgcctgtgaaaaatttaagataacatttgccctctaagtctgcgtgataacttttgctcgtgtaggaacttctacgggtgttacacattacttggattggtgacatgtgtctgtgcccacgtgctgatttggacgtgacgcgagtcctaaccgaggcatgtgaatctcttcttgtcccttcagtatctcaataaatgctctatat

SEQ ID NO: 30543 - DNA, 1500 bp, Cannabis sativa
tgtataaacaggttggatttgttttaagtattacatggtccttcaaaggtgccttatttgaaatttgtgttattaataatgtctggtttttctgtaataatagtactaatcgtatgtttggcttggattaggtctttgtttaagtattctatggtcttttaaaggtgccttatttgcaatgtgtgctattagaaatttgggttttgctgtaacaataatagtcgtgtgtttggcgtggttgggttaggtcatgtttataagttgcaattctccttcatttcctactttcatgtttcaaggttccactgccatctcctggttgaaagttttagaatgcttgcctgtcaatgttataccagatacttttctacttggaattgaaagattttatagaattatcctttattgtcttgcaagatttcattagaactcgagtaaagctacataaactttgacaactgatatttgttatcatgtgatttatcagtcctacaatattatgaaatgttaaatcctgtggaatcgagtaatattagctatcaaaccttagattcaggcccttttatgaagtttattgttctcatatggctttctttttttcgaactcttttttttataaattaacatatcactaaaagtggttcagttattttcattgtatacaaagagaatagaaacgctcatcttaggattctcacccctttccctccattctctcctcacttacacacacatattggatcttagctaattaagctagctgctcatatgaatatcattttcgtagctgctcacaaatttaaattgtgtatgaattaatgatgtcaaagatcaccttttttattttctttcctttgcagggatcatttacaagcactggattggagatctcttccaaactaccaagattctctgatatgtacacgcttactattgcaagtgctgatcccaaatctatttctgccaatgaaccagtagagttgacaaaaagtgtaactaagtggtctctctctctctctctctctctcgtgtgcatttatgaatttttgtataattatttctgctttcttctattgtgttaagagctcctaatttatatcatattgtaatttacaggttcacgaaggatggggtattggttgagggcctcttttggaaagatgtggaagcattgatagatcaatatgcgaaagaaccaaaaaagaacaaatgatatggaagctctaaacttcacatataggacaacactggtttgagaagacgagctctagttatagtatcatgtaatcacagatgttgtgcaggaactatctgatcctttacattggttattttagaactatacctgttgaattgaagtttactgtgttttcagaagacaaatatataagatgagttttagtcagagttctcattagtgcaatgtagaaaaggttagtagtgttttttttttttttttttttattatttttattattttttttttttttatttttcatt

SEQ ID NO: 30544 - DNA, 2476 bp, Cannabis sativa
cttagtttcaaaattgaactggagaaaatatgaatgaaccgtccatccaccacacacacaaatgcactaagtgcatatactttgacacccattttatactgtaaaattgtagaaatatccaagtaatcatttttaaataatactggacataaagtacattttacaaataatcaacagaaaataacaaaactaagccaataaatactgcaatttccctataaaccaaaaaaataatacatcctaatataagattaatgcagaattgtggttaggacatattttttttttaataaaaagcataaatagaagaacagagacaggacataggtcttactaaacttaagagtacggcactgatctgagaaaaaagtttgcggttttgatcaacaaagtccgcaagacctgaaatatattcaggaaggttagtaacaaaaacttcgtacagtaacccaactaagtaggtatcctttgtgcagtgtgattttattcttgatccaccagcagggttcaaatgcatcattatatccttcataatagctagaaagaaaaataacaaaaaagcaatgacaagctcacctctgaaggattctcgtaccacctattgaaaagaaggaatttgttagcaaaatacacataaaacagtaaaacaggacaggattcacctctggacaacaagcagagaatagagaagttagattcaaggaaattagaaatattgctagcgataatacttcactttttcccccaacagctcactgtagggaacattaaatattatcgctagcaatataaagtacataaacagagaatatcagaactaatgcatgagtaatgcagaaatagatctcgacaaatcgtctgtagaaagcataacaagttttagatctctataagagccaacaaactgcagtaaaactagaaaaatcaggttgtacagaaaataatttgtcattatttgaaaatagtattatcctattctaaagaatcatcgtattattaaactaaaaagccttactcaaccaacaataaattaaaaaaaaaatactaatctttttaagattatgtggtcatgggggaaaacaatggaggcaccagcaaatttattgtttgcagatactgaaacatagataattacagaaggtattacagcatataaacctacatattgaatgattccaaaagtgaaggacaaaaattattgtaactagcactgaaataaatacgtaaatataacttctttacagatctgcaaagaaataaatcaattacctttcccaaaatcaaggggaccaataatgtcagcacaagacttttcaatagttgcttagtaggaacagatacaccaactccagaagctataaattttgagatagaaaatgggatctaaaaaggttacatattagcatacgcttgtatagatcaactctagaagtaaagttttcaaacaaagacatgagatctaaatctcttaagtaacttattgttttgctttgccacgtgtgaaatgaatgaagcatagacaaaatagtacctctttcctcaagtgattaaataacttacaatcaaaattcctaatagattagagatcacggtcattgcaagagcaagggcagagttccctcctgcgagctgcaattagggaatggaacatttacaaatacttcaaataaacactgcacaagttaggaaaaacaaagaaaaacttggtataagttacaatattagggaataagcatacttgagtaagtgctacaccacttgataaagtagttggcatgcaacaaaacaaagcgagtcctgtaaaaaccaaaatgtgcaatatagtaacagctgatggttcaaaagctggtaaaaataaagttgtgtgaaccttggtcttctcaaccaatctctaaataaaagtaagcttgataagtgaacctgtaacaaactcttgaggttgaagctgaagatgtagtattatctttgaaaagtatggggtaaataataaaatagagatctgcaatgtaagtaagaattgaaagattaataatggacaaaacaaagcctacagtcttcagccaaacataaattgcacggattatgaccccaacttgaggaacagctagtagagtgattttccctgtctatctttcaatcattttacttgatgaatgtttttagacaaggcttcaagactatgatgacaacatgatctcctttcactaatttagtatgcagttgcacataaagatcagaaaaaacgaatataggaacagaagacaaatggcagacataaattactattacttatacataatctaatacacacattccacttattgagaaaatgaaaattaagcgatcaaacacagcagcacaataatattctagataaaaatactaaaaaacaccaccaaatttataaggaaaagaaaaaatcctttcactgtacatgatattacttttctattgaaaacatgaaattttcatttta

SEQ ID NO: 30545 - DNA, 3408 bp, Cannabis sativa
tatatatatttataactaaggtaaacgactaaattgtacactaagagaaggaaaaaatggctccccttatagagtctagtcttattaagtgactgtgagttttctctctatttttctcgactctgtgcttagtgttctgctgtgcgttttgttttctgagttctccgtaacatggataaggctagtgagaaaagcaaggatatcgaagtagaggtcattgatgagagcatgaattaagttctgtaaagggatagtgctcttgaaatggaaatgttagagttatttgaagatataacacttgaggatgtagttctcaacaaagtctgcgttgggaaagttgttggatgcaaggatatgcctgcctcagtggtcaagaagattcttactggtgtttggcgcaggttgggtccatggagaatgaaaaaaatgtgaagatggagtaatggggttcttctttgttgaagaagatgattgtgcttttgtacttgagaagagaccatggatagtgaatggtgtattgctgaacctgaaaccatggtcggtggagggggaggtcagggtggcggaatttgaagtggccagcttttgggttcaattccatggcctccctacgagattcctgaaggatgagaatgctgccattatggggaagaaggtgggttcatttctgaaaacggatgggaaatctaaggaggcgctggtgcatcgagggtacctttgtgcttatgtggatgtttggctcaagcaccctataccaacaggctttttcctcaatgatgatggaaaaccggagtcttggattcaattcaaatatgagaaacttccccatttgtgctttaactgtgggaagcttgcacactggaacaaggaatgttttgtcccgttagctatggtgactcctaaggttggagaggctgtccaaatgtctggtacacggatcaagtctgaaacaggaagagtaaactgttttactatgaagggcaagggtgtatccaagttgatagtcgacaatggcgatgcacccgagtgggacttgaatgggaagcatcgaaggggaacctggaaaagatgaccaccgtcgagggtggagaacatggtggctgtcaaaggtgtggaggttggggtgacgcaaaagaaggcccctgctctggcagggcatttttgtcaggaagagaattcagcaggggtaaaggacatatcgtacattggtagtacgagtaatggtggtgcggcaagaattagtgccgatcgtactggagacgtggcggatgaggctatacatcacgtggaagatttgggagaaagaccacgatttcttcaactacctgatccagactttgcccaaaatgaagatagggatattattcctaacattgggcctacaattgcccaatcattggagattccacatgagtgaatctgcctattccaaaagccccataaattccctgaacccactccactgggatggcccaatttggacaaagaggcccaggaaatgttccttaagttgtatggagatgatgtgataaacctttacaaggcccaacaaactttgatctccaacccaccaaacttatctgagatgatattgttcctcttgggaaacactaggaaacgaaaggcgcatacctggtatgaaccttatcctgccgaggctttagctccctcaaactcagtctcggaggagcctgaactacccaaatggacgccatcaaaggagaaattttgtatcggatttggggatgatgcttcaacttctggaaagggcaacactcgtgggaggaaattgaagagcaaagctgctaacaacactgccaaacgcactttgggagtgaaaaccagaagtggaagaagaaggaaaccggtgacagagaacaatattgggaatgacaatttcaatgaattactcaacaactgtattaaggttagtattgaatatgctaatgtcccaaattttggaagcgacgaggaggcggccggaagcatgcccccaccgtcctcatgaggtgcttagcttggaactgtcgttgattacgtcgatccacggcagagaggacccttcgaggtttaatttgagactctaatgcggactttattttcctttcggaaactaaagttgctgtggagaccatggttgaagtgatgaatcatttggggtttgtgaatcattggtgtatcccggccaatggtttagctgggggtttttgtatagcatggagaattggtgtgctgtgtaatgtgttggagacttatgagacaggatttcttgtgactttccaagctgttatgggatgtccagagtggaagcttcattgtgtttatggtacaccatatggtgcttctaaacgagaattttagaattagctcacggaaaaagtaactgagggtactgagccgtgggctcttatgggagatcttaatgctattattgatcacatggagaagattggaggccgagaatttgatgctagggaaggagaatttctgagaaactttctgtttaactgtggtggagttgacttgggaagtgatggtggtgttttcacttggcaaaattcgagggtggctccaaagcgaatccgaaaacgacttgatagagtcattgctgatgggaattagtgtactgctttctctaatgcccgtgtgcataattacccgatagttggatcagatcatgctcctatattactggacacttggggggatactgtgaagctgaactatcctttccgctttctcgaggtctggactacgagagtagattgtgatttagttgtggaaagtgcctggaagaaaggttgtgacaaccgaagggatgtggggcttccccgtaagctaagtatcactaaaagagagctgaaggtatggaaccaaaatgtttttggtttttgtgacaaagaactgagacaacttcggacccaattggagaatattcaaaagatgcctattgatcatactatggtttctaaagaagcagaaattcaagatcatgggcgacatgggacaatggatacgaggcagggataacatagggaagcacttccaagatcattttcaggaaatgtttctctcttccaatccgttgatagaagatgagctggagacattgttcactgagaaagtaactgctagtgaaaatgaagctatctgtaggttgcccgagtatggtgagatcaaagaagtggtattcaagatgcaccccctcaaagctccggggccagatggatttcctggaatcttcttcagaaaatattgggacactgttggtgaatcagtctgctcaatggttcaacaatttttcttaactgggcggatgatggagagagtaaatgagacttttatatgtttgatacccaagagtgcaagtgctaatactcttgaccaatttagacctataagtctatg

SEQ ID NO: 30546 - DNA, 1273 bp, Cannabis sativa
aaaaaacaacaccgaacaaggtaaaatggcaaatgaatataatatacccaataagctgcggtgaaaccagctacacctgaagataaatgaacgacaaagccaccagagtaatcaataacacccagctttgagagccaaccagtggggcaccatatactgtatgcacacactgtgtacgatagcgtaacccaaagaggcacgaacatcatccatgctttgaagctcatccggcccaacaaggccccgcccaccaaaatcaatgttaaggccgcaaacacaaactggaaatacaccatggtggcgttcggtatttggcccaaaaaggcttgtttaagaaggtagttagtagccagagcaggattgggctgacccaaaaaaggtaggagtggtttgccgaaagacatctcgtgggcccagcccacccaacaaactaagacggcggcgaaggcgtagaaagccatgaaggccgagttgacagcccatttcttttttactatgctgccgtagaggatgactaggcccggcatgctctgtaggcccaccagagtcgccgccgtcagttgccaggcgttgtcgcctttgctcatccattctgggctaccgagatctgggattaggttctctggcaaggtcgtcgtcgtggctatagcatccattgagttccagttttgggacttttcagaatcagtggtcaaattttgtaatgtgatttttgctattagtatcaatggagaagagattcattagtaccattatatatataagattatatgcttatttgtatataaaaataagagattcatggttgccaaacttgggtgacggataaagctagaattgatgctcccaaagaagttatagttaatactttttgaacaatatcttaatttattatttcatttttaggaaaatatcttaatttattactgattcattgaagctagtgtccttttacttatgattattatgtttctatttttggctcatattatttttggaatggatcatgtagttttttttttttataacaattttattgatgaaaggtgcaaatattctatgagccaaataatataacatacagtatctataatagtgcaagatatgcattctttgacaattaaatcaatgacatcaaccagataagaaaaccaacatcaaagaattaagggtaaatactattttggaccctctattttacaaaagttacagattggaccctatattttcttaaatgacaaaatagacattgtattttctaaaatagtaaaaa

SEQ ID NO: 30547 - DNA, 1325 bp, Cannabis sativa
caaggtattcagaactatctattacgcaagcagaaccttgaatgatgcccaactgaattatgcaactacagaaaaggagatgttggccatagtgtttgcatgtgataaattctgaccgtacttgattggaaataaagtcattgtgtatacggaccattcaacaatcaagtatttgatgactaagaaagatgccaagccaagactgatatgatggtttcttcttctacaagaatttgatttggaaataaaggataagaagggcacggagaatttagtggcaaatcatctatcgaggttggaacttgaagagagtcagaacacaaaggaggttgagatcaacgaagactttcctgatgagaactgtttctcgtggattctaatgtaccgtggtttgcagattacgtgaactattttgctgcaaacatcataccaccagaattgacaaggcaatagttgaagaaattctactctgaggtcaaacactactattgggagtatcctatcctctataagcattgtgcgggtcagattagcagaagatgtgtgccagaggaggagatgttctctattttaaatcattaccatagcttgcaatgcgggggacattttagtgggaaccgtactgctgctaaggtcttacaaagtggattcttttggcccactttatttaaagatgctcaccaatttctccaagcatgtgatcggtgtcaacaaactggaaatatttcaagaaggaatgagatgcctttgactggaatttaggaagtggaactattcgatgtgtgggccattgatttcatgggacctttcccgtcatcatacagtaacacgtacatattgctggctgtggattatgtctccaaatgggtagaagaagcaggaacatacctgaatgacggaaaaacagtgcttaactttcttcagaagaatattttaacccagtttggaacaccaagagcaattataagcgatgaaggaagtcatgtctgcaacaagaatttgaagctctacttgcaagatatggagttcgtcgtagaacagcacttccttataatcctcagagtaatgggcaagcagaaatttccagcagggagattaagttgattctggagaagacggttcagcgttcaagaaaagactgggctaaaaggctggatgatgcactatgggcttacaggaccgcattcaaaacaccaataggaatgtctccctatatgttggtatatggaaaggcttgtcatcttccagtcgagttagagcacaaggaattcttggccatgaaaacattgaatatggacttggcaacagcaggagaaaagaggctg

SEQ ID NO: 30548 - DNA, 4036 bp, Cannabis sativa
taattcctcaattattcataattatctaattagagttttgctaatccatttcctaacttagggtattacacttatgggcccatcctctccaagaaaatcctttgatagggatacttttggctcactgtgaagaaggattacacgaaatacgtacggaagtgtgaacagtgttagagatatgccaaagttctgcgtgcactgcccacagagatcacattaatgagcaacccattgccttttgcattttgggaattgatttggtaggatccctccccaaaggtaaatgaggagtcaagtacgcaattgtcgcatttgactacttcaccaagcagatcgaggcagaatccatgaatactattacttccaagaaggatttggattttgttatcaaaaatatcatgtgtaggtacatactcctgtataaaattattccagacaatgagaagtagtttgataacgatcctttcactaggttctgtgcccagcatgtaatagtgaagagcttttcagcggtagcccagccacaagctaatggggaagttgaggtcgtcaagacaacgttgaagaagaaacttcaaacttgaaaggcccactggctagaggaactcccccaagttctttaggcctatcaaacagtagaaagaactccaatggggcagatgctgtatgtaatggcctatggatgcaaggcggtgatcccagtagaggccatagtcccttcctattgacgagatacctacgacccttcctgcaaccattccttactccaagagtcgttagaattaatcgaagagcttcaggagcagtcgcaagttcaactcaaaatgtaccaaggcacaattgctcagcactttaattcaaaggtaaaagtcatgcatttgatgttggcaatctttttttgagaagagtgttcctaatgttgcaggaactgggagtgggggtacttagcctgaattgggaaggcccctatgagatactcgagaaggtggatcaatgtactttttagttgaaaaggatggatggatcaagggaccttcacgcttggaacgcagatcacttacgttgatactaccaataggcagagaaaaccaagctttgatgatatccagaattttttgtgaaaatctatgtaattaacttttatatgtgtagccctcaggtgtaatgaaatgaaagacagaaatagtttacatctaaatttacactttgcattttcggccacaagctatgtttagacgagttctgggaagttggagacgtccacacttctcagctcacttgggggtatcatgcctagctgtgtgtgccctcaaaaaatgtagagtgcaccatgatcaactattttgtttattaacattcataatttttgtaattaagcttaaaagaagatgcattttcaaccaaattccttaaaaggagggtcgcttgaattccttcttaaagctagaataaatacacgttttgaaagaagaagcattttcagccaaaattcccaaaaaaagagaataatttgcgtgaatcccttcttgaaaactttcaaaaataggttgtttagaagttaaaatgggaaggcttctcttgaatgcctatagactctaactatatcttgactgaaaggtattgtttgaagttcgtagagtgcaaaatcggcctcccaaaattatgaaaaggcttaaacaagtcggccaaggctccacaagtcggccaaggcttaaatagtctcaaaggcctaatcatgttatcaatgactttttatcgactcaagtttgcagatttcataaattgttaacaaaaccgtcctacctgaagtaggaacaaggtacttcttaagtatttcctaaatcagtggatgggttgggggtaagtgaatactaaggtttgaggcaatggtcattggaaccacgtgattctcaacaacctaagaaggcagcccttaaaatggtctaataggccaattcataaaacttaaaattgagaggtaaaaatgggcaaagcataaaagtttatgacggtgcctcgcggaaaggcatattaagttcttctcgcacagaaggtgattgtcatatgaagccccgcagaccaagaaaaagtaaaaacaacaccagaaaaaataaaaggaaatggaagagagatagaagtaaggttgtctaaaggaaacagataaatgctaaagaacaaaagtggctcctaccagtcttggaagggggaatgtactactatattgatgtgaggtgggtcattgactggcccccatggaagatttaggttaggcccagccgcgtcttggacaagctcctcttcggccttgccagaggatgcctttgcttccacgagcccttgagaacttacgacctcaccattggattcctcatcgttctcaatagaaaggggaaatttctctaggtatgtgtcgcagtgtatggcgagtactctcctagtaacatcttccctctctttctcattaataagccagagtatagtggagtctgtctgccacaagttaaaaaggaccatggcataagacatatccaaggagcaaaggcgatacttctctaccctagccgccgctttagcagctacctcaactgcatcccgaatggcttggggagttgtttctcacattttttgcatagtatccacggcaatatatgccctcacaccatttgctgggctttggttgacttgcctttgtaacttgttaatgatcttcaaatgaagatcactattatgatgggctgcgtgaagcagtatattcagattgtcatgttatgtcatctaggctctttctgtatcttctccacatcacactcattacaacagctttgtatgagtaggtcctttcgttggatatccccttggagagcgctgacttcccaaatttatgtggatatcattttagataggagaatcaccctgactttggctttgcctttctcctcccgagaaagacaaagctcttccctgaccttatctaagttctcttagagggaacacaccatctccttgccttctttctcggcctgggccttgtattataaatatagcttccagtatttagcgtctatcttcttctcctcaaccgccaacttggcattatagttctcctagatcatttgggtgctggaggtagtttgggtcttaagttgctcaacttctgtacgtaaggcaccattttcttttgtcaaggattggactttagcgtgaagttggctcagttcaatggtcatattgcccacttttttggtggtcctctctacaaacaacgccatctagagaaaggaagacaaagggaaaaaattatacacactttagtgattaaaatttcaccaaaagggagaactgctcaaaaaattgaagcgtaaccctgctccatgttgtttagcaacaaccgatagtgtgtataaatcaatgctgctgctcacaacccacttcttggatgtaagttcgctcacaataaggctcatgctgtccaacatttctgcaacgtcaagggcaaaggctctgcccaccttaggtaccaaattctggctcactgcagcaagatctaacactacgccagggaaggaaggctgggaaactcactctacaatttcaaccatcttgatggaagaaatccagatagcccatttttagatttacttgctcccgctcatgacgctttttcaatatagcggcagactcacctaccttggtgaggtagtcatggccaagaaccagaggcctcatggggaaagtaaaacccaatgagggaaccttatctacagtggtgtgccgacatcggtcagtaggggtagacctaagagttgtgcgcccaacaagatgtttgagtgtaagagagtgagatgggcatggggtagactgggatgtcacaatttgcaactaactaggttataaaattcattgttgttgcgattgtggcactcattctaactgttgtggttgttgtttttatagttgtggctgttgttgttgttattgtggttgttgttatggttgttgttgtggctgtggatgtggttgttgttgttgttgttat

SEQ ID NO: 30549 - DNA, 4912 bp, Cannabis sativa
aataattagatgagataagtggtacataaaaaaaagacacttttgttttattagttgaaataaggcgacaaaaaatctaaccctaaagtcgatcatgtgattttggccctaagagttgatttcagccaaaggtattttatttaagtccacttcatctaacctaaccctaagtgaaagcctatataaagaaaccgatgagaagggagatctaacctaacgtaattcaaagtcagacaactctcttctcttctttctcatatatttcaaattcaccatgaaaacagtctctcaaatttgttccaaagtttattttagtatcagcccgcactatttaaggtaacactgtgatgaacacaattgaaggaggaaaagatccagattcagatcttgattatactttgtgacagaaatgatcaagggttagaattctaaacgaaatgagacaatttattctgttgtagccacaataaggatttactaatctctatatgtgtttatttattgtcttaataatttctatatttaggatgttagattagtcaaaatccaatatacatgagtagtaaataggatcctagtcaaagattttccaacagttaatgacatatgtagcatgctgaaaggaatgccaccaataagagatctaaactagattgtgccaagagtgtcattcttgtttcattgatgtgcttgtgtttgcgtttaactctaccatttttgtcatgatcatgtggacaagagtgttaaaattgaactccattggcaccaagaaatgaaacaaagattctatactcacttcccaatccaattgaatctttttatgggaagactaaactgtttttcaactaattttttgaattgaagaaatgttgggaaggcttgagacttcagtgtcattggaaagatccaagtaaaacgaataaagtcatcaacaaacagtatgtaatattgaaagccttctttggagggcacatgagatggtccccacagtctgtgtggaccgattctaatggcataaaggccctgctatgggatagggactattgtagcttattatttttaacaagtttgtagggatcacaaaatttaatgtattttaatgaactactaaggtttacttttgtgagaactttggcaagaatattaagggctgggtgtcccaacctttgagtaccaaatattaatatcttgactgaaattaacatgaagaacctcattcaaagatttggatggactagaaacaaaaaattctttattataaataaaatttgtacatgagggggaggctgttaaagcaacctctttattacaatgagaggtacaaacagggaaactatgtgaacttggaaccttagttgctagatgacactcaatctagactggtgcagaagaagcaaatgtgttggtcaacacgtatagtctattcttaaccctccctttgagcaaaactttccttgttattgtgtccttaacaaaataacaagtagagtgaaattttaagaaaacatgattatcttttgtgagttctgacacctgaccaaattttttgtgattttgggaactttaataacaaaatttaattgaattggattggaagtggaaggtaaagagtgattaccaatatgagtgatgtggagtttcttaccatcaccaacaacaagagactcattgccatgataaggtatttcgaagtcaagatgttccattcctatagccacatgtttgttagctcctatattagcataccactcaagataatgagcaaaatcttgaatcatgggaaaactgtaggtggatgggtcttcttcatcaatctctgttaggtaggcataaaattcacaaactttggggggtgacaaatgacttgttgaactagtaatggcacattgtagttgtgtggccagttttgtaacacaatttacacaagagccttaatggagctattcctcgtccaaagaaccttcttaaggatcgactaggttgactacatccgcaactgtggtcattgtagtcaaaggttcttgaagaagacaaactagaacaaaatatcgaggaacttgtgaaaagatttgcagtcattttgaccaaaggatcactgactgtataatgcctttcaaagcgactttcgtgagtcaaaagcagagactgtatggactcaaacaagaaattatcaacaagactggtcttgtgaaccgtaacatgatcatattctggtcccaattcgttgagaagttgcatgatcaagtcactttcctccatgggatggccaaatgtagataaggaatctgcaagaaccttcactttgttatcgtaattagaaatggaaaggttgcattgctgaatagttgtgagctgagacttgatctgcaatattcatgcctttgattgagatgaaaatcgttgctccaaagctttccatcctgtggatgatgtgttgtgtattgagccaaagaacccataatagtttcactcattgaagaacgaagccagctgagtaagagttgatcttttcgtttccaagccacggattcaggattgacattgccattgacaagatgagctagtggaggaattccagtgagtattatgtcatccaagcaatggccaatcatggtcagaataacttgagatttccatgccaagaagttggatctgtcaagtttgacagtatgagaggaatttattattaagttttggaatgggttccatgattgttgtggtggcctttgatcagtttgggcagaggtgcgaggtagattttcaataagggtaggatccatacatgattttcgtgaatggctttctgataccataaaagaatttatctatacaagctataattaaccggatcaatgaatacaaaaaatctcacaagcttgtaaaagttacaagacttaagagagaaagttatttatagagaggattacatagaagaaaaccaagaatattagttaagtacagttgtacagaaaaataacacaaaatacaagctaactaattctgctaactaacaagcaactactagactgtatcaaggaggtggggccctacatacttagtcacaattcaataccaaaaatgagtggattcgataggcatttttccactctcaaaacccgaacccgagaaacacaaaacccagaatacaaacccgatgctctagttgtaaccttatttatgtacaaaatatgtctattgtgagtgaatatagttatttttttttttttgaatggaagcatcccatttcattaaataatatcaacttacacgaaaactcaaaaattgtgagtgaatagttttcaatattagaaaacttgcgcgcacgttaacaccctaatatatcattgaaaaatgattctgtggaacaagatctcccctagtgccaaaactgacatcaactgcttcaaaatctcattaattatacttaaatcaaattaatacatatataaaataaaataaggccggtccttgttagtcgagctcctaatcaaatcgattttgttggatatattatttgtctgttatgagttttctcattaaatgtcaaacttcaattcaataccaaaaatcgatggcaaaaaatattatataaactataataatacatatatttagtaccatggctagctgtggcgatataataagtaacatatatatacatattacttaccttcataaacagaagtttttatgatatatagaaaaagtagtaaaaatagtatagtactagtaatggaggagaatttgaaagaggagaagaataaatgggagatatcatggcgatcactggtgagggaaatgaagagagaaggaattatagcagggccgatggtgggcgtggcggtgctgcagtacttgcttcaagtgtcttccttgatcatggtgggacatcttggtcacctctccatcgccagtgttgccattgccatctctcttaccaacgtcactggttttagtcttcttgtaagtataataattacattatatatactattctacttttatctatacacaccatctttttaccaaacatatatatatatatttatatatgtttcattcccataactttatttatagttctggtatggatgaaggtatatacattaatgtttcagtaatttagtatgtaattttttttcctttttctgttttaatatctgatgagtgtagcccggcccggacagaaagtgtacataaatcagtaatagaaaaaataaaatagtaagtatcataacattaaatgaaaatcttcgataaataaaaatgaaggaaaaaacaaactaactgaaaatccttctccaaaaatatgtattaacataaacatatcttacacattttggaaaacaacatactcaagaatattcgaattagaactcgttcatgggtactaaaacaaaaaaaaacacattgaaacatcagtttatcattgctaagtcgatgaaaaacaagacttaggaacacaacataatataatatatattttacatgggacgcaccatatatatttaaatatgtcaaggtaattaagccttgtaatttgacagaactcatgttaaactatattccaatttaattaaataaaaattaaactatcacacacgctaacaaattaacttatgtcagcatttttgttttttttttttttttgaaagatttagattcagtgtttaatgagacttatttaatcatattgaacatatttggtgttgcaaaactcaaattcactaattactaccagtcacttagcatagctgatattttgttaaagtgtcacctacaacaaagggagtgagtatgggatgtgaatgtgatatatataattgttctgttcagctcactgccggcttgttacgacatatatggcactcacatatccaatctaagaaaggattttaattaccatggtttt

SEQ ID NO: 30550 - DNA, 1998 bp, Cannabis sativa
tataggtacttataaaattgaaaaaagttataaaaacagagaaaactctgctcaatttttaataacattgaagatttataagtactaaaataatttaacttgcttaaaaattgctttgatataatttttaacttgtaatagcattaaattatttcaggttattttagattaatatggatagagaattgatgaaaaaaattgattgtcaaaagtgttttacataaatgaccccatagatgctaattggtctgttgtagtctctgctgaacctagcaacatcaaaacaaacaataattaattgtagaggttgaagatgttgaggaacttcaattaactgacaaatcattaattgatttcgatggctttgattcaagagatagaagattgaaactacataactaattaatgtaatatatgtttgatttatatttgattttcttttaattctagtatatttttgttttgttatggcatatggattgaaaatgcatatataactatatataacacttatctaatggattaccttatgcagaggcatggaagatgacgatgataatacacctatagagaacgagacaccttcagaagataacacaactaaagaaaaaaaagttagaggtcaatcaatttgtaaaaaaatttggaagtcgaaaagtaagggatcaaaagttcctcttaaatggaatgattatggccaatcaatcggaaagcattgtggtatgcttcaaacttatcttggttatcttgcacgcacagagtccctatagatattggtaaaacaaaaaatattattgaacgagcaagattacttgcggaacacttaaatttagtagaaaaggggatgtttctattgacaccttaaaacttggggcttgtgattcatttttttattattatttataatgtcaaatgtttaaataataaaggatgacttaataatattgattacagacgacattggatggtcataatcatttatgctcatagccaagatgcatattttttcgatccagttggtaattatccaaaagaagacgctatgagtgtagtcaaaacgttagattaattcaaagttttttcatataaatgttataaagtttataataaattatgcactattttacctaattgaaaatttattttattttttatgaagtgcatttgacttatataatacccgaaataataatttaagaagaaaaatccaaagtgtaacttggtatacaatttagatatgggtacttaaattgaactttaaaactttttctctttgaattatttttctattcaagaattacgacatatatataaatattttcagggtcctaaacaacttgacggtaaaatctgtggttttcatatcatgcgactaatgagagacttaactatgttgaacaatccaagagattatcttgagaagcatgtaagtgcttgagttatcgtatctttataatataatttaaattttgaatcataaaaaaactagtatatatataaaatttgactaacttttatattgttgtgttattatcagaaaacatactcaatggatgagatcaacaaagtgcgtgaagaatagatctcctacttaactgagtatatgccatgatttagattatagcttattaagtatatatgactaattataattattgtcaaacttttgaactaactacaatatatattatgaaataatactttattatattaaaagacgaattacatacatttatttcaagtattgaaagattatttttgcaaattatatttgaattgtaaatttttgtatgcaatcaatgtaatagtaggggaattactttttttttccaccagtacactatctcgacaggctctttagaccaccaatattgaccaataacgggggcttgggcctgtcgagataggtgtcaaaaaatataatttaggataaaaatgtacctatctcgacgggcatagactgccaagattacatcataattaacggcgggctttgcc

SEQ ID NO: 30551 - DNA, 1871 bp, Cannabis sativa
aaaaattataactttgtatctagaaatatcttagataagatagactcgtggattatgtagagttaactgcaaaaccacgtaaaaacttagtgtcagtattactattctacttattaattttcttatatctctgtttaattttattacgaaataggctcattaattgttaattaaaattgcgttaacggatgtaaatggcaattttttttgcttagcataatgacaaatggaaaaataaaatagggaattagaatcagcatgaaactttaaagctttattcaaaagatgagtttttacacaagaagggtggcccaatctatagtgtcaaactgtttcatttgaaactattgtatctaaaatagaagaataaacagaagaaaagtttttattactagtctgattacaatttaggtaatacaaattgctaaactttctacgcatcccaatcaccttggtcttcaaagtgtcctagatgacatagtttttatgagagaacaagaaagtacaattaattgtagctgttaaataattgatagataaaaaattgtatttggaagagggaacataaagaacattttcaagaacaaggtcaggtgttaaaataactgttcctaggcaagatatttcagtatgtaaaccattaggcaaaagaacagtttttagataaaaatcaatgtaggtgtttttgaacaaaaaaaaaaatgataggatacacatgatgtgtggctcctgtatcaatgatccaattggcattatgaacaaaggaattcttactaaaaaaatggaaaaccacaagttgttcatcagaagcattaggagtgttagtctcagttattttttaaacaagtaatgccatgagtttctggcattgcacacatggcaaactagaaataagatctctctccattggcatctcctctagttttccttcatccatgcctgaaaaatccacactaataaacttccctagaggtcatttagcatctcgagtaggaaaccttccatgaagcttatgactaggggatatccattgagcttataacacctttcaattgtgtgtccattcacaccaaaatgtgtacaattgtactttgatcaaaaaggttaaacagctctagcaaactgtccagagttgctcgatgatgatttgtccaaatctgatgaactattgtatccactagtcaatcctctttgtctctcttcttgaacaacaacaacaacaacataggctttgttcacgcttggaagaggatcacgcatcaagatttgagatttgaaaaaattgttagaatcattcaatccaacaaagaattctagcaagtgatcctcctcttgatattcttgaatcaccttcatagcaccacatgtacaaacatgttgtggtccatactctctgatctgatctcataggactttcaatcaactgtagtaagtagtcacagtattcgatccttgagtaagactctgcatagtctttttagcctcaaagattcgtggaggattcttctcattgaatggatcatgtaactctgtccaagttttagctgcattgtcatgtacattatgctatctgcaatttcatcagaaatagcatgtaaaacccaaaaaatgatagtgatgttgcatttgcacaagctatcatagtcttcgtgatcatcataaggttgaggaagcttcccattgacaaatttgaccttgtttcgagctaccagaacaatcaacattgctcttctctaggtactgtaattctcattgcctttgagaattttcggaacaagaacagcagctggattatcaccattagaaagaaaatacaaatttgagagatcattagcattagtcgatcgtgaattttcaccaagaatagagaa

SEQ ID NO: 30552 - DNA, 1581 bp, Cannabis sativa
gtgagtaatatgtgtatatatatatatatgatagtaagatgtacatctaaattgctaaacatatctaatcataacattaataataataattatcagagagaaaaagagagatggcatcttcaggttcaagtgttggagataaatacaggaatttagatgaagaggaaaagaagaacactgtatggagatttggtcaacctcctaactatgacattgtaaataagctctttgaagaaggacagactaaggttaattaattaaattaatatatttcttattattatcaatatcattctctctatatatatatattaataagtttaattaattaaatttgaaggtatggcctcctggttcacttgaagaaatggtgcaaaaccttaccaagacttgggaaatggagcttttacataaagcacgtattgaggactttaaattaatggaacccaatttcatttacagcctaaatggtatgaatattgatttattaataaaaacatattataaaatggtataaaattaataatttatgaattgaatattgattaggtaggaaagggtggagtttggaagaggtggggaaaatgggaggagggtacaacccacatctacaaacatcattgccagagcatctaagaatctatgacccagcagtggaaacatcagagtcatcacacagggcattcacaacaacattccctcgtgggttcgccatagagattcagaaggtctactctggtcctccacagattgtttacaagtttcgtcattggggttatatggaaggacccttcatgggccatgctcctaccggaaaactcattgaattcttcggcatcgctattatgcaggtaattcaatacacaatctccaacactacgtgtatgttataaggaactgatatctctttctcacttgattgtgttattataatgtatattgaaagttcttgtattaagaaagataacactaccataaaaatgttaaccttttaaatggtcaaacataatccctttcaagaggaatgtaagtgaaattcaaacttttgatccaaataaaacagaatcttaacgaaacatctcagccactatacatcacacaacatgtcgtggaattagtttcacttgtactaaatgacaaaattattaattgcagttttttaaataaatttatgagaaaggttaaaagatattttaaggtactgttaaataaaacaagatcaagtttgatgtattttaatattaagttctaatttaataaattatatgagaaacgataattaattataaaatatcatatcgatgtggtgtttagtaccttttgtttattaaatataattaattatggataataataaagtttgttgttttaataataatagatgagtgaaaacaacaaacttgctaaggtggagttcttctatgatcgtggagagcttcttgggcaacttgtgaagggagaaaaagttgaagctaaagatggagaaattgcctcaacctgccctattatgaggagcaccggctagtactttagtactactattatgaattttcaaataaatagcaaatactagctataaat

SEQ ID NO: 30553 - DNA, 2098 bp, Cannabis sativa
gagttgaacatatgtctttgcactaatgatccatacagaatatgtaaacgttggtatgaatgtaacttaagttcaaatgtcaatttaaatataatgcttttaccgtggtgtaagaagacatctttttccgcaatttcgattctcacattcattttcttcattgtcattgtagaatataatttttgtattacatgaatcataacatgtaatagaaagcttgattgagattttttaatatcattttaatatatgagttacgtatgttaaaaaattcaatattatatcataaaaaaaaaattattgatatttatttaagtttatatacgtgatcaatgttatgagttatgtatgttaaatatttaatattatataacttttttattatataaatactgatgcaacagcaaagagacatataagggtgacaagaaggtaggaacattttaaaccataagaaagaatcaaaagattagtaaagggacatctcgaataaaagccaatggagccttgtatgtatagaatgtggaagcaatacacaaagtgattcagaaagaagaaaataaatgatcatttcatcttgttcccagaagactgcgtgttagattcacgcctagaagaatagtattagttagaagagatgccatggccaatttctgtggagattgagctcagaaaaaggtggttgtgttggctacggaatctcatgattttcggtaagcagatccacaacaaatgcatggtcgtagctcagcagaggcttgtacactaattagcccaatttggagcaaccaagatgctcctcagcttgaaaattacctcctaggcttggatcaactaattcaccaagtgtactgcttccataatggctccaaacctttacataatggtctttatcacattatttatgaccgtctttaacctatgtttgaaacaaagagcttaccatctgcacaacaggggtttggacttttattggaagaattgttctttcttccacatactacttaaaagacaagaattctaaaactataaacacttgccttctcggaccacttgccactaaaaatttactcaagagccaaataataatcacttagaaagtcaattgaaatttgtatcagatatgggattccaaaaaggcagtaatcaaaatcatgaccaaatccaagtgggttatttcaaacttacagtgtcccaaaaatagcagtgatgatgtcagtttaatcttttgaaggtcctcattctttgcatattcttcgttttatcatctctttaacttctacaatgaaattaaaaccttaaattttcaaacaataaaaaataaaagtaaaagtaataatagattaattgaatttctcagcaaaaaaataatagatgaattaaatcaaatgtactttcacattcttaatcaaagaatacagagtagtacacagagatggagatctaaactaacaaaatttcacccagtatcaaaaataaagataagtaataaaaaataaagatgaaaattaagaaccaaaaatagttcaaatgtatgtattttaaattctttttataaaacttggtataatcgttgagatgcttataagaaaaataagattatactttttcatcaataagaaagctcttggacccatttccgcaacaagtgggagtgattacgaagcattaattcaataaagatattaaaaactatatctaagatataatggaatctcaaccagtggctatctacagagtgacaattgataataactcaaaaacaatcagtaagtagtcactccctaattcacagttaagaaatgatacaatttgtaagtgatgttatgtttagttcaaagtcaatacaaattaagaaacacataaaaacaaccatttgagtgaatcgtcaactaaattaagagaagttaagaaattagattaaggaaataagccttttcactaacaaactcaaatcgagcattaagttgagatttttagaacaaaaaagaaaaaaagcaatataatacctataaatactaaataacaaagtgaaagttaagatattaccagaaggcatcttacccattgaatgggccaacaccatcccttttcctct

SEQ ID NO: 30554 - DNA, 1365 bp, Cannabis sativa
gaaaaaatttccgtgtgacagtatttttgtaaaagttaatcaaaattccagtatttttgtaagtttcccttattattttgagatgatgcttaactaattgtaatttgtaggttacgggcttttatctaatttctttttacttgagagtggaaaattttacaatgcaccattttggaagaggtatactgatgtgcacttttttttttttttgagggaatactgatgtacacttatttgttttggtatcttgaaaaaaaaaattagtctattgttttttattattgtatatggtgtaattatttaagatattctgtaaaattttaagaaatttttaaaaaatttaacacgttcaaaatagggttcaaagagtatgttgcacgcgtgatctttttattttaaaataattagtatttttgtcttctaaactttcaaaactacttaattttgctctctaaaatttatagtttgttaaaaatcctccctaaaatataatagttacataattatgcctcttctgttcggttctatttcttttaccgtaaaaattagtatttttacctcttaaactttgatctatacaaaattttgttctctttgataaagaaattaattttaaaaattgtaatgctatattaattaaaaaaaaattattaaaaagcctgataaaaatattaagtttacttaaaaacctaaatttttttttttaaaaaaatattttcaaattttattttatttataaacatgaatcttaaaaaatcaaactaaaattatttaaaattcatcaaataatttaaacaagctgagatttttttaaagataaattaaacttatttatatttataaactcatatcttaaaaaataattaaaaattctgtaaaaatataaaattattttggaaaaaaaaattgaaattaaactaaaaagaaatattatgtttattgaattctattacaaattgacctttgaagctctgctaaacaaccaattttactctcttttatttattattttactctcttttatttattgaacttcacagcagagaagttgttattttctttcttaattttgttaataattttaagacaatcacatattatacaagactaatttgtgtcttttaatattatagaatctattacaagagtttaagcatctttagtatgttccacaaaagtttcatttgatgctaaccaaataagaaaatagctaaaacataagtttaaaacattaagaaaatctcatattttttattattattattattacatattatctctagctagactaatattaactaatagcattcatataatttgatatccatcttgagacgaaaatagaaatcaccctgtaaagtatca

SEQ ID NO: 30555 - DNA, 5393 bp, Cannabis sativa
ttagcccccaaaccaaaccctaacataaaaggagggaatgggggtcccctaagcgctagaaggagaccccctccagatgtctgccaaagataggaaacccagggattctcctaggcaaacatcgggtgaaaatatcccaaaggcagtgaaaatagagaaaagaaagaaaagagagggacaaacgtatgaaaattgtctcatactctcgacagtccccaagtgaagaagttttttgcaaaatccaaaagggaaacgacgataacgtacaaaaaactacgacatacaacgatcttcaccacgtccgtcttacacatacaacggtcttcaccacgtccgtcttaccgtagaaatcaaatacaattaaaataaaggcactggcctaaatcttgccttaacatgcaaatgaataatgaaagtggagtgtacccagaaaacttacacaatggtaatgagcaagaagttgatgttgtctgacggtagaacttagattggcaacgacggaggaacagcagcaagaaatcgataatttttggaattttctcaaaggggttatctgagtcaaaatggcgagagtatcccaacgaaggggaaatgctagtttttataggccagaaggggtgcaaggcagctatgatcagacaccactgtacggtgggaattggtatcgattcgcattctatgatccaacggatgagatgaacgggtgtaacgaagagaaagggcggttgaaaacgtttgagcacctctctgacaccaagattaaatgcgcaggtctatcaacagacaggaagcgaagtgttgcctgcaaaaataaataaatatcaatgatgacagtcataaatgcaacccacacacctagggcacgtgccattacatttataagctatccggaggccttgtacaagcctcatttaccctttactaaatgagactaggggtaaatgttgcctctcatttttcccaaaatacgtggcagcggctgcgtgcgacacgtagatctcaaagaacatccactcccaaaaaattggttaagtcatagggagagaagtgcatctcacagagtgagcttcccggaggagagcataaaacacgtctttactctccgggaggctagaattgtaacaaggcatctccgggagggaaatagattgttcgaacagtcacttcgcatttaatgctgcatggggggaaacctatcagaacctccataagaggatttgacagatggcgcaagtcccttttacaacgattacacgacaatcaacaagtctagtgacggctacattatgaagactcacatcaaccaagggaggataaaggattatattcacctactccctaagatacttacggcataggtcatgtatttcctattttgtatttgctaggaatttgtgcccctaagaggctaacacaaaaagacaagtgatccctttctagggaatctcccgaaaaatactataaatacccacaaatagaatgaaaaaggagtggatcgaataattaaggaattgaagggagtaaagaagagagaaagagattcaccaagaacattctctgtaaaaatactctcataaataacaaagactcgtggactaagactcattaatgcccaaaccatgtaacgagcacctgcattaaggcttatagagctcttctcattctattatttaattggttgccaaaaacctcagtcaacaacaaacttaacaacattaacaacaataatcacattgctaattgtgccaatcttgtggcaaacgttgaccttgtgactactttaggccggttgtcaatgatgatttcttgggagtgagaaggcagcaagtgaaggtgaacaactttgaaccgaaacatgcattagtccgtatggtgcaacaaaatcaatactttaatttgcctcatgaagaaccaaacattcacttgtctactttgttggaaatttgtgacacaataaagataaatagagttccaccagacataatcagactcaagctcttttcattctctttgacagaccgggcttgttcatggtatcaatctttgcctcctaatgcacttgcatagaagagaccgctcaaaagctcctcaccaaattctttcctccttccaagacttctaaactaagggcagaagtcacccaattcaaatagtggagcaactatatgatgtgtgggataggttcaaggagatgcttagaaagtgtctactacatggtatagaagattagtttcaagtcttgctttctacaatgggcttaataatcaaaagaggtcacacattgataatgtcacatcacgcagtaaaattctatccaagacactagcgaaggctatgagtttatttaaagatatggctgaataattatcaatagtaaagtgagaggtcaactgttaaaaagacaactaggataactgaagttgatcaaatgacgctactaatggcacaaatgtctattgatttacagaaagtaaaatggtacaaagtcaagaatcaataataaaagcccaaactttagggtctaatgaagagcgcgagaaaaatgaggttagtgacctttcaatgctcatcactgtcgctaacaccgaaacaaaggctatggtcccttaagatttaacgattgtcgaacaagttgggatggcagctgaaaaatgcatagccaagaagacatgatctcccatataggatcgatcttaatgtgaaaccatccttggtgaaggatacctcttgcaagggccatcattagtgaagtcagaacaatcctcagggaaggatccgtcctcatggctgaaccatccttggtaaatcttccttaccattgtataattttcaatgtcagtcaccatagtcgtaaggtgtttttttgaaaagatagtcgtaaggtgttactaacacaaacaaataggctcctatatgagaacaaaaaatgacttcgaccagctaatggtgatgcacagcagctacaatacttatgcatagcacaattcaactaccaaatagggaaggaaaaaaaatagttgaaaattatgtttacactatcattgcacataattacaacggctacttctactatcagagcagtttgacttaactcttatacaattgtaaagacagacaactctccttggaaaaggagaagcccacaaagcccaggagcttgcctcaaatataaattagttgctaaataattagcctcaaatttagaagaagcctgtctaagcccagctgataggaccagacacctttaacaatttcaagctcatattagtaatttcccaatcagaattagttaaatatactgaacatcatgtaatgctaaaatgcatccaccaagcaaccactacctatgggagaaatattttctagaaactactacttcctacttcctaatattttacagaacaatctgtctaaaagtttcagcttgtattgttgattttggtaacgtaattgccactgttgttgcagtattggcttgcattttgcctatctcctttgaaatgccctcaaagttggaacacacttcttgccctgttaacaaatttcttacaagacttcactgccgatgaactggtggcgtagtcggttggtggttttgcccatagaaccctatacctggtggtctataaaatcctccattggcaggttgcagctgttgttgctgctgctgtggtgactggtgcggctgtggctgctgttgtgattgaggatttggccttggcaatcccataccaaaatgtagaggtagagggggtgggggtggaagggtgtttgatccatatccaaaaggcattacacctgacataagaccagtggattggacatattgatgtgatggagtagcaggagaatgaagaacaggtaggagcggcaggggtggtggctgggaaaaagtagattgcatctgctttccttgagaaagggattgcatgcctgatgatggtgtaagtggcatattggcaactgactgctgtggtagggtaaaataaccagtactgcctatatcagcattgctagcatcaggtacagacattggtttttcaagtttctgtcgtttttctgaagggaacaagggtattcctggagttaatccacctgacgtcaagctaccactcatagaagcagcttcttctgcaacaagagaggaaagtacagaggaaagcatctgtgcagaggaagtagatgcagcaagcctagcagcaacagcagcagctcttgcctttttgctctcttcatcattagctttcagaggtgcaaaagaaactgttgcttgtgcaagaggatgagactgggtactgcttgattgaacaaaagactgattctgctccattcctttcatagcttctgctgtgtggttagcagcattgtttgaggttttttttctgatattactagcttgttcaatgtggcaacgagcagcctgcatagaaaagacagattgtcaccaccatttgttgcagatgatttatttccagatactcacagatacaatagtaacatagcataataagtacatatcacaagctgcaaattctatctcaaatggaaggaagagattaaaacagtggtcgaatcaaatagaattggaacccagacattctcacaaatattttaattattgtactttgctatgtgctcagaattagattttgtagaactcacttcattaggtcagtatcttttttccctttaatatctagaaatctgcaactcacttcgcaacttgagttcaaaattgggttctaccgctagaacaagattgtatttttcaaatataattccgagtttttaattttgtatactcactcatattttaaagaataataaaacaaaattttacataagcggttctatgatcataggtcattaagtcactgcatgaaatcaaatcatataatatatcattcaaccaatattcatgcaattatatcttagcttaaagctcttatctactaaggatcaaaaaagtgtagtagacagtatcaaatatggattatcaaaagaaaaccaaggcctaagctggcagaatcccaactttaacattcttgcttatacggacttcagtaattaattaagatttcactacatgttttttctaaaaaattatccaacaaaggaacacttcttaatgggtattacttattgatggttagtaataataatatatattttcagtatatatatattaataatatatatttttattattattattgttagtatatatgtttgttttgagagtttaaccttgaaatgttattcccttagtaatataaatactcttaaggagggtaatgttgatacattaaaaattgctgggattaattatttcactccattatattaatttaaatagcatttttgaattaataaataaatttaaataccattaa

SEQ ID NO: 30556 - DNA, 1251 bp, Cannabis sativa
tgagtggtgaaaggtgcaaactttgacagaattttaatatttgaaccatttagagcatgattcatgatcccatcaaattatgaagttataccatttgaagtcgtgtaagaagattgggaaatttcttacttatgtgataatttttcttgctgatacaagattatagcacttttgtgtttcaaacatgcatatatgcattcgttgcttagagatagtttcagtatataattgactactcatgcatttttttgggttgcccattattctggtgcttcattgcaggttcactccatccgtgatgcagctgctaacaacttgaagcgtcttgcagaagaatttggtccagactgggcaatgcagcatataatcccccaggtttattaataattttgactttgcaattgttgctttaactccagtggttgcattttttttttcaaattttttgggtgacacattacaagaacttttgggatggaattcaagtaactgcttacaatgagattttatatgttgatggttttgttttaagttaaatgagatttttgttcagttattgataaattaatattttgtgtatttatcacataaggcagtgctgaggtttgagtccctcctagtacctacatagcaattgttctagtttcttggtccccaaatattgtagggttagaatcctaatttcaaaaaaataaatataaaaagaaaatcatattatgcagttcgaattccctttttatttgtcttttttgatgaaaataaacttacatgctgatatatttctaattcagcagaaattgtcatgttatctggacaggtattggagatgattaacaacccacattatttgtatcgtatgactatattgcgtgcaatctctcttcttgccccagtcatggcttcagaaattacctgttcaaaactgctgcctgttgttgtcaacgcatctaaggacaggtacctagttaattcgtgagctataaactttatttgtagcaaggatatgatttggtatggtgatttttgattgctctcctgaattttcactttcaagagtacccaacatcaagttcaacgtggctaaggtgctgcaatcgctcatcccaatagttgatcagtctgtaagtatcaaatacatatatattttgagctgagctgcatcagggtttcttacacacgttgtcaatactttatttaataagggattctctctttttctaaattgggtttctgtatatcaggttgtagaga

SEQ ID NO: 30557 - DNA, 2346 bp, Cannabis sativa
attaattaattttttcctaaaaaaataataattataaaacaatgaccacacaataataagtgcagctgtcaatgaaaaattcttattgcccccttttggaatattagataaccaaatctatatatcttatattacccctttattttctttcttaatttctatattctttcgttatttttttcacattaatgtgtttaattgatttatatggatattacttgatgtgattagataatgacttaattgggttaaggccggtttgggagtatatatcattataattcacatcacatatctatatctatatatgtatatatataataatatatgctttttatatttattttcttcttttaggtttcaaaattgattagctaccacacacacacattattattatttttattctaattatattcaaacaattaactttcttcattatcctttcctttcctataattatattctagttattttgttttgtttatttttataaattgagaaattataataactaaaaagagtgaaaatgtgtgaaaatatttatatgaaattaaatgtggtggagaattaatatatattaaattaatagatgtaaatatgtatgtgtgttgcattaatactaataagtagttgggtgaccattaccaaaccacaaaatccatgtgatatctaactcatttcaatatttgacattatgtaaataaatgtgtgtatatatatgtatatataataaggtacatttcacataatgatatacatgctttaaatttataccacacaattaaatatgttgttgtcccatactttaaaaaaaaaacaaaaacaaaaatacaatttgtataaaaaaaaattaatatttttacaattttttttttaaattttatttacatatttttttatgtatttttatgttacatttttattcttttgttgataattttttgttatttgtatattatttttttatgctgttttgatgttatttcttgttactttcatgtgattttttttttgtatttttataaaataccataaaatatattaaaaaaaaactttaaacgcaaaaatataaaattttacaaaaattggtattttatgtaattatctcttaaaaatatcaatatttaaaattaattacatatcatactattattatagcatataattcaagagttttgttacactaatggtgcctaatatatactttacgcagactggttgtagactaaggcagatcaaggtcggccctaggctcaggtgaactaagcccgtgcttaggatccaccatcttagggcctcaataaaaaaatatacatattttttaataagtttataaaaatactatttattcatataataagggcctactttatttttttcgttaagcctatttcaactcagagcagatcctgtgagagattaagctcgtactttggccaaataattaattctttaattacatggtgtctcaaacttttaatcccttagcttttcattcaaataaattttaccatttcaccaaattatataccatatttaattaacattaagtgagtagaaaaaatatttggatagggatcgcaaaaaattattttaccttaggctctaaatagcttaagattaaccctggctgtacgagtagttaacagttttttacataaattattaaattaaaatatataaaatttaatattaaattacatcaacaaacaatagtaatattatttttgtggtgttgggtatgaattactatttttcataatttaataattttttgtacaaattatttttttaatgcattatttagaataatgctaatttatatataggttattggaatttttactccttaaactttaacatgtaccaaatcatattccgtgaacgtttttagtcattaaaaattcctcatgtactattaagattgttggatttaaggatagttatctagtttaattcaattttacttattctgtgattgtgcatgtactaaatcatgtttattagactttgatatctaccaaattatacctcttgatctttaacgtgtactaaatcaagccctctgaacttttatctatgttagactttccttactaaaattaaaaaaaaaatcttaaatctaacaatctcaatggttcaggaggaatttttaacgaccttaaaattttaagggataaaatcctaattagccatatacagtagaacctctattcaagaatacacttgggaccaaacaaattatattctacttgagaggttataactaaatggagttacactagaaaaaaaaaataaaataccaaaaaatatcaatgtaataataataacaataaataatta

SEQ ID NO: 30558 - DNA, 1815 bp, Cannabis sativa
  modified_base (74)..(74): a, c, t, g, unknown or other
tttcaatgattatcactacattgaatatttattaattttaaaattatgatattaaaaaaaactaaaaactaaantaaaattaacatacgtgacttgacaggtaacatacatgtggaaattctcaagcgttgcatccaaaaattcctcaggtgctctggaccaatttctaacaatctcatacaacacattgcaaagatttaaaggctaaaaatcagcaagactagatggattatcagttacaggatgagattgtgattgtgattagtaccatgtaattcataccatcctagactcttggacgggatcatttggaacaaatcttcatgaacattggcctcagaaaactgtctagtaacttagcatttatgtttatggcgtgagaaattttaactgaaatcgcttcaagcacatgatttaagtcttcatgaggagaagccaaagtgaaaagcccatcaaaataatcacaaaaaacactacccttagagttaagctcctaactgaaagcaaaacgcaaaaaccgtccatcgtaaagaccctttgtcgtggtaaaaatctgaacaagagacctaactctactccctactccaaagaactccaaagttgctacattttttttaatttctattccttgcttttcgactagaagctcacttataagtaagtctgcttcttaaaatgtgcataggcgaaattagacatgtacttaaagagtttaatgcagacgttgaccgcccaaaaatgttacggatgtttactttgatacgagcgaggtcaccaagtaacgattatgctttttttaacataggatcagattttgtaccctgcgtccaaacattatagtgctgagtcaacagcaatgctttttgaaaaatatattattattatgataccacatctaaggccctgatcgtttctcctcaagaattttcctcaagtattggcattaaggtgtttgttgacggatcactaccggggcaactagtattggagtggtattctatcaagatcattttattagtgtgtcatcagtagaggcctttaaaacatattactttgtttttattgggtttttcgttagttaattatgtttaccattcaatgtattattggataatttgtttttttttttttaatttatcatttaatttgttgtttattttaccaaacaatcaagaaagagaggaaaacagaactctgtgtttattgatcaatgaatgaacagagtacaaagaaatgaacttatatacagtgatgaattgagagaacttaaccaactgtaactaactgaattctaacaaactttaactaactccaccagctgtcataacaaccttcctaaccaaccgtggacacaactaactcatcttgatagtttactaagtatttcatgtaaagtgattgtatgatttgatttttttatctatcattagattttttttttatcagttattgtatacaggttcggttcaattgattttcatgctgttcatggaaaatgaatgagaataaaaaaaaaatttagagaaataatcctctgcattcttccttacacaataaaatgactctccactaattttgaccaatcagaacacacacaaaaaagccacactggtgagtagagatagaaaatgggcggttaatgcatggagaatgcaatccccgtccccatccccgccccatccccgtctaataacttacggattcggggtaaaggaatacccatcggctatggggaacccatcgggtatccattaaggcaaaatgaaaaaaaattaaaataattgaaaaaaaaaaattaaaccaatattctcacaa

SEQ ID NO: 30559 - DNA, 1416 bp, Cannabis sativa
  modified_base (1220)..(1222): a, c, t, g, unknown or other
acattcaaaatcttcaaaagactaaaatcttaaatgaaactagcaatacgtggcttggcacgtacattcacctagtataagtatatataaatgatgatataaatgatgatatatatatataaatgatgatatcggtatatcaataaaatataaaatttataaaaagtatggcttttttatgaattaatattttagtttgaaatcaattggtcacaaatatatatgttgcagtactaaataaacatatatgttatatgcccattgagagagaattgaaattatatgcatcaaacaaaaattctaaacaaaatacaaaatggctaatgtagtcatgatatttttgacaaaatatcattctcaaatatcattaaaaaaaagcgacacaaaatctcaaaaaaatttaaattttgttttcaaattctcatacagaattataatatagagtgatcttgaattcactaaagtgagactaaagaaaaaaatttaattcaaaataaactcaatgtctctaaagaatacaagatcaaaaatctttgaacatatataaactacatttgatttgatcccattctaggtacgtactcaacctaatttctaagattagctacaatcacaagtcctcaaaatcccaaatgaggtcatttacctcatcaaatctcaaacgaggtcactcacctctattaaaaaaaaaaaattctaaatgaggtcattcacctcaaaaatcccaaatgaggtcatttaccctaaaatatcaaagtgagctaattatccacaaagttctcaaagatacaaaattttgaacgcctaggaactacatttgacttgattcctataaaaggatatgtgggcaacttagttgctaagactaagtgcagtcaccgataccgtaaaatgatacaaaacataaatctcaaaattccataaaaggtcatccacctagggattttccaaaatttttaaatgacaaagaattgctgaaagtagtcatctaccagaattcttatattcaaattcaaaaatactttattctgaacgacaagtggcttgatccttcacaaagaaggtatgtaggcagctcagtctatcaaaattactgagttcaactgcaattccgaatttcccccaattttttcccaaaatttacatcaatcatttaatatcatcgtaattggaatcaaatggtgtttcttttaaataaaaggattgtaattaagagattnnncttataatcttggatgggtcgaatctaaattaataaactcttatgctacaaatttgacataggtgaaattgtgttttgcatttatttttaatactctaaatgtgaaatttttgcttaacacttgtcattcaaatttaatttaaattttacattttcattctcaccaagttaaacctcataccaaacatcccata

SEQ ID NO: 30560 - DNA, 1696 bp, Cannabis sativa
atagtacattatcttccctcaacttattcttttttaaaagtagttgaactatgtttattaaattattcttaataaattaaatgaacagtttctagtatttgcatgctccgattcccgagtgagcccttcccatatcttaaatttacaaccaggggaagctttcatggcccgcaatattggcaacttaattccaatatttgacaaggtatatattaaacaatttcctaattatcaatcaaaatttaaaatatttattattattattaattctacatgttaatcgttgttaatctctaattatttaacagctgaaacactcagaagttggatcaatcattgaatatgcagtacaagagcttaaggtaaaattcatcattttgatttctatttattttattaattatcatgttactaattattcattcatcttaaaatgttttaatttttatatcatgacaaaaaatatttacaggtggaaaatattttagtcattggacatagtcgttgtggtggagtaaagagactcatgtctcaccctgaagatggttcggccaccttgtaagataaaatttcatttttaatcggaattgtatatgaataatcatatacagttagattatatgtgtatatatttggtgtttatgaaattcatattctagtttttgattcattacctaacatgttgttgaaatctacagtgattttatagataattgggtcaacattgctcaagctgctaagatcaaagtcaaaactcagcatagtgatttgacatttgaagaacaatgtgaaatatgtgctgaggtaataaatatgtatatatatgtcatcttattagattaagtatgaaatatatatatatgacattgaatttgaatatgataatcttaaaaattaatactctaatacaatttgttgaatatcattgaatttgcaggaagcagtgaatgtgtctctgaaaaatctacattcttatccatttgttaaaagtggagttgatgagaaaaagatagcacttagaggtggatattacaactttgtggatggttcatttaaactatgggatcttgagtagtcaatatatttttaaaccccatatttaatgttgacttctacaccagctatgtatctaatcataattaataatttgtgtgtttaattatttgtagtgtgttaactatttaagcatcatttttcttatttttagtttttgcaactaataaataatttaaaaaaaaaaaaaatagttattcattgctttttctttataagtttgtttcctctcgtattgtaatatctatcggttgatttgtaagaaataataaattctttcccgtagctaatagttattgggttattttagaattactctatatatattattttttttattttttttttaaaattacggtttgagttgaaatggtagtttttccagtagtttttaaatgaattgctattcggattttagttgtgatttaggttgctccgttatttctatataagagtttttgtgtggaattccgtaaaaatacaaaaggaaatattttaaagagtgaaaataaaaaaaaaatcttttttttttataatgaatagttattcattttgttttcaaatgtacatgtaataaattatttaaatatgtgatttttgcatcgtattcatgttaaaaaaaaaaaaaaagataataagtggt

SEQ ID NO: 30561 - DNA, 4303 bp, Cannabis sativa
cggtcggtttttggattgtaccaatccagaccgaaaaccgaattatggatttttatataaaaaaaccgaccaaaccgaccgatgctcagccctacatcttattcattaattaaaacaccaaataagattgttgtaccaaaattttccaactaaacatggatacatattggtggtttaaaacaaaaatcatagaaaaatttgcaaggatatgaattttgttcggtccataatcattttatagataattaaggttattaattatctaaaaaatgtaaatgagaaaaaaaaaaaggacatcagaaactaaagttgaatctctagaaacataagtggtataaaagtttagcataagtggtttcattttatatataatatgaaagaaaaaaagattggctgagaactatttgtttaattattagacttttttatacaaaaatctaattattgaattaattgaaatttgaaaccagttgagtagagattcgaaagtaggacttctctttgtgagacaaagtataatattactagactagattatctatgaccacctaaattgatcggataggccgaattataatataattaagggaaattattttatatagtatatatatatttttttaaaatttaggtgttgggttgttttattggtttttttcgcatgtaatttctacgtggattgttatgcggattttagttacaatttaaattaatccgttaattgctatagaaatttctgtgtaaaatttcataaaaatacaaaaaaatattattttaaagtataaaaataaaaaacccctttaattaaaatatacgcctaatacttaattacgaattgggtcatgtaagaggatttagacctataaatatgtgtacaaatgttagccaacaaagaaaaaagaaaatagtcagcatcacttttgacttgtattcttctccgttatgaaggggttggtctaagcacggacccaaaagagatgattagtgtataaattgagtcacatatcacataacatcattaggtcttttgttttaaaacaaagtctttctcacatgaccccactcggccactcccatctttgtcgatctttattttttgggggtaagtggcacttcatatacttactaagaaattatatttgaagtttccttattcttacataggaagctctctatgaacccaccttcatggaacaaacattagtaacattatatatctatacaagacaagagctaaccaagttcacttgtactagtagtgctagtaccaacactaagtttattaaatcacatatggatcactctcctgagaatgatgacaatgttgatgactccaatttcgatcaattttccgagtttttgatgtttgatgagtggcctgatgaatttcatcatgaccaccccgcgatatctcagtctcagtctcaatctcagcctatgttgaataatcctgttacttatgccaccgacgaaatcggtggaagtagcagccaccttggtggacacaacactggtaaagctagcaaacactctacatagaatcattcataaatgtcatgtttttatgttatgaattggtattgagtttgatttgtgaggtaattgggttttgtaattgtgtatcaggagagaatgtgcaaagtggacaggaaagaagggaagttagagaaagagttgcttttaagataaaatcagaaattgaaatattagatgatgggttcaaatggagaaagtatgggaagaagatggtcaagaacagcccaaatccaaggttttcataataaagaatcaatcaaaactatgctgcattagtactaatttgtgcataaagattgctattttatacaaatcatttcttctaccttgctaccattatatttatgtacatattgagccaattacctttattatatatgcaatttagcttaattattacaacaaagttaatattatgtctataaatattatattttattacaaatatatgtcgtaaccaactgaaatgcatatacattttttttttcaagggcgactgtccacctcgtttctacgtgggtctgcccctgcatacatgtgttaaattgctagaaaatactactagtgcctagcatcctctttggtgttatatcgctattggtgtaattaagtatctggtctcatataacttaaaaaaatagcttttaaataatatcgttaaccaatataaagcgctacctatggaaggtactgggcaccactggtgcccaataataatactctatgtttaacacatacatacacacagctttggattccttcccgttagagaaaaattatatatatgtataaattcaatcaattatctatatacatgtagatgatttggaccaaatttaatataagatgttatgtaaatgcagaaactattacaggtgttcagttgatgggtgtcctgtaaagaagagagtggaaagagacagagaagatcctatgtatgttataacaacctatgagggagtccataaccaccaaagttccttttagttactctacttatggtaacctttgggaactaatgaaagtggaagattcaaacttggtaacaagatagtttagttttgtaaccaatctcttattcctcttcccttgttttatgggctgttgttgttgtagttgtatcagttgactacaaggttgaccaagatgcattcctctgcttttttggtacaagcaaagcatattagagtttcttatacttaccagatttgtggagctttgaaatctatgcactcattattatggggatgggttgcaaatacttttaatatttcctaatagtttctaagaaactaccaccattgggttctatgtttctacttttttgacaataactaaggaaagaaaatatctttattccaacttctagaaatttatatgattatatcctaattttcttcttaatataatgtttataataataaaaataaaatttaaatattagtttaacgtgtataaagaaataaatagattgtttgaattttatttcacattatactttattcaaacttttcaaaaataagatagtataactatgatataagtggttatataaaaataataactttataatttctccatataaagaaaataaaaaatgtttgtcttcataataaattctaacactataaacaaatgtaattcgtaatatatatgtgtataaattgattcagttataacaattaaacgcaaaatattcaatatgattatagaatgttctgttttaatatccaattaagttgaattggttgttgaatctaaaattaaatataattcaaataattagatttatgttgttatgtttaaaaaatatatgtataaaacacttatatatagaaaatttttattgtagagataattgttttgtcccatgttatgagaacactaagtggaccattgatttagcatagaaaataagttcatagttattcaaatgtattggacaatattgtcctagatcaaatgtaaaagtatagagtcatatataagaacatgggctactccactcatcaccaattgattttaagaaaaaatcctataattctcaacaaaatgtactttcacttgattatgtattagtatattgttatctttatttcaaactctactccatatactaaattgaaagaatccattaaaatgaaaagattttctcctataagctggtttttttttgtcttctttctttcttctatggcttgtcatggaagcttccccaccaagccttcattgacaacaagccatttgcatgaggtgtgcttgtctcaatgttagggctgttattagagtttatctcacattgttaatgtgtaagttagggctgttattagagtttatctcacattgttaatgtgtaaaaataaaatatcatatataagatgaataggctactcatccttctatcctattgtcaattaatttggagataaaatcttatttactttatcttaaattctaacatttgtataagtttgccttgatgctcaaatttcgcggtccatgtctatggagttgtggtgcaacatttcattgtatataaaaaaaaaagatagataacaatttcattttaaataaacaaagcaatactgatgaaattcataattttgttatactatgattttttatatatttacattgctaagttatcaaaattatttttaatttggttgagatttttttttttcaattgaaacttttttatgtataactggtaaaatcacaaggaaagataaaacccactcacttagaaaataaaataagatttaca

SEQ ID NO: 30562 - DNA, 1434 bp, Cannabis sativa
  modified_base (578)..(594): a, c, t, g, unknown or other
ctttttgcaaaataaccttccaaacgttgcgacaaaattagggctagtcctatgttaagcagagctgaccctaagtaaaatcgagcctcaggaaaaaaaaattgggcatttttttaaaaaataaacaatatttttaaaaattattaaaaaaatatatatttattaatttcttttttagttgggcccctaataggagtgggccttaggcgggggcttagctcgtccctaatgttaaggcagatttggctaggcacgcactcaagcctggccctgggtataagcaggttaggcctgtgcctagggtccacctaactcgagcccaaaaaaaatttgttccaatttaaatccaatttaaaattataaaattatacattttttttacattttttttttatttttatcaattttaaaaaatactacatttttttttaaataaaggctcaagaatattagaggccacttatcttagaggccaaataaaaatatcatttttaaaaatactatttattaaattttaaaaaaaaaattcttaagatttatttcaacttagagccaactctaataataataataataannnnnnnnnnnnnnnnnataataataataataatgtattcgaacgaatattaataagatgttatttagaaaaagaaaatacaaatttttcaaaatgtttaactaagcaaaagtttattattaataataatttaattaaaaaattaggattttaaacttacgataatgcaacggtcttattaagagtagccgaggagaaaaagagggccccacttaagtaaaacaactctccatcgattctttctttgattctttggtcaatttcttcagcgttgaccgaaaatggttgatccgatgcctacaaaatgacgtcgttttattattattaaatctaaaaccaacaaaatctaatctaatttaatttagtttaatttaatgattaattaccataacccatccccaagtatcagcaaaagatggtatatgagctgtgtatgctattacatctacaaaaaaaaattaaaaaaatatttatataatttatttacatattaataataataaaaaataaataaatgaaaactcacatttgaagacttgtttgatagtattgtgaatagaagtgaagacttctttatgagtaaaaattcctgctggtccagcctattgttaattaaaaaaaaaatagttaattaattttttaaattgaaaaaaaaaatgtaattagaaatatgttaagaattgaacctgagtcacaaaaatgccattgggctttagtttgggcttgagtattttttcatagaaagatttagtgtaaagttgataacatgggcctccttcaactgggtcagctaaatctccaactattatatcaaatttctcactcctttcttctaattcagctctgtataattataa

SEQ ID NO: 30563 - DNA, 9255 bp, Cannabis sativa
ttatttactcacttatagaaaaaattaaattttatgctgaaataaattatttagatcataatcccacttattacctgattaactcataatataaatataaatactaattatttaccgttagacttatcgggatattacataatgattgtcataaccctgccagtttctaatgctttactttgatatgtcgaggtgttaaatacttagacacataattgattacatattttttcattctacaccaccaattgtaggatttcaaattttgatatactttagtggtatccagatgcaatgaataagacgtaatatgtccttcacctaatatttccttcttgaatttaccactgctcgaaacacaaactcgagccctatagagaagtattccctttattcgagattgagaagtcctttgcctaactagctaatacctcctctcgaatctttattaactatgaatctcctaattgtatccctttgattatttttaatatgtctgactgaagtgttaggttatgaagttttccaatcacgaatttaataccagccctaactatatctagagccaactgaaaagaaatcattgtagtgctaaaaacttgaataagaccttttttgctcaagcatccaccaccacattcgctttcccggggtgatacaaaatcttacaatcaccatctttgtctcaatttaaatctttttgggtaaggaaatacttgagactcttgtggtcagtatagatcttgcacttttctccgcacaggtaatgccaacatatatttagggcacactcaacaacagcgagttctaaatttggtgttgggtaatgttgcttatactctttcagctggcgagaagcataggcaataaccctgtcaacttacatcaaaactcaccccagatcctacatggatgcatcacaatataccacaaacttcccttgatccactagccaagctaacattggtgttctaatcaattgctgctttaattcttgaaaacttgattcttttggtgagttctgtcattggcactgagattttggaaagtccttccacaaaacgttgataatactcaattactacaagaaaacttctaactttaaaactgttctagatctcaaccagttcttaactgatgataacccgagcataaccaaacttggaggaaattggtttccttaaaattattttaaactaatcatcaattctaaataatagatacttgttcttgattgtcagattgtttaattttcgataatcaaaatacatttgaagggatccatcattatttttcacaaataaaacagagctcctcagggtgacacactaagctgggaaaaccctagatccagtatcctctgaacttgtaacttcaacttcttaagtttaccagagctatacgatgcctttgaaacagactctgctccatgtgccaagtcaataataaaatctatttcctgttgcggtgacaatcccggtaactcctcgggaaacacatccaagaattctcttactactctaacatccataggcccaaatgtttcgggtctgctggagtcaaactcaactgctaaaaatcctacacatctactgtgcagtaaattcttagccttttaaaattgaaatgatcggtatccgaaaaccctaaacagatcctacaaaaacaaaaggctcctcacccttaagttaaaaaggttttaattctcagaatgacgtccaatctgctaatctagctctatgagatcagcgcttaactttaaatgccttaaccaataagaatttaattcgccttttgaaaataaccaacttccctttaggcactaaggttctaaaccctaattcaagattatcccagggcctatccagcttacttaacactttaactaccacctataaatatatatccacagagtcaaataataccgagctagaggaattattgatgagaagctgacatgatgctatagatgggctagctgtagcgttggcctgagtaatagcaaacacccgagctagaataactatttcttcttttcttaactctacttttttcaactatgggcaatctttcttaaaatgtcctaaaaggccacactgaaaacatgttcttctgttgcattcacctaaatgatgctttttacaatgaagacactcacgatatgtataagtttgatgactagctccaccttggttcccacaaaatcttttactttgatctaagccacctagtgtcaaatgagtttttcttttctaatctctgttggaatcaccactatctctaccaaaaaccagaagtaggaagagtagtggttttaccaatactttagtaaagttttctgattcagttaaactaatttattattttttttttgacatattaaactagtttatttttttatttattattaaaaaaagtatttatttaattagttaattaatatttgagtttttggcggctaaactctctcaactattgttattttgcacttaaccctccaggcttaaattttaggagtaaaactttctaaattattgaactgttagcaaatttaacatgacatccagttaactaccttcatggactacttatatgtacactcttgtacacacgacacatttatattggtatacctaatattattatttcaaattcatcttaaaattataaaaataaaaaaataaaatattaaaaaaaatattataaattttttgaaataatttttttataccaaaataaatgtgacatgtccaatatacacataaacacttcacattactgtgaaaaataaatgtcactttaaatttgctaatagtttaataatttagaggccaccaaaatttgagcttgcagaattaaatgaatgttaaatgatagttgagaaggttttgcagtaaaaaaaaattctttaatttttttttattttttatcaccaaaaaaaaaaaaaaaagaaaaaagagttggctggtatttgaaagaaaaaaaatatgtaattctaattctagagtggccaataagaaacagtgagcaggagacttaacggtcaaattgacgggtgaagagccaagaaatggtcgccggagatcccggcgttgtcgtctccaggctgaaaagagaagactgtaagcacaccaaacacgaccgccacttttcaagatgggaggtaattttgaagaatcaatttattccttttaaacaaatttgatttacttttcaagaatttgagggtgaaccaatttttttcttttagagatttaagccatatttattgtgtacccacctaagtaatgaaattctccttatcccatctccgcaacatcatttttgacctgaaggacaggagtataggcatattgtagaaactgttttttttttggttggctgtgtttcaagaacaagaggtgtttgtgaaatcttttcttagagcagttttcagagtctatgcttgattctgtacttagtttcagtctagcttttctcaatttgcccaagttgggaaatttgacatttttagtttacattgatatgggtgttcttaatcttatgtataagcacgtttctttcttctatattgcttggtgtttttcttattgttgtgtctcctgtttttagattctggttggcccatctgattgggaagaccattctctgggaaaggaaggagcagaaaggtacagggttcataatctcccaaaaaattcaggtccaggagtatatgaacttggcattgctgtatctcgaactggtttcggccgtgaaataggcaagcttataccagaacggatagttgtcgtttaccttggacaagctgatagtgtgaggactcgacttcagcggtatggccggagtggtgctcatctgggcaatagctactcctctggtttctcaattgactctaaagaggctcttcagaagggacctggattgtttgaggagattctgttaagcggctatccaattgtctttagatgggcacctgtgagtatattccttaagctcataataagttttgaaaaagaaattatgtgaataaaagtctgggcaatacttataatcttattgatgtctctggtcttgcacttacagaattcaagctgactttccttctggttacaataaatatttattgttagtaatatgctctagttattctgcattgatagttgtggtacttctgggaaaacccttctggggaaaccagtaattattcttttccacccaacgggcatgtactagtttttgagaggaggaatcattttggatatattgtagcagtagtgctcttgcaaatgtcatcattattgttgtcttaagttggttcaaagcaagtttattttcatttggaatggggtcatctaacacatatgtgcaaagttcagaggcataaatagtagtacacaaagacatgtacttttataagtatatcctgacttctcttctttaattgtttcaaggaattgacattttaacatttctactaacttctcctacatttgtatgcttcacactggctgcatgagatttgcaaaattgagcttataagtgggaaacttacaaatgcttcattttttttattctttaatggttgtgaaacagatgccgagcaaaagtgacgcaataagaatagaaactcaactgcttaacacatttgattatgcatggaacacaagcattaatggctcacggcgccccaacgatatccttcaaaagttaaagaaaatttcttcatctaccacccacttttatgatagtgtacttaagcttgtacctttcagtcaaaagcaagtaggtataagaatcgaagcaagaaaatcgccttcaacagagggcaaattcaatcctcgtgtcgatgaagagagccacaatttcctttctcgagttttcaagtttagaaggtcccagcccaagttggttttggatagaagtaccattcctcccgatgacaggaccaccatttgtggtgtagttttgggtcatgattccatttgtagaaggccaccagttgaaggaaggaaaagatgtgctgatcacaaagggatgagggttaaagggacagttaaggttgagatatcgaatggcaatgtctacccacaattcgatcgtgcagcaccatattctagcaatgaggactcaaaaggggtgtcacaggttacagtcaactatcgtaccagtgagaccttcactcctacttgtggtttcatcttagctgatggctctccttgcaaaagtcagccaattaaaggaaacaaaaggtgtattgagcataaaggaaggagaattcgtaaacccaattctgtccaaaatgaaaaaatagaccatcttcttcaatcagtggtttcctaatatatttttgagggaaatttgcaaatctgagaaagttagatttggtctggatacccattcgaataagattaggccttggggtaacatatttaccaacaagttcagctacacaaaacaaaatcccatttgttgtacaagagttatgaataagagactcctaatttatcattccctcacacaaggagggagcaatcacagcttattattctttgttcgagtaaaaaaaaggtgcttgtttctgttgtggattattttgttcaattacttcacataattattgatttattcatctgtatagcagaaattagaattctttgatcataggggtagtagaatcataatcattctccttaattatagttcataatttaataatgtttattacctaatacctggacattggttagaacccttaaatatatgtggacattgtggagtaattctaataatttattattaaacaaatttaatgtagatttgtaatgttataaacttgcttctaaatttgtaatgaaaaacaaaaacaaataataaatttgagaagaagaataaataagtactttaatttaatagtactactagggaaggaagactaatttcgtaaataaataaaacaaaattacagtaaataaaattcaaaataaataagtaaaaggagctgtggcttggctttaacaaattaaaaaagctttctttcatcacccttcaatgccggccggcgatatacgacactcaacgcagttaccttctccggcgactacgatgactgatattaacgaggacgagggatgggtgtggactcagatcaaggcagaggcgcggcgcgatgccgagtcagagccggcgctggcgagctacctttactcgacaattctctcccactcgtcactagagcgatctctctcgtttcacctcgggaataagctctgctcctccactctcctctctaccctcctctacgatctcttcctcaacgccttctccgacccatctctccgctccgccgttgttgccgacctacgcgctgcccgtcagcgagaccccgcttgcgtctccttctctcactgtctcctcaattacaagggtttcttggcttgtcaggtattttatcagtttaaaacctaattctaaatttcttgaatgttcaatgttttgcaaaatctgaacaagagaagttatgattttgttctgtattcatgaatccacggtattaatttgtggatttaatttaaggctcatcgagtgtcacataggctatggagccaatcgaggaggccattggctctggcgcttcattctcggatagccgaggttttcgcggtggacatacacccggcggcgaagatcggaaaagggattctgttcgaccacgcgacgggagtggtggtaggggagacggcagtgatcggcaacaacgtctcaattctccaccacgtcactctcggagggactgggaaaatgggtggtgacagacaccccaagattggtgacggagttttgatcggcgccggtgccactgtgttggggaacattcatatcggtgaagggtcaaagataggggcagggtcggtggtgctgatcgatgtgccggagaggacgacggcggtggggaatccggcgaggctggttggaggaaaagaacgaccttttaggcatgaggatgtgcctggagagtccatggaccatacctccttcatctctgaatggtctgactatattatctaatttaacaataataaatccaaatccattacaggctcactaggatagaagcataaaggggtttttgtttttgtagtatgagagttctgtgcctttccaatttttgattttaaacttgagcatggctaaataataacaccattttccttctttctgcttcttcattggttgttgtcctttaacaaaagattgattaaaaaatgaaactggtctgtgttggatttggatattgattctttactatgtattttatatttagatgacatattatacttcctttcaaattatatttatttctctatttatatatttaatttctagttttggatgaattgtttaaggaagacaaccttcactccactcagtctcatgatctcatttcccccctaaactgaagaaatgcacatataaggagaatgaaaggttgtaacatttggattagaatctggatttaataatttaataattgaaaacgtgagagatgtaagggaggtttttgttttggattggattagactatttgttttgttaaatgctaaagtagaccatttatttttttctgtatatgtttgtgttaagaattgtagaaaaatataggatttattttatcatttaacaaaataattaattacaaaacacagatgtaaaatagtatttatccttattcatacaaaaatagtaagtaacaatcaaatgagaagaaagatatttttcataaaaataaatacaaaaaaacgctattattatattttaatattaaattaatcaaacagtttaataagtaacgtaaagttaatatttacaactgagaaatattatttaagagtttaattgtgtaaacattctataaaaacttaacaaaattaaaagaaaaatgtattaattaatatattaatattttgattgaaaattttgacttgtaaaataagaacaaatcatgaatataattacaaaaagaaatcatgaatctgaattttatcaaagtagtgagatatgtttaaaattagtaatagtatcaaataatttgattaatcaatatataaataatgaatgttagatatacatttatttcgtacacttagagtgtttttaatagatgagttaaaataatttaatttttaaattataatgaaaatattacaaaattaaacttccaataagtaagggtaaattttaactattttacatatttttagttcaataaataatgtttagctaaatgtaatgactttatattattttttattttttctatgtgtaatattatatatattgaataaattatattaaaaatataatatttaaataatataaagaaaaaaataaagaaattaaggtatctaaaaatttgaagtaaaataaataaagtaaaattttaataatgcattttaattgttgatagtgctttcactactccgaattatgtgcattatacatatttaagtggagatcatattagaccaaaaaagagatcatatcacttcaaattgtgtaggattggatgtaatgtgaatacttagtataaatctttagtcagagtgtaattgatggtaatttttgcagctatataacttattttgctaataaagtatatttttttttaagaaatagtggtaaagggaatagtatataagtccgctagtgtcttctttgattattgtctgtaagtgagtgcatctgggtctccgcagaaatggcttctccttctccgttatcacttcactccacagtaccttcttcttcatcgtcttccaacttcaaatccacaatcactcagctctcacaccccacaacacactttctcctcctaagaacccttcatcctctttcctcttctcttaatatcacctcatccaagcctatctgtacctacgccgtccccaatgccaaaagccacggagtctctcgtcgctacggcggaccctccgagcgtgaaggcccaaggtatctaacagctcgagtgagcttgaacaagaagaaagtaaaaacagagagagaacagagaggtaagatcaattggattgaatgaatcaaatcagtacaaacaccaatgcttgctacttataccaagtaacaaggaagcaaaatgatacagcaaaaataacagaaatatacagctggactaaccaactaacctaaccaattcccaactaactcaaacaaacataactgactcaacagttcttgaaa

SEQ ID NO: 30564 - DNA, 2938 bp, Cannabis sativa
aaagctaaggctgagcagccgtgagagtgagcaaatggaggttgtacatgtcggggcagttaggcctggagcatacgatctttggaacatcagggcttttgctgcatagtcgctaggcaacagacttttgtttatgtatagttgaagttttataaaggtttttgtaagtgggatcccataattttaaatgtatgttactttatgcttttaattaaataaacaaaattttaattgatcacgatttttcgataacctcgttgattagcaacgagctgcacaacaagttaaaaatcatgctaacatgcctaagatagctagggtgttacaatttggtatcaaagctgccaagttatcttccaaagattgtcatgacacgtacaatcaccatcagcaatcagctcgtttcacggtttagtaagcttttattgctttagtagttaattttgatagtatgatttaagaaaagacttttaggaagcatgttagtagcctgatagctgaataggcgcatgttttaaatttccaaaataagctgcaattagtaagtatacttgatcacgatctgaccagactagctcttggttacacagggtgttctaatagtatggactctaggcaaaacaccaaaagccaaggtaactcagtcggatctagtggtggtcagggagttcagattcccccaaatatttgtggctgaggtagaggtcctagaggcatggcacgcggtcggggtgatgttaacccgccacaggttgcccaggctgcccaagattgggaaaataggtttgcagaaatgcaagccataattaatgaacaagatgaagagattcgacgcctgagatagcagggtgctcctgcaatccctgctccagaaatgcaagtagctcctgcccctgttgtgcaggtaggaccagtctttgtagtgaactgaatggaacccttgtatgaaaggttccgcaagcagggcagctccagtttttctgggaggtccttatgttatgaaggttgagcagtggctaacagtgattactagaattctaaattttatgggcatcaccgacaatgaggattttcatgtccacttcctttaaacctcccacggcctctgtcacgtccacggggattaggaggattttaatcttcctgaccgcctccaatctcgaccatgttaccacaacttctcatgtttcactaggcatccatattataggacttagcctgcgagcccataagtcaggtaggtcagacaacaatcatataagttttaagtaccgcacttatgaattttaaggcaatgcattcaaataaataatcataaaactattatgcttcctaatcacataacttactaaacaagttaaggcttattgaatagtgagtcgagattatctctgacgataattgtacatggcttgatggtctttgatgaataacttgccggctctgataccaaaattgtaacgccctaatggttaggtatgctacaatgatcttttgattactgtgaactcctttgctaatcaaagggttttctcaaaaatcgtgataaattaaatttttttgaataatattaaactttaataactataattatataatcatagaaataggtcaggatcctgcttttaaacttgttcacatgttcaaaataaactttacaactatgtcccacaacgattacaaaataagcctaagtcatcctgagattgaattctgcaagtcgtaccatacttacatgtacaatcatccttgagctttggacttattcctgctcagccttagcctttcttttacctacacatgcaagcaataactatgagtcgacaaacttagtaagaaaaacatataacatataatatattaccatcttgtatctaggcgctcatacacctatccacaaggcttaacaaatgattaagaatgttcttaactaaggtacgactactaaaacacatgcactacgtactcctactgtactagtattggtagggtttaaactgtacccgagtaccactaagtgttgtaccacatgcactacgtacctaactgtactagtgttggtaagactgaattgtactcttaaacatcgtaggttgtaccacatgcactcaatacttgttggtagcatatgaatcatataaacaacatgcatagaacatacatacacatatacatatacattctatgctagtcttactttgtttccaaattcaagcatgctggtcaacttgaatggaaatttacgcactgaatggaggctctatgtcacaatcacacaaaatggataaataaccttctaaaacctttttagggatctaaactcgaaactaaaagtttccctatcgatagatagcatggaaaagccctaaatatcaaggaaacacgagaaaaataacaaaacagggaaactacctgaaaatggtaggccgtttctgtaaaaacagcgagccatttttttgggtcttcccagtaaaaaaggtagaccatttctgtagaaacagtctgccgtttttcactgtataaaaataaagagtccccaaatcgactcaaaactaccccaaaccttaccacaagcgccagaatacctaaaatcatcataataaaccatttgcaagtggttaaactagatataacacaaaattagtcaatttaccatacttgaaccaagtttgagttcataaactcaaactatctcaacactacaatcaaccttaaatcaaactcaaataagcctaaaacaacttaactcaatttcagaaaacatcccacaacttttagggttcagacaaaactactactcaacatttgcatgcttgaaccttttcaaaactaagaaagataaaagggaaaagcattaggttcttaccttaaattttcactacttgaattcagctagaactcctcaaaattgttcaacaaaaattcttggtttgctgct

SEQ ID NO: 30565 - DNA, 3078 bp, Cannabis sativa
ctgtaaacactttgtgaaatcccagaaataagatagactcgtgaagtataaatagttaactttaaaactgttaaaaactttcttactatttatattcattattattctagagtttatttattacattaaagcatatttattggttaacaaaattttgcgttaacaattataaaatatatattttgtaatttgtattataagtaaaatataaaagataattatacaaaaaattttgcaattatttatgaaaaatactaagcacataaaaaaattaataaaatataataatgtgagctagacattgcacacgtctagcctaatgttgtaagttcgtgcggggcgtgccggcccgacccatatttattcgtattttttaaaaaatagatcgtggcgtgcagtgccacagaaaaatatgagtcgtaccatgtcgtgccaatatttttaaagggtacgtaggcccgatatttttgtgtcgtgctcggattcgtgtcatgttttgctcatgtcggatcgtatttcttaaacaagctagctcgttttcatattcgggcttgaattcgtgctttactttttcatattttttttcttcataattacaaacgtatatgtatattttatagctttagttatatttatataactttttaataatattttacataatatcatatacaaaaattattagcatctatagaatttaaatatttacttataaatgctcaaatttttatctcacactctataataaattaatatatgatcttaattttttatgttttaataattttaattatagaattatattcagtaatatatttaagttttattattatcttaatttatttataattgataaatgcatatcttattactatcaataaattataagaattttaatatgatgtgtcgtatttttcaagcttgtcgcatgtcgtgccttctgggctagtctattcatgcttacgtgttatgtttttcatgcttctcgtgtcgtacctaaggacatattttttcgtgtcgtgttgtgcccatatataacatcgtgtcgtatcatgcttaagcccgtatattttcttacctagtcgtgctcgtacccattttcgtgttgtgtcaaaaatcctggcccatatctagccaccgatatagtgtaatttgtgatattattatatttaggtggatagtaataattacggtgatattaaaattatagtaagagctataacatcaacgttgagatggccgagttggtctaaggcgccagattaaggttctggtccgaaagggcgtgggttcaaatcccactctcaacattctatttcatcttttttcaggcacattaataaatagtggcgccaaaccttatcagttagcaaagggttattgtttttggtagttatataatcaatacaacaaacaacacaatatcttctccaatggcttctctatcaaacctgggctatgctttccatggccgtgctctaaccacccattttcatcgcccaaaacgcaactcttataacctcctcctccttccgcatcatccatggcgtctcactctcagagcttcttactccgctgtcccaagcgtcgacctcaagactctcgaatctgccattgcaaaggttcttacttactctattttattttttattttcaacaaaatcacttaataaaaatgatttattcctatatccaacgcccaattttgatttgggttttgtattcataacttgggaagtttaggaaaacacaaggcagctaatttgcaaaacataaaataagttgggtgcccaaaagactaatgacattacactagccttgtttcagctctttatctttttgtttttttgtttttttttggtatatattattgcttctcttatgttgaaaatttgctgttatgtgacttttaggaactacatttgacgatatatatttatatataaaaaatatttatatataatgtttgtagaaagatagcacaagtgttaaagaggcacttgatcagctgagtgagcttggatgggcacaaaaatggagttctcagccatatgtctcacgtcgtacggtcagtcttcattaaaaagtatgaaattctgggaaagtgcttactcaaacattagcaacttctacaaacccatgcatatacatataaaattacatatacattaattaatgtaataatcaattcaattgcaagaggcttgatcattcataattcaaatcatatgttactttgattggaaactaaacggttagattgtgtcctcagacatctctcagggagctcacttctctaggaattaaaaacgcggaaaatcttgcaatccccagcgttagaaatgatgtaagtgcctgtcaaactttttctttagctcttgctttattatgggatgagctctctggttttggctcccactacttgttcagcaattgagcttttcaatgtgattttgaaaaggctcaaagatcctattgtagtctctcattaatatagtctaaactcaactacctgaaagaagtatcaatgttgcattttgttctagatttattcatatgattgaatttgaaactaaagatactttcaagtgcaattggtaataaagcatatatgtattaaaacaactgttttatgtattttgatatctttcagtaatacaggcggctttccttttcacagtggtggggacaactggtttcttaggtgttcttgctggccaacttcctggggtaaatatagagaatactttttttctctttttttatctgtgtaaagattacttgtatgtttggattggatcttaactacacattagacagtttgaatcataatctatctcttgtgactgaattgttagatttactgatctgattttcggctattttccatgtttcgggttcctatccctgcaggattggggcttctttgtgccatacttgattgggagtatctctttaatagttctggctgtgggtagcatatcccctgggtaagaaacgcaattctaaattgcctatgatagctttatgattagttgatctgttgatgctctaatgtgctatactcaagtatataca

SEQ ID NO: 30566 - DNA, 1989 bp, Cannabis sativa
  modified_base (1954)..(1955): a, c, t, g, unknown or other
caaaccttactcaaaaaatttgacatatgttatattacatctcaaagagagagtgcaaaagagagtgggatagaaagtttctttagcactcctcttaaatttattaaaggaaaaaaaaaaaagaaaatttattaatataataaaaataatgattaaaaaaattaatttcaatgtataaaaatattgaaacttacattatgcgcatgagaacaactctttaaaataaaaatgattggaaaaacttttaaaatataaatttaaatgtcttaacctactttaatcattaaaacataacaaactcaaatgtggttattttcaatagataataataatcatgttggaccgaaaatgatatgttttaaatttattaactcgtgttaacttgaaaacttttcctggtaacgtaaacatcaatgtacacatggcaagaaggatgatgtcacggagttaagtagacccgagtcagagcagttgacctgggaggggaccctagctgtgcgcccacgttggctttgggagctccgagatagtaagttggacttcaatatcttgaatccaactagctatctttcagtattttttaaaattttttgatgtgttattttcatgggtgctagaacaaggcccagtgtaacgtgcgagccaagatggcacgttacaagcaaggtgatgcccacaaggtggccaagtggtggtgcatgctggtgtgcatgttggtggcatgctcatgcttagtttatacgacagtgatattttcgtaaatatcttcaatattatccgaatcgggaagggacttgataattgctatttatttgggtctacaaattcaatggttcaattggatttgagaaactttgtgatttggtatatggtgatgacaatatgtctacaaagcaaaaatcatatatgttttcggtagaaggcttaaagcttagaatgctctttaaggggggagtatctggtgtcagctctcccccacccttagcaccttgatactaagtgagctactactagtcagtaggactagtagggcgggcatatgaggaccacgaggagactcatatgtctccatgagttggaatactcatggagaatcggccgacccagtagtgcatctaagaatgctggcagaggttagcggttacttttccattggcttgccgatatgccgcttgcatgagatgtggcctaaacctctaagagacttttatggtgtgccttggccatgagtctcaacacgagatgacacaggtagtcattcatgggctggtttgcatacgcgcatggaacggatgcaccatgctagaaagagatagaggtctaacgtatgctactagtttggtggcttgtcttaagggcctgccaaaatgcatggaggcatggtgccttaaggattagaccatggacatatgggagtccttgggcaatgaggaagactgttctgacaatatcgaatggggcatgattagaagcattagcatgtctgtttagtgttggcatcttgccacacatgctaccttggtcacaagtgactaggttagcgacaatgttgggatttggcttatcatagtgggaacctatagatagtgcaagtatcttggaagagaaccttgatacatggatgcactcatggatgcttgggagcatgactcgatgagagttgttcaagagacagaagtgtgcacgaggcaaacggtcacccaaaaagtgagcccatttttactgggatggttggaaggctcaccttggcctagagaagtcaaggtatcgcatggatattctgctgcctaaaaaggtgagcctgtgacagttggtatcagagccaagttcatgttagtgggaagtgaacctagttagcctatcctagaggggatgtaggcgtgtggaaggattgagatagtttgtatgctggaacaagatatcgttgagcaagttagtgttggaaattattttnncaggatcttagatctactcaagatcggaagagcg

SEQ ID NO: 30567 - DNA, 997 bp, Cannabis sativa
ttcagcacgggttaacggacccgcacccctaggcagagcagacgcacctttctccaatactggggtcggcgatacctcctggcaaaccaccatcgctccaccgccgttatcacgtcccacaaccatctcgcctccaaataaatcaccacccacgacgaactccctatttcctttctccaccatattttcaacagccacaccagcaggattaacagagaagcaactttcatatttagattgggggtgagccatggtctgaacaaagggaacaacgttccattgtcattaagcaccgtgactggagaatctagactgcattctctacgctggtgatccagcattccacatttgaaacaaaaaattccaagcttctcatattttaattgaatccatttgttgtctccattagaaactttgaagaaataatcgcagcaaagtggtctgttaacatccacttctaccaagacccgaatccaactcttccaaggaaccggcttggattcctcaagctcaatcgttaccactttacccgccaaagcccccagcatattggcattagttctcgagtaatagtcatggggttgtaaatgaatttggatccaaaaccggattgagttgaacgacggatcttttgcaccaaagccagaggaccacgaaaggagcgccaacatgtcacctttgacacaccacggaccgtgctccaggatctttctgtaaaccgcaccattctcaaagataaaccgaaaagtattagagccagcaagcacattatcaattggctccacccgaaaccgagtcttccataagatggagcaaccatgttccacatccttagcagtaaaagttttggatgaaattattttgccaacaatgcaaagtttggaaaggatattcgtagttactacacttggggccggagaaatggacaccttctttaaagagaggcatctcccattaataccactagtagagtcaccaacctcgtccatggacatta

SEQ ID NO: 30568 - DNA, 3286 bp, Cannabis sativa
  modified_base (3190)..(3194): a, c, t, g, unknown or other
tactaattagccttaattttattatcatttttttgtaattatgaaaattttattaaattaaatcatccaaaactaaggatacaattacagtaggcaaatagtgactactaaaaatacgatcagcctcaataagagaggatcgcgccaaataatgcgcaactctattagcagattacttaaatgacataaagtaaatgaaaaaatagtgcatttattatgatgcaaattttacattataacaattgctgtgccaaatttgacataatatttgttatataacaaacttatataactttttagcaaaccatttgagtacttttttgataagtgagttatattttagctttacattactaatttgcttctccattaaagatactcattggccttttttttggttttttttcctaaatgcacataaatgagctcaaaattacattattatggtgcatcttagttttaaacatgcatatagtataacttataatattatttacatttatactatttcttctccatctttctctcacgcagatttaaagtttttaactttcaacaatgaccatcgcaaggggacgcattcacaatcacccctggcaaggagatcaccttcttcaagaacaatgagattttcatggatctcgaccatttaagcaaagagcaacatgagacaaatctccatgaacggcggtgagacgatctccatggataccttgggagaatctttactttgataatcaatcatggtagtgaccaaaagagggaaaaactccatgtatgtcgacaaatgaagggcctctatgaacgccgactagattatatcagcaaggggaagatttccataattactgacttacccatatattttgggaacaattctgtttttttttttttgtgtgtgtgtgtgtgtttgcattaaatattattttcatcaattgatgttgtttggttgattgatgtaatttgttcaaatgattttattgttttctaataatttttgaaaatgtggaaggaaaatcattgaattaaatttgaatagtataataagaatagtgagtgcgtattaaaattttaatataaactaagttattttaatgttgttatcatgttttttttcttacgttgttgtccatatttctaaaataaatagtacacgcaataatgaaatgaaataaaaaaaaatgtgtgttgatcacaagaaaaataaagagagagaaagaacatcatatcatcaacaatgtctcttgactcatctaatctaaattaagaaagatcaaaatatttctttaagtaatacgattaattttcctataattttaatcttaaaaagggaaggaaaaactgaaaaagagaaaaaaaaaaaaaaaaaaaactacaaattaaagaatgaataagttgttttcatgttgttgtgaaacttcttttgtgctgtttttacaacatcttatgttcaacttgaaatattgtataaattcaagttgttctatattattgtaaagtttgttatgagttgtttatacactacactatatgaacatgtaagaaaatagagtacttttacattttaaagtaaaaacacatctcattcttacattcaaaaaaattagtatagacgtgagaaacaatatgacaataaatattatgttgattttgaatcaagtgggaaattgataaaaagaaattgtaaagatgaaaaaaattacttatattgatacaagcactacattataacgttaacaaacatacaatgacattatcaagttaaaaaatgctacccgtcattaaaaatcgatgataacaaatgcatcatgttctacatgcagttgaaaataaagatttaatatcacactttgtgatgttttgccttgttgtagagttgtaaacacattgtttgctttacttttttcttaaatatgttgtattcatgttattttgatgttgaatttaacaatatcttatttgttatcattaattatttttaagtttttattttgttaatatatggttattaacaattatcaattaattattatcaactattttatttttatgaaaaaaaatatatatttacaaatgtagattatatatgtacatatatatacacatgtaaagaagagagtttgcaaccatccattaatcaacacaagaaaagctcaactctcttcgatactcatatacaaccaaagtattaagttaaaaagagcattattaataattgaaaatagaatattgtaaaaaactcatattttacatgaccttgaaaattaatattttataatacttttatagttttatagttgttgcatgtttgtttttcttattattttaaaagatcttacttttatgttgttctcacgatgacttttatttgttgaaatttaaaatttcaataaattttatatatacttattttaatgtttatatctttactaaatgtaattattagtgaaactaataattaatgcaaaaattaataatgtaatattagttattttcaattttaaaaatattaacaaactaatattctataaagtaaaaagtttaggatgttgacgcgattttcgtcaactgatctaagaagatcataaaaatgtagagaactgtgatgaattaattttgattaataaaatcataataaataaattggacaccaaaaatttatagtagctcttaattttgattaagaagaagaagatcttacaaagatcaattgaacaacaataagcttgacgagagagtgagcgatggcgttgaatctaaatttgagtgaggctagatataaggaaagtgaacaaaagataaatatgtaattataaaagtttaaaaaggtattaaaaaaattttaaaaagtaaaaatgttaaaaattagaaaggataatataaatgttaaaattagtcaaaatagtcattttgtataaaaatctcttatttatatgttaagattacaggtttattattctttttttaatctcttttgaataagttttctttattattgtaaattatttatttaattatatttatttctcacaatttcttttaagaaatttatttccttaaacattcaataaacactttatttgaaaatttattacttattatttttatttaatttaaaatatagatttcattttcaaattcaaactttttttcggttttttgttaaatcactacaaatttttttactttnnnnnacaacaaaacttgtgactaaaagagaaaaaattgtgactaattataaattagggatattggcggctaaaccacctgaactttacggtttgta

SEQ ID NO: 30569 - DNA, 9811 bp, Cannabis sativa
ttattttctgggatattacactattgcccaaccagaagaacacgttgagtaaagatctcctacatatcttttttatctgtttccacaaatatagccaacaaaattttatttttgtgggattggctcgctaaattgagagatttgtggaattctatatttgaattcctttgccaactaattccttctaaatttgggatactcatttgttgtttcaattttttttagcaattgatgtatggaacttcctttataaatagtgaagccatttcactgaagagggggactttttgccattcttaaactcgcaaacactgtcaaaataattgtacactctttgagaactattgagaaactcacctgactggactttgtgatcttgatagttttttctaagtaatataactaaacggggagtaggctattgccgctataaggggctgaaccttaataaatattgtgtgtcgttttttattcttattttaccattaatttctctacaattactatcgctttaataaactcaatgctgctgtcccaaaagcaaggtcaacattttggtactttcattgagagtgtgaaatattatctagttctcatcaacctacgatcttcaatccacttttgaatcaaaaatcatgattttgataagaagatccttgtcgaatgaatcgagcgatcctatggcgacaaacccaagcttccaagcacttgctgacccagaggtggacaacctcaacactcgactaccacctcaaggcaaccaacctacggtccctgcaaatgctaaccccagagctactgggattacaacccctttcactggagtcacattcggtgtctaggaaatagggactgtcagtcagacatatgctaaagagactaggcttggcattggtcagtcctccataggagaatcctgagttaatctgggggataactatgatttggaaaatcttaaggatgcattaggaaaagtctagacacataccaacacactctaccataactaggaggaaacttatgccactgtgaactttgtgttcgaacagcagcggcatgaattccaagagtagatggactgtgaggctcaatctatgctttcctagcaataaaaaataaaacaccgttttagagaagctatcgacttgatcatgcgatttactcagcagattgggggttgtaaaggaaggaggatcagtcatccagacgagacgccaacaaaggaaaaggtcgctacatctcgggcagaagacaagagtacgtgctggaggaatgtttaaccaactatgtccaaacccctatacgggacaaaccgtctagctttaggccccaaaaccaaactatcaaccgacccgtggacgatcaagtttttcctagtcactacctcaggagggacaaccaaaataatttttgacccagacttgaggggaggaaagatgatatacctccacaaccagcaagaggatcttgaggagaagtgaacttgtacaatcaggacagaagagtctaggtctatggttagaatcaatatgccaaccaacaacctcgacaaggtcattcaagatcttgaagtgggcagtaattttctaacaagaatgacaacgtagatgatagtagaccgtgtgataacaatctttgccaaaggcatgataacaatcaggccagtccacacaataattagaataaggacaatgccctaaatgacgacaatcctcccaggctggtgaggtgtaatagccaaaactcgcaaaggatgagacctaggcctagaaatgacaatcaggatgaattaaacccaaggtgaggcaatcgggatggacattttgtcccccgcctaacaatcaaccgattaatgtggagaactatgtcctataaaatagagataattatgtacccttcgaggctctagggggtcaacaagtgacacaagtcagacaatagacaggcaaggttgatctaggggtgcaagcccaattggttcaacttaagatcctaatacgaagcttgaccgaccaaaacctcactggcctagagcttgattggataggaggctcatcattctctgcttgaatcaatttccttgatctttggaccaagttcaaaatgccaactaggaagatgtacacagggagagaacatccatcgtctcacattaagtactttgcgatacaaaaaaacttgcaaggagtaaaaggtgaggtcaggtgtcgaatcttcctgacaacattagtagaggccacttagcagtggtacataaagttgacacctaggaagtttgactcgtggaaaacctttgctttagaattttatgcacaattcttctctttgtggcaactcccagctcatctagaggacttgcaagaagtgaaacaaataccaggagagcctctgaaggactacattagtcatttcatgactgaggcaaaaaaagtgaaggggcttactaaagaaggaaggttagctatactgctaggaggtatcgagcctaaaggtgagttgtaaaaagacatcaagagactcacagttggttcaatgggaaattttttagaccgagtagatgagtttataaagctgaaagaagcagccagacgagtagacatggttggctagggtgaaatcgaccttagtcacactccctcctcggctatagctaatacattcgtctagcctatccaggccttccaacctcagatcagtaacaacgaaaattgtggtataaggcctaataatgggaataatcagggaacaaaaagaaaggaaaaataaataactccgatcagtaacatccttgagagaaggcttcaaagttcattgccttcaccattcttatcgcagctcgaaaaaccatctctatggcaaccaagtcagttgtaccatacaggagattcctttcgatcaagaaagaaatgaggaagagggataccaccaagtattgtcgattccacaaagactacgaccatgacaccaacgagtgtaataacctgaaggaagaaattaaattcatcatcaggagaaaaaatctgcacatgtcttggtcgatagaggtcgaccaagaacaaagggccacccaagtagataataataaaaaatacttgatgcccccactagtggataggcacttacaaaagattattggtggcccacactttgttggagattcaaataaagacaaagaaaggtatgctcagacactccagtatgaacagaatgatgaagaagtattggtcatggaagagaaaaagctaaagcaaccgcgcagagaggaagtcttcttctcattcaatgaggaagatgccaatcatgtaatctatccccacatagatcctttgatcattgaagtgaaaatttctaataagacagtagctcggtcaatgatcataatggggtttcctccaacattcttttcaaaatgacatatgtgttgacctcaaaatttagccaactgacaacagagtcttatttaatactgatgcttacaacgtgttacataataagaataataaagtaaataagacactggattttatagaggtttggcctctttagttagcaagtaaagacctagtccccttttggttgtattgatacctagagataatactactcagatcactatagtgatggaatctaaagtagctctcttaagattacaatatatgaataagtaggcaagtgtcatgagagagagagatagagccttggaggcatgtgagatagaggaagagagcccttggggcgtgtagcagagaggagaagagagaattagggttttcagacttagagttgagagcttagggagtttggaggcttaatgacttagggttttagagacaggctaatgctctttatgtagtagagcatacatgtataatatccttagaaataggtaaatattatatatatttaattaataaatacaaatgattgaattgccccttgaaaatagatatcttccctctatttttgtgggttgttaaggcccaatccgttgcttgacttgttgtccacgaatgagagctgcacatcaaaatcttgccacgccaaaggctggccggtcatgcacctgcaggatgcaggtggggtggccatacaatgcctgcaagttgaggtttgcccgatcatgctcctgccagcgtctggctggccatgtgcctgctagggtctggttggccatgtgcttgccagaatcttccagatcatattcctaccaactttggcaagtggaggctagccttttcaggtggaggccaacctttgtataccatttccatgcagaggttaggcttccttagtcgaacggaccctcccttggtttgaaagtcaccttttggccagcaagcttgttctcaaaccctggccggccatacaagctcatcttgactggcctatagaatcccctttgccggcaaaaaatggtagtacaattccttgacggattgattaactccatttggttaatgcttgatggttttgccataccttgtaaggagactttgtcttgctattggcaaggctgtattccacatgtactctatcttggcttgcgtgaacatgccatgtcaggtagaaaaaaattgggataataatatgaaaagatgagacttcttctcaaagatcttgtcctttgcacacagctagtgtacggtttctccgtacaaagcattgctccattgggacaaatttttctccctcttattgtgggaaaatctttgaccaccaacacgatgttaacactattaactaattggtgttagttttccactagctttggttagttaagagtgtttagtcattaggtagttataattctgttataagtttcttgctctgtttttcctttgtaattagtgtataaatacttgtactcaattccattaataaagcgagctttcatttcaattattttctcctttctctgctttccttctctacatggtatcagaagtcttgactcaagactatgtcttcgtcagtctctgatcctccggctcctgccatggcatttgccactcaagctccaccagtctctacccctgctactggatcttggaatccattctccaactctttgtcctcctctctcacgatcaagctagatcgtgtcaatttcctttcttggaagtcccaggttgttcccactgtcattggacatgatctcgatgagatcttgttcaccggcgttcctcctccccagacccttcttaatggaaattcgaatccagagtaccttcaatggcgacgaaaggattaacttctcctttcttggttacgctcatcaatgtctgacaccattcttgcttccattgcgaactacgattcctcattttttgtatggcgtgctcttgaacagaagtttacttctcaatccaaggctcgaaggctccagatcaaaggacagttctcccatgtccataaaggcaacctctctgtctctaagttcattgacaaagtgcatgccattgctgattctctcgcaattactggttctcatattgatgatcaagatgtaattctgcaaattcttaatgggctcatccccgaattcgattctgtagtctctggcattacctcaagaagtgataccttaactttggaggaggttcaggcattacttttgtctcatgaaagccgtattgagcaccacttagccatgagtgatctctcagtgaaaatgcaagcaaatatggctcttggtcatggtagatcagcaggtgttcgatattttgcccaacctaaccagcagtctctaccaaatggtcgtggcagaggggtctacaaatttcccaaccaaagagatgtgtgtcaagtttgcatgaagacaggacatacggcttttgtttgccactaccgatttgataaaaattggtttactcccaaacaaggttacactgtcaatcgtgcttttctcactgaaattgactgtgattatgatcctcaggcctattcaacaactatgattcaagattttggtgaggacaactcctggtatgtcgactctggagccaccacacatgtcacatttgatcccaccactcttgatgacataaagcctttctctgacaatgacactcttgctattggtgatggtaagaagttattcatttcccatgttggatctgtttctattccctctctttctacatcttatcccctccataagcagtctgtcttatttgtcccttccatgactaagaaccttgttagtctgtcaaaactaactcaagataatgatatctttgttgaatttcacaaaaactgttgctttgtcaaggacaagacaacatgatctgtgctgctcaaagggaaagctagggtcagtctctacttgcttggtgattcctcaagtcacttaagatcaaccctgcaatgtcaccttgcaacctctgccttcaatacttctgattgtaattgtaatatagaccattcttgtactgaaaagtgttttatcacacaacccctgtaatgaacaatctgtcaataaagattcagtttcttgtccctatgagcatttagttttacatgtttcgagtccctctgatgttaacctttggcattgtaaattgggacatcctgctatgtccatattaaaaaaattataaccctcattaccacactgtggtacattaaaacaattagacttttgtaatgcatgtcagcaagggaaaagtcatagactcccgttttcaccatcaccaaaacatgcctcccaaccattacaactcatccacacagatctttggggcccttctcatgagccctctaaagatggtttttgatactacattcatttcttagatgattttagccgttttacttggatctaccccctaaccatgaaatctcaggcttttgaaaaatttattcagtttaaaagcatggttgaaaggtaatttgggttacctatcaagggtgttcttgctgatggaggtggtgagtacaaaccatttgctagattcctatctgatcaaggcatattgttttctcatccatgtcctcatactcaccaacaaaatggtagagcagaaaggaagcatcgacatatcactgaaacagggctcactatgcttgcacaagctaagttggatcttaggtattggtggcatgccttccaatgtgcaacatttacaataaatagattgccaactcctgtcattggtaatataagtccatatgaatgcttgttctcagcaaaacctgactacacaatattaaagccttttggttgcgcctgctggcctcacttgaggccttatcaatctcacaaacttgactatagatctgaacaatgcttatttttggggtattcccctgttcacaagggctaattgtgtgaaaatcaaaatggaaggatatttattgcacgaaatgtcatctttaatgagcatctctatcagggaatttctctcagcaactctgcaattcatgtaagttctgaagcttcaaactccagtgttcctaatgctacattttcactaaaccttgtgctaatttacctttttctggtgctgctaatactactgctgctgagcctatgcatccttcacctcacattgctgctgaaccctctgttatcccaacaactcagcccttacaaaccatacctgagactcgacctatgtctgcacctgatcatgctccaaatataatgatatcccaaccaatgtcatacctatggacatgccctctcttataccagaaccacctacgactgtctgtcattccagtgaccaaacccctcccaccatgcctatctctaccaacacagcaattccaaatacaaccagggtccatcctatgatcactaggtcgagaaatgggatatctaagtcaaaagcctatctagcaaccaaacacccattaccagaatcactcctgccctttgaacccaaatctttacaagcagccttaacagatccaaaatggctaaagtctatgcaaactgaagtatttgcattgaaaaaagtaggcacatggactcttgtacctaaataacctgggatgcacattataagaaataaatgggtacataaaatcaagttaaatgcagatggatcactagatagatacaagttgaggttagttgcaaaaggctatttacaggcacctggcatagactatgaggagaccttttccctagttgttaagcctgtcacagttcgaattgtgttatctctggcaatctcttcaaattggaaggtaacacagttagatgttagtaatgcatttctgaatggagaattaactgaaactgtgttcatgtctcaaccaccaggctttatagatgcatccaaacctgaccaagtttgtctccttcacaaaccactcaatggcttgaaacaagctccaagagcttggaacgataaaatcagaacaagtctgatatagtggggctttattacttccaaatctgacacatctctttttgtccatggctcgggtaactctctcatcatccttcttatgtatgtggatgatattcttataacaggtccaaatcaaagtttaatctccaaactcatttctgatcttaatcacaagttctcccttaaagaccttggtgaagttcattatttccttagtgtagaaattttcagagattcaacaggaatgtttctctcacaaacaaaatatatcacagacttgttagtgaaattacatatggagggtgccaaagtttgctccaatccgattagcaactcaactaaactttcaataaatgatggggaattgttcgaagatcctacactctacagaagtactataggggccctgcaatatccctcactcaccaggcctgatgtggcttttgttatcaataaactaagccaatttcttaaggctcctactgtacctcattgggaagcctgcaaaaggctacttcattatcttgaaaggccataaagcagtcgaaaaaggtatgaccatattgctagagcttcacattcacattgtctttccataagagcattaatcgacctcttagaccgatccttggagcctctaaaccattattaaagtgaagggtattacgaaaatgagtaattgaataagaactaagctttgtttccatgagaaacaagacatggggcgattattgttgaacgagcaatcgtaaatgtctgaatgcgttcgggttccccaatccccgagcattccaacttaggattttcatggcaattggcggggttgcatagcaaccttccctgttgaattgaaagtcactatagaatccgtagtcacagaatcaacaaccacaagatcatctgcacctgaagaagatgatgacgcaccattcataactcgactttgtttgagcattttcctcacattcatggtttcatttggtcttttggggatacaatttggtgaaatattttcttgatctaaagcagcagtttcattggaacgtacagaggtataggcaattgtggatggtataagagtgtgaagttgggaaatagattgtgttgatgattgagtgttgtgtgatggtggataggtagcaaagacattgttggacataggatgagggggtgagttgtaatcgatatcatgcatgtagatatttgaaaggtctgtaatgagattagtattattagtagtggaagtggcggctgtagcaagtggtcttgtatgagttgtaagagatggtgtttggtcaattgggcgactggtgtgtggataatttatcgcagcagtgaaaggcagggtcgaaggcaagagagaagatgatgtgtgtagatatcaagagggttggtttaggggtgtatgaatagtgttttgtccagtgtgtggatgggtaacttcagca

SEQ ID NO: 30570 - DNA, 1464 bp, Cannabis sativa
attttgtgaagtgtaagagtaagtatgagtgatggcggccccagcccgcttaaacactaattaatgggttggagccagttggtgtaggcttactataggaaagtgacgtacatttttccttacatgccaaacccacccaaccccaccccactcctaccctccatattctcatttttttgcattattattattatgttctactttattactatatctatatacacataaattttaatggggcctcacttttgtctaggcgttggtatttttatttttgataataactacataaaattataactaatttagggatacgattttgttacttttacggaatgtagttagtagtacattagatgggtctcagagtacactagatgagtgtcagggtacgttactattttttaaccctaattacttctagatcaatctcagccctcagatcaaattactctctcatcttacggctgccgtacatcacaaaatacactccgtaaaagtacaatcacgagacaaaatcatgtctcaactaatttatttgttttattttctttataatataatgtatactattcagagtcgtctcaatttttaataaagccttaggcaaagcttaactacagttttagaagaaaattaaattaagcttttttagtaaaattattaattatataaaaatttattgagttattgttttttttaaaaaaaacctattaattaattaattaaattatatcattaagatttttattttttatagtaattttatattaatcttcatatgttttattaataatcatcacgttttgttttttttttttcttcatgaatgaatttcaatttatttataaaaaattttcattaaaaaaacaacaattattaaaataatcacaataaaataaatataattttaaaaaaatatatattatgatatatagaggctatttatatataaattttcaataaagaatcaataattattaattattagattaacctgaaatgtaattgttgatatttagtagtaaatattaatgtttaaatttattgaattgaaaatatattattcatattattaaaagaaatgaatattacacttaaaatgtagttcttaaattttgtgaagctttagacaattgtcttatagttaattagactctcatactattgttatattaaatattttaataatttttttttaaaaaaattctaaatagtttttttttttatatatatatatcaaaatttacactataaaaatatttaattttagtcacaacaaaacttgtgacaaattataaattattattcctatactgtgactaaaaggttcgtagcaaaaagtattagttgttacttaatttctttatcactcataaaatatgcaataacaatattcaatttcatagataaacatattacatatagatctaaagaatgtctttgttgattcaaagagaagaa

SEQ ID NO: 30571 - DNA, 2001 bp, Cannabis sativa
gatatgttctaattttctgttttctcccccccccccacccaatccgtttgcatgcccttaattttggtgtcaaattgtgtttccacaaaggttttaaaggtaagaaaagtgggaaaggcttctgttttggttttaagaggatagatccaactatacttagtaaaatcatcaacaaataggatatagtatctatagccttcaggtgtaggatatggagaaggtccccaaagatttgaatgtatgagttggaatgaatgtgtagttttaagagtagaactactaaaatgcatgagatgatttttcccatattgacaagcatcacaaaatgataaggctgaatgagaaaactttttattcatagtctgtaaaattttgccaaggattacatgagagggatgtcctaatcgattgtgccataatgcaacaattcgattggactctttacaattgttaacagaagcaatattagaagtgctagaagtattattacaatctgtagtagtactaagattcactaatggagaatgtaaagcagaagtggctaagatggaagcaattttctgatgttgaggagtggatgagggtagagatagctggtaaaggccttaattaaggctgccctccaaaagaacctgcctcgaaatcttgtcaataataaagcagatgttggagtcaaataagatgacaacattattgtccaaaatgaattgagatatgcttattaaattcttttgaatagcagggacatgcaagactttggttaagaacaaaggtttggatgacaaaatgcgagaatttccaataacaagaatgggaagagaagcaccattacctacagtaagtttgcctttgcctttgtaatcaactttgtctgtgagattttgagcatttgacaccacatgatgtgaagcaccactatcaagaaaccactgaggatcagcaactgtcgaagcagtagcaagtaaggcagttggttcatctgcagaattttcagtaggggcagaattgttttctccctgatagctgagatcaaactgatgataacacttgatggctgtgtatccaacacgaccacacacttgacaagtcaggcgatttaccccacggttgttggaatttcgacctccacttcctctagaagaaccacgaccaccacgattattaggacctgttgtggatgaagaggagggatttttcttgttggcagctgcataatttgctgttggattttgaagatccaatgttgcaatcgatgtttgttgatcgatttgcatttcttgagtttgaagcaagaattgaacatcttgcaaagtgacagattctttggaggtgagagtgactatagcagggtcatactcatttccaaggcctccaagaatgtataagataagctcatcatcggtaatttgttggccagccgccattaacgtgtcagcaagacaacgcatcttgagaatatactcttcaatactcgttgatcctttctttgtcgattgaagtagtccacgaagttgcagaattcttgcccgagaagtgtttgcaaaaagttgaatgagaacattctagagttcaacagaggaggcgcatctggcaacatgtccaagcattacttcagaaatagagttgaataaccaacttagaaggaattgatccaggcgtaaccaatctgatagttctggatttggaatgaatcgagaaacatctgaaggattaggaatggtggctggaggtcttgcccttgcaccagtaagaaatccatccaattgatgagctcgaacagtagaaagcacctgagatcgccaatacaaatagttactgcgatcaagacgaagattaaggggaactatatgattcgaaatcacctgagctgcggcaaggggcagatgaaatgttgcagatgaagaggaagcctcagatcgtattccagcagcagcagaagaggatgccatggatgaaaacttcaagagcagaacgagaaagaaaggaaaaaaaattgaacca

SEQ ID NO: 30572 - DNA, 2559 bp, Cannabis sativa
atcaccgagccactaacccatagaaagggatgtgtgctcggtcgggtgcttacactaaacaagggtcaatgttgcctttgcatccgtacttcaggaaggtggcagattactttcgcctttgtctgacccaatttactcccaacgaaattaagtatctgtctgccctgttcatcctttacgcaattcaaaaatggggtgtgctttctccgcataaggtcagtttgttttttgacctgaagtctacccataagcaaagcaggtcggggtaattctacttctctcagccagatttcaatggtggacaggcaatggggacaaggtcgtgagcaaactcgagggttttgttgacgagtattattttgtggaagggatgggcacaacttatactcgatttcaggagatcccgatatattaccgtccaccccttacaatgcctcttagggacagagctgctcagaggattgttgtccaactgctgctggatgctgctcggaatatcactttgttgaccttggaggccaactttgtggagtacgggctttatccagtagacttcatccctgaccctgtgaaggggaggaagaaaaagtccagtgctggccaggctaaaggagctgagcaggagaaggagctcactcaactaaagcgtgaggctaagttgaagggaggtgaaggggccaagcagcatgctcatgagtattctgagcaggagaaggagcttattcagcttaagcgcgaggcgaagttgaagggaggagccagagccgaaaaatatgctcaagactattctgagcaggaagaagaggctcaggaaagcaggaaaggccgcttaaggggaagaagaccctccctactaggcaaaggcccatcaaatatacaatcgtgatcagggagcccggtctacctgctcggccatccacccctgtggaaggaaacgggaaggccctcttggaggagcaggaagatttgttggatgatgatgccccatcagtacttgttcaggcaaatgcccctgcgaaagtgtagggtactccatcttgtgtttaacttgattatcatgccttcatatctcttatgcttttttctaactacaatatttttattccgtgcagacatgtctcaaaaaaaagcttgaggccttgaagaagagagcgggaggaagcacaggcttatcttctctgaccaagaagtccaaaggcaatgagatgaccccgtccagagaaatggcactcgttgaagtggtcattgacctttctaaggaacaaactgtcatggaccctactacttcaaaaatgactaagtccaaagattcccgagcaggtagctccgataggcctgaacaggcgaagggcggattcgagctagtcagaagcagtttttgaacagattaaggcccctgatccacctctagtactgcacccagagaccaaaagaggcagagaaatgctcacccattatgtgaatcggtcggtccttgaggtgaacgagcagctagctggggcggacaacgacctgtctctacagctagttatgggaggagtcctgaaggagctgttgagggtaagtctttctagcaatttcattttgttcttctttaattagttcaattttaatgtcctctctctgtacaaactggcctgaagatggcttatgcttattcccgagctaagtcagctgttgctcagaaccttgccatttccaacataatgcagacggaagtggacttggtgaagaaagacgacgaggaagcccgggttcaacttggggctgtcctcatagagctgggagaggttaataagaagctcgtgactgctgagaacaaagtggctgagctgacaaaggagctgcaggacacgccatctaccgagcagctagaagccaatattacctctttatctaaggaagtgaccagccttcaagaggaaagagagggtctctgaattcattttcacaggttggaggaggagaataaagtcagggaggaggagcttggagccgaagttgagaagcataagttagaggctgagcaacagaagtccaaagtggcgaggctcaaagggaatgtgaatgccctagagacagctggtctcgagatattttatgacttttggaaggcaaattttgattacttgggcgattccaaagacatgtttctcgactactgcactgctcaggcggcctacggggaatccgaggcgatcacttccacctctcccactaatcaaagtgttgaatttccttctgctcagactaacgatcctacggctccttctgacccagttgacacatacaaggagcttagaactctagccatttaaatgcttcttttcactatcttttttttatttgttgggccataaggctttcttttaagataaggtgaccgcccaagcggtctttaaacttggaatatatttttcatttttcgaacagctagctgaccgggtggcctttaatcccgggtttgaatgcttttgctatccttaatgaatttcattctttgtttataatcatcgtgcaattgtgtttgttttggttttaccaaaagccttgtacagg

SEQ ID NO: 30573 - DNA, 4178 bp, Cannabis sativa
  modified_base (4111)..(4134): a, c, t, g, unknown or other
tctcccaactgatgttactttcgctcctacagcagctcttatggcggcacctcgacgcatagccaacaggaccagatctcagaatccaaccgatgttcacgaagatcaatctccaagaaccgaagatcaccagattcctcaaaggcgatctcactctcttctcgatcgtcatgccaatgaagacgcatctagccccttcttcctcagctccggtgaccatctaggtcttgttttggtgtccaccgtactcactagaatcaattaccagtcgtggaaaaggggaatcaccatggctctggcagcgaagaacaaaatcgctttcattgatggctctctcccaaagcctgaatctggtaactcccttctcccttcttggcttcgttgtaacaatatagtcatgtcttggcttgtgaattccgtctctgctgaaatcgctcaaagtataatgtactttgacctagctactgatatgtggcatgatttagctgaaagatttaatgagggtaatgcccctcgaatctttcaacttcaaacgcaactcactcggttgcaacaaggtgatcattttgtcacctcatatttcaccaaattgaaatccttatgggatgagctgaaagagtttcagctgaataccacttgtacttgtggtgctatgaaggtttttcttgattttacaatcaaaatcaagttcttcaatttcttactgggcttaacgaatcatatgcttcagtccgtgcccaaatacttctcaatgaacatttaccaaatctctctcgagtctttgctatgatcgttcaagaataaagtcaacgaactcttggttcatctgaaaatcccccctggcctcctctgtccgtccaccatccaataaccctccaagaaataaaaaacctagaccttcttgttctcattgtggtaagcccggtcatttagtcaacaaatgcttcttcatacacggcttctcaccaggttatggagacaagaaacgcaatgacaaaggcaaggctcaggtcaatcaagcctctacaagcaacccaactgatcacactactgctatacctgctactgatctcagtttgcaatgccagcaactcatttcattgctcagccatcagcttagtcaggccactcctcgggctgatcctgctatgaacaatgcatcatctaaccaagttggtaactctctttccaatcactctttccattgggttcttaatagtggagctactcaccatatgtgctctaatctctcttgttttacatctttcaaagactcttcttttcccaaacatgtcattttgcctaacggacacaaaattgttgtatccaacattgggactgtaagcataaacaaatatcttacttttgataatgttctttacataccagattttcatttaaatctcctatttgttactgccttggttgatcaaacacattactaccttttcattaacaccaagaattgtgttatacaggatccttctcagagtgtggtgattgggacacctaaatgccatggaaagctatatctcatacatcaagacactcccatagcagctactagtttagctttcaataaaacaagtgtagaccaaaggcataatcgccttggttatccatccttgtacatttcaaacatattcaataaaaaaaattggttcttccattgttcacaatactcattgtcatgtttgtcatattgcaaaacaaaagaaactaccttttgtatccaataaaaactttgcatctcatatatttgacttagttcatatggatatttggggtccttttccaataattagtactgaaggttatagatacttcttgactattgttgatgataaatcccgatacacatggacatacatgctgaaaatgaaatctaaagtccacaaaatcattccaaatttttttacaatgatttccactctatttgctctcaatatcaaggttgtccgctcggataacgccaaagaattaaacatttcgtccttttatgcatccaaatgagtaatacattatcattcatttgttgagagaccccaacaaaactccgttgttgagaggaaacaccagcacattctcaatgtttctcttgccttagaattccaatctcatctcccattggtttattggcctcacctaattgccacggctacttacttaatgaactgtacaccttctgctttactaaacagcagtacatcctttgaaatattataccaaaaaccacctatttatgatcatcttagatcattcggatgtttagcttatggttcgactttaaattctaaacggcacaaattttcacctaggagtcgtgcctctattttcattcgctatccatccggcatgaaaacctatcttctacttgatattgaatctcatcaaatatacacatctagagatgttatatttcatgagaacatttttccatacctttctaccatatcattaactgagattgaccattatttttctcaaacaatccttccatgtcaaaaacctgttgcatcagcaacagtacccaatacaacaaactcacttcagcaacatattgctcctgcagcagtcgaacatgcaccagattcatcttccccacaatctgctgcacctacatcagctataccggcagtacaatcatcccaagatcagcacattgttgttgaatcaacaacaaccagacctggcactactccatctcttgacatacaaaccaccacaaaaggtagacttattatcaaaccacctcatttgaaaaattatgtttgtcatgtggcttccactaaataacctattgaccaattcttgtcttacattaagcttcatccaacatttcgagctgttgttcttgcagtctacacacaaaccgagcctcaaaattatgctgaggcttcccaatttaaacattggctagaagcaatggacaatgaaactcaagctttagacaaaaacaacacttggatcattactaaattacctcctagacacaaaccgtttggttgcaaatgggtgtataaacacaaatataaccaagctggtgaagtagtaaggttcaaagcacgacttgtcgctaaaggttatagtcaaaaacctggtattgatttctctcaaacctatgcacctgttgcaaaattcaacaccctcaaagtttttttggctcttgctgccataaataaatgggaaattcatcaagttgatataaataatgctttccttcatggtgacctccatgaagaggtctacatgaaaattcctcctggttataatgctcctcccaatacagtttgtaaattgaacaagagcatttatggcctcaaacaagcatctcgacaatggtatgctaaactaagttccacattgatcgagggtggctttaaacaatccttatcagataattcgttgttcatcaagaaaacgaattccatattcatagctatcctaatctatgttcatgacatgatcatagctagcaacaataccattgccatatctcaattcactcaaaaacttgataccaagtttaaactcaaacacttaggcaaacttcgattctttcttggccttgaagttggtagaacttccaaaggtatctcaatttcccaatggcaatttactttacaactccttaaagacacgggttatctaggagctaaactggcctccacacccatggaactaaatttaaaattgagcaaggacaaagggaaaattctcctagacccctcagtttatagaagtttgataggtaaactaatctacctaaccatcactaggacagacattacatatgtcgtaaatcacctcagccaattcctctcttgtccacggcttcctcatatgcaggccaccaacagaatattacaatatctaaaacaaactccgggtcaggggctgtttttcacatctgatacagcaccccatctacaagcctatactgaaacaagcctctcccgtgaaaatgtccaggtttctttctttgctgatgcagattggggcagctgtcaagacactcgtcgttccatttctggctactgcatcttccttgggaagtccctcatctcctggaaatcaaaaaaacaagtggtatctgttgggttttatgccnnnnnnnnnnnnnnnnnnnnnnnntcagatttacttattaataaaaatcagaaataacattttatgtt

SEQ ID NO: 30574 - DNA, 1887 bp, Cannabis sativa
ttttattattttattaaataaaataaaaagtcacccataaatttctcataaatcaagaatttcagttatatagacacactttatatagaatagatatttacgaaaccaatagagcaacactaaaatttacatagcaacttacatagaaactatagcaagggaaatatagaaaaaaaaattctcattttttaatttttaaaatagaattttattcttaaaaaagttgtgtttattaaataggaatcatccatttaggttgtatctgaaacaagtggtgaaactaatgaaaaaaaaatgaaatagtttttgaatgaacaacgattgattcagactcagtgcaaataattaattgtcacatcaatatcacatgtataatttaacattaaaaaaataaaaatgaagtatttttaaaaaattattaaactaaaaattaattaatgattaaaaaaattacttacaattatatttaaaaaaaataaattgttttttcaaattaattatacacgtggtattgacatgacaattggctaagcagtcatgttatcatttatttatcatgtgtaacaaaactagaatatttaaccaatttacagtattgaatagttcaaagactatttttgacgggttgaaaagttcaatgggcacaacaatggatagatcataattcggagtcaaaaatcttaaaaggtggcaagccctcgggtgaagggaaggatagatggatttggaccttggaaagtaatggacagttctcatccaaatcggcttacctaacccaggctttagaaagagcctcacactgtgaggttgctccgtcgctttggaataagctttggaacaacaaaaatttggagtgtcataagattctttggtggtgcatcatttctaatgcgctcccggttagagcagaacttggaagaagatttcagattgagaatacaagctgtcctttttgtgggttgagagaggaatctattgaacatttatttctttcttgtgaggtggcgttacacttttagcgatcttcaccttggggcatttatcctgtctgtgatacgggtattcgtgtttgggactgggttaaattcatatgggattttagaaacaaggggatccgagttgaggatatttttctttatgcatcaattgttgttgacaccatctggatgacacgtaatgacatggtacacaataactctcctccggatgtgctgaaatgtattgaccatatttgtacttcttttgcagagttacatgcttctcttttgcctagtcctacaccgatcttgaaggaaattcggactcctcctcctcagggttggataaaactaaattgtgatgttagagtgggcttagagagtatgtgcatagctgttgtagcaaggaatcatctaggcaaggtggttcaaattcacacggctcggttagatttctcggatgctttatgtggagaagttgcggcttgttgcttggctgtttctttggccatggatttagggtataagtatgttattgtggagagtgactcgagaattgctatcaatgcgctcaaaggaaaggtgttccattgggctcttgaaaactatgtctctttttgtatgaagtcatctctttattttattagttgtaatttttctaatattagtaggacttgtaataatatttcccataatgtggttaagtgggcttttacccaccaattatacggctctatccctatctcctctttaccggagaatctattttgttatgaccgcgaggtctaattgcttgtttgattaatatatgaataggcttattttcaaaaaaaaaaaatatttaataacaataataaaaatatttatttagtgtgatattttgaagacgattagaaatttattcttctaa

SEQ ID NO: 30575 - DNA, 5383 bp, Cannabis sativa
  modified_base (58)..(70): a, c, t, g, unknown or other
aaaatttaattatttttttatcaaatttttttatccattttaaattttattccattcnnnnnnnnnnnnnattcccattcctatatttttattcctcccaaccaaacgccatttgataaatattagatgtgtagtattcataactagcttctatatgacattattatatttctaataaatttattcattgcaaaaaaactattcaatacttgtcagctgtcagtagaaataaataaataaattaaaattaaaaacaaatgcaggctgtggggttcgaacccacgcgcacttatgtgcagtagatcttaagtctacccccttaacctctcgggcaaacctgctcatgtgtataatttggtacatttaaatattaataacgttttcgttttatgaaatttcccaattcaataaaaccctaaaaccaaacatcaaaaacataaatcagtgtttgtgtgaacgatcacggccatagtcgtcgtgctcttctttcactgatcacagtgagaagtaatggcggagcacttggcttccattttcgggacagagaaagatagagtcaactgccctttttacttcaagatcggagcttgtagacatggcgaccgctgctcacgtctccacactaagccaagtattagcccaaccctactcctctcgaatatgtaccagagacctgatatgctcactacccctggtgtcgatacccagggacagtcccttgaccctcgcaagatccaagacaactttgaggtttatatcccattttgaatttcattattgttttcagatatatatgtgtggtgttattgagttgaaatttgtttgcttgtttcttattttcttttaaatgaaggatttttatgaagatctatttgaggagctgagcaagcatgggcaaattgagagcttgaatatctgtgataatttggctgatcacatggtatgtttctgaggttttgtttagctaaagaaggattttaatgggttttcatgttttattttatttgtttgcggaattgatttgatttggtatttattgtttgtgagcaggtgggaaatgtttatgttcagttcagagaggaagagcatgctgctgctgctcttcaaagcctgactggaaggttctatgcaggtacacattttttttttcatctatcaaagatataaataccattaccatattattattattaatgttgtttgatgattgtttctgtcaatatagttgttattctttcttaagttgtagcctattagtgcaattcttcaaactatatcatattacggtgatagttgatttcagttactttacttgatcccaaaagttaaatcctttgcttgaacatttgtttgttgtttgcttttttgggttaccaaatggtgttgttaaatgttagagttggattcgttagttgtatagatattttctctcggttagttaatggtgacttctttaataattgcatatctttgatattgtttaattatacacaagaccaagaggggtagctcagacagtcaagcatatgggttgcttccacaaggtctgaagttggaacttctctgagtacttacatatctatctgctttagtttcttgggcctacaaatattttgtagggttaggcagaaaaaaagaagtttagtttgtattttcctttctcaggagtaggaaacattgccttttatttctttacattttagttttttctattatttatgagtatcattattggctggcttggatggttatcagaatgatggaaaattaacatctaagtgcatgctttcgtgaacaatgtaaattcaagtgtacgtaccaattgacttcgggatataaccctaatcaaagatttttaaccaagtgctccattttattaagctaagaaattactgattttgagtcattgaccacatagcattactaggacttaagacattttcagtcacttatggaaccattggattccattttccaataataatcccacattctaatttttcaataatctctgttggaaaatctttttgagtttgtgttcagtattagagtcaatttgctaggagggatattttttttccaacattaaggatgaagacacaatgacaggactcatttgcaacatttaataatatgattttaacaatgaatctgatttcaggtcatagggatttgagatttaaaccagaaccagtttaagaccaaatggcttggcacgattgaattaagattttcccatctatgacccttgtaaattggctcaatggctcgtcttttactcatcttagattacaatttgatgaagcacgttttggtcaggtaactaatagttttccaacatgcatttacctcaaattttaataaatataattaattatataaaaaaattggtttctatcaataacacaggttttattttctgaattaattgttttggaaagagaataacatggcttattataaagtctgtttggtaggaggggaagtagattgtattgggatagggtggtttcttagtaagtaagatggatttaggagaaaaaggataaggataatcaatttcaaatcttcaatagtaactaatttgtaattcatttggtatgaagagatttttggagaagagatgatctctcatgtagtctacaaatgaacgaaggagcgatttgatcttttctcgttccacttttaccaaacataggaaagagaactattattatttctcacccccttttatctatcatagccttacttgattttgtttgtttcttttgatttctgttttattgaacatttctctatttcattctagaattgggcatgaaaattatgctacccctagtttttatttgaaattttttattgcatattatgaatggcatgagtgacaatttttatgtggattttaacatctatttaggcatgaagtaatgcttgattatcctatttgtttgtgtggatttaacatgagtttcataaacatttcagggcgtcccattattgttgacttctcaccggtgacggattttcgtgaagccacatgtaggcagtatgaggaaaatgtatgcagcagaggtggatactgcaacttcatgcatttgaagaagattagcaggtaagtttcatcaaatgctttctttaaagttgaccttgctacctaataaagctcattactcattagttgatggttcattcactgcatgaaacttttagggagttgagaagaaaactatttggaaggaacagacggagacgtagtcacagcagaagcagaagtcatagtcctagtaggaaccgtggttatgaagaacgaccccatggaggtccacatggaggtcctcatggaggcctgcatggaggtcgtggttctggtagaagagatgatgacagggatcaccgatcccatgataggagacggcccagaagccgtagtccagggccaggtgcagttgcaggtcgcaggggaagaagtagaagccccggaggacggaggaataggagcccgccagcaagggaaagcagtgctgaaagaagggctaaaattgaacaatggaacagggaaaaggagcagggaggaggatctgatgaaaaacacaataataatggtgacaatgaaaatgaaaatgaatttgaaaatgagaagaatggttatgcacagaattcaagtcattatgatgatgattatcagcagcagcagcaatagtttggcggacctaaataactgatataattggacttttctggtttgtcccttcatttttatctggtatgattactatttcagtggtttgaaattcattttaatggttggtaactgaattgttgttctctttttttttttttgaaaaaaaatttcaggtaaaccttttcctcccttaaggaatctatacaccctcgctctaccctctattttgataggcggcttatagattctccaggaagatgccgtttttaaattgtggaattattattttttttttcttttgatatttgtgacatgttttaagcctatgaaaacttttagaaatagatttttgtaattttaatttgaagagcaatgtggtgcctaatattgatatttttgtggttttaatgttaaacgagtctttgctacatcgaaaatgattgttgttgcatgtttcttttcccagtaatttaactccccctcccccccaagaaattcattgttggtaaaactagcattgctattatgtggtgtccaatgctagcatatcttgattggtgcaacgtcgatgctaacaccgctacgggggtgaagatatggtcaataatgtacttcatctatcaaccgaaccagcctcagttcttattccttgcaagatggatacttcgaccacagcaaatgattttttggctattagcttagttttgacatccaaaacatttagcatgggaacctttacgagtcaatatccaatcctgtgataagctgcttaatggattctggcaatgatgttagtcccatttggggcagacatgaaaatcttctatcaccagccatgttgatgaaatctaacataagatcaagggcttcaaacttcaagtagctagaaatggagtatttgctttttgctgttatcaactctatttgaagaatcttcagagaaagaggcaaaatattttcaacaatgtctcaatctttattgtagtgtggctagaaggagtatggagaatacagaaaaaaatcaagatttcggagattgtgagaattaaaaaagactgaagagaagactctagccaaaattaaacaatgtctaccttattgagaaggtcatcaatgatatacgacggtggaaacatcgaagactgcacatcaaattagtgggttgaacaataggattattcataaatatacaaaaatggcataatttttgcaattttacagagctgctgttttttcttcttttttgtatatttttacgatgatttttcttaaaaaatattgtcttatttttctgttgtttcaaaacaatattttgactttactgctatgaaaaagtaacatgaaagtaatattattttttttttatataaaaaagtgaaaacttcgtttttaactgtactatataaattttccttaaataatttgctttcatctaggtcataccaaaaataatatgcattggaattaaccgcaaactgagaaatatttggtggggagacaaggataattcattccactctatctcatatggcgaaatgtgcaaatcaaaattcaaaaataaaataataaaatcaagggtggccttggcttcatgcgcactcaaaacccctgaaccaaggttttatctaaagaaaagcttggcacgtagttgcattgaatgtggtctggcaatcaatggtaaaagccaagtttttaatagaa

SEQ ID NO: 30576 - DNA, 2105 bp, Cannabis sativa
  modified_base (628)..(643): a, c, t, g, unknown or other
tatgttgcatccacatctttcaaagatgattagatacttgattctggttgcacctttcatatgaaaaactctaggactctactgactgattacagagattctaagggaggtaaagtcattttgggaaacaataatacttgcaatattgagggttcaggtaatgtcagttttaaaatgtttgatggtgtggtcagaaccctaacaggtgtaaggtatgttcctaatcctgctagaaatctaatttctataagtgttctagatgacatgggtattgttagcaaaattgaatcaggttctatgaaactaagtaaaggagcaatcaccattaccaaaggccacaaacatgaagggctttacaatctggatggagaaccaatggcacaatgaaacaatgcagtcactagcgacccagaaaacctaaaagcagttctatggcacagaaggctggaacacgttattgataaaggcctacaaatcatgagtgattagaaattattgggaaagacagagtaagcaaggtagacttttgtgaatcatgtgtcctaggtaagcatcatagataaaaatttaaagcaggcatacataaaactaagaacatattggagtatgttcactctgatctttgggnnnnnnnnnnnnnnnnaacacatggtggtaatgtgtatttcatgtccattgtaaatgatcattctaggaaagtttgggtatttctactcaatcatgaaaatgatgaattatctaaattcatacaatggaaaacacttatggaaaattagactaaccaaagggttaaaaccctaaggactgataattgtttggagttttgtagtgatgaatttaacaggtattgtggatctgttggaattcagaggcaacgaactgtgaggatcactcctcaacagaatggggtgggagaaaggatgaacataaccctaatgaacaaagttagatgcttactgttgcaatcaggactttccaaaggttctagggagaagcagttctaacagcagcatacttggtgaacagatgtccatcaagtgccattaaattcaagacaccagaggagatatggacatataaacctccagatctctcaaagctaagagtttttggatgtgctgcttatgcacagagtgtgggaaaattagaacctagagctatgagatgtgtattcctaggataccctgaaggcactaaaggctacaaattatgggtaaggaaaaaataggggattaaaaccataaatagtagggatgtcattttaaggaggatttatttccttgtattactaactataatactttatctagtcctaatatagatactaaccctgcaggcacatcagttgatatgcaaacaaggaatacaaacctagatactgttcaagtggaacctgaacaggtggaaaatactcaagaagagcctgctatggaaggaaacgaacaaggtcaggatgatgtaattcagctggaacctatccaggaagctgaacaagaagcagggacattataggactatcagttaactagagatagaactaggagggttcctagacctacatagagattcaattttactgcctgggaagagttgttaacctatgcctttcttttgtgctatgggagtagaaatgactgagcctacaacctatgaagagctatggcagacaaggattcaaagaaatggtctaaggctatggacacagagatggactcactaagaaagaacagaacctggatacttgttagaaaacctaaggggaagagcatagtatcatgcaaatggcttttcaaacacaaggaaggcttaactgatacagatcctaagaaatttaaggcaaggctggtagcttaagggtttacacagaaagaaggaatagattttgatgagattttctcacctgtggccaagtataaaactatcagaattatactaaccatagcaccacaatttgatctggaagtacaccaaatggaggttactactgcttttctacatggagaacttgaggaagagatatacatgcaatagcctaaaggatatgaagaaaaggggaaggaagacatggtttacaaactgattaagtctctctatggacttaaaca

SEQ ID NO: 30577 - DNA, 4412 bp, Cannabis sativa
tcagcaaataataaatgggaaatggaaggagcatgtcgtgttaacctcaatcctcttagattttgaatttcttcttcatgttgtagaagacgtgagagcccttcagaacaaatcaagaacaaatatggtgatagcgggtcaccttggcgaagacctcgagtaggttgcacatgcccaacctcttctccattcaacataaatgagaagctagtggtgctcaggcaactcataatcaaagaaatccatttctgatggaagcccatttttcgcataacttcttgaatgtaaagccattccactctatcaaacgctttgctcatatccagtttgagggctgagtagcttcggtttcctcttgttttatgtttcaaatgatgtaccaactcaaaagcaacaagaatattatcagtgataagtcgattcgagagaaaagcactttgtgtttcagagataaccatgggaagaacctctttgaatctgatagctagggtcttggaaattattttgtaaatgacattacataggctaattggtcggaaatcactcataccttgagtagccttaatctttggtattaatgtgatgagtgattgattgaaagatgccatactgtgcccttcattaagaactcccaaagcaacctttgtgacaacatctccaacaataggccaatattggtggtagaacatagcagacattccatcacttcctgggctcttatcgggattaattgttttaagagcactaaacacttcagtactcgtgaaaggctgtgttagagcatcattcatagctgaggtgattgttgttggaatggtgtccaaaacatggtttaaagcttctctgttaactgaagttgcagaaaaaagatcctcaaagtaagatgtaatgatggtcgtcataccagtttttgaactcactacatgaccattattatcaaccagtgatttaatggtattatgttgtttgcgggaagaggcatatgcatgaaaaaacttggtattttcgtccccattctgcatccaatccactcgtgaacgctgttgccaatacatctcttcttgagctagcaagtcatctagaatattttcttggcatttcaggtcatttaaaacaatgggggtacgatgactgctgttattcaagtctgtaacagttttctgcacctttgaaatcttttttttgagatttccgaacttgtgtttgtgccactgctgtagcaaaccagcacagttactgatgttgttgttgaagattgcacacgcattttcagcatcagcaccttgccaattttgtttgatgatatcagtagcttcttcctcgtgtaaccaaattttttcaaagcgaaaccttctttgcacagactgtttctggtgtgtaaccgaatgctgcaaaactttgacagagattgctcgatggtctgagccatagtaatctagatgctgagttaaaattggttgaaaggtatcacaccatgaagtgttcacaaaacaccagtcaagtctctcttttaaagtatcaagtgacagcctgcccttaatccaagtgaatgaatcaccttcaaaggcctgctcatgaagatgacaatggtcaagaacttgtctaaatttgtccatttgcgactctcgacgaagggctccacctgacttattggcatttgacaagatttcattgaaatctccaattactatccaaggtagtaaaggagcaacatccctcaatcgttctaagagtgtccaagtgagatgtttattatgaacagccggttcaccataaaaagcagtaaaatgccaagtcggaccatttccacaagccatatagcaatcaaagatatttgtattatagttcaataaggttacatttacatcgtctttccaaagcaacattaaacctccactaagaccaacacgagggacttcaagtccattattgaaatgtaaaacattacgaaagcgagaaatagaattagaacctagcttagtttccataataaagagaacagttggggattgctcttttacaagcaatttgagatgacggaaagcactcgggttccccaaaccacgagagttccaactcaagattttcatggctgcttgcggagctgagattcagactccgcagaattgtccttatcaccagtagaatccatgttatcgatggaaacatcaaagtgtgattcagtatcccctgacaaagaagacatgaattgtgcttggttacccctgcatctctttagagtttgcctcagacttaagctctcggaagttctcttcgatagtctatttggagatagattttcttttccaatgtgtggttcagcagaagcagtgataatcgatttgggattgtgataaagccgagttggtactggagaaatcaactgactgaatggtgaagaagcttggacagtagcatttgttggaggatatgttgcaaaaaagtttgaagacacatccatagcagccaaaggagtaaaaacccgtgatagatcagccacattatccttggaatttggctgtgattgcgcctgggacattgctgcagaaaattgcagcagattgcaattttgttgggccgtagtcacacctggtttggaggccaaagttgaggcagtatgcatggacttagaaccattgattgtaataccactagacatagcagtgttggttactgcagggatgctaacttcagtcgatgtagcaatatcaaaacccgaatgcactgatctgttaactccaggaatattaatttcagggatactaactccaattgaagtggcagaggaaccaacccttggctgtgatgattcacccataagtaagtgtgttggattaggactttcacgattctttaagtttggtatggccgaaatgagtgatgtctttgccaatcgggtaagtaatggccaagcattgcccttggaaaaatcagttctatagcgatcataattcgaaatcggtagtggtgcacccttcattgtaggcctatattccaaatctggttcaataccattatccaacttctcaagatagacagagcacttgtcaaaagggtgtcccaatcggccacattccatacaatattcaggtaaccgttcataccgaaattccacccaaaattcctcctttgcttggtgtaaagtgatcattttgcctctcaaaagtggtttagtaatgtctagtttcactctgacacgcagaaatggtccccaaccttcactaagagaatcctcaaatacatccacatattcaccaataatgtttccaagagccattgcaattccttttgttttgctaaggaaaggaagtctgaaaatctgtacccaaaatggtgtataaatgagtgaatcagaggtaactgtttgtccttgagtgggagagtacaacacgatgtggtgattttggaagtgaaaaggttctcgaaggagagccctcactttgtcaccctcacagccaaaacttagagaaaacatatccgaagattccgtgattgttacgggaaatctaccatttcagtgctgcgccatctggtttttgaatgtagataaccagactttctttcctgtaagaactttggcatagagaacaagatcagaagcatcttgatgtcgagaaggaatcagatcagtaagatcgaaaaccccctcttcatcttcagttaaattcataggctttttcatcttttgcatagcagaatccataagtggaaggagaagaatctatgaaatggagatagtgggataatcgaagtagtgttgtgatggaatttgtggttaatgttgaattgatgctatagaaaatggaaaaaccagaagaaaaaccagaagaaaaacaatacaaaaaaactgtcaaagacagttaaaatccataaactgccacagagcactcaggagggcagacgctcataaataggttaaatccgtaaaattattaaaaaaaaaacaaaacttgaaattttgtaaaaatgtaaattttttttacttatttttgaataattataaaataatccttaaataaatgtctaattaaaggaccggtgttacatggatatagggatggatgggtacttaaggtgctaactaaatagaaatgccaatacaagtaattataccgtggctattggcttttgcactttgtcctttttttacacacaattcatgctatactttctttgttattttttttttaataacagtctttgtaatttgttttagatttggaaaactttttcagaaagaaaaaagaaaaaatcgtactggaaaaaaaaaatggattcacacaaatattcatgcaattctttgttagtatatattatttcaaaaaaaaaaaagctatatattatatttattaactatcctttcgaagatagaaaagaaaaagaaggactgtatatgaatatactgcatagta

SEQ ID NO: 30578 - DNA, 1961 bp, Cannabis sativa
  modified_base (1889)..(1931): a, c, t, g, unknown or other
tgtgctatacgttcctagtttcaaatacaatatcgtatctgtaagttgtttgacgaatcccaatcctttatgtgtacaattcgcggctaaccaattttctatacaggacaagaacaacaagagggagattggcagaggtgaaaccaagaatggtctctacatccttgattctacacctactgactttccaatcctcaatgttgctgctgaagtttggcattcgagattaggacatctgtccaacaagcatttgaatctgttaaataaaactctgaattgtaatactgttgttgttcataaaaattccccttgttacatatgtcctttagccaagcaaaggaaattaccttttcccaacaataacaattttgcttgtaaaatttttgacttaattcattgtgacatttgaggaccttaccatgttcaatctcactctggttatagatattttcttactcttgtagatgatcattcaaggttcacttggatctatcttttaaaacaaaaatctgatgctttatttgtcatacctcagttcatatcttatgttcaaactcaattcaattgcatgttcaaatgtttcaggtccgataatgctcctgaacttgccttcaaggacctttccaataaacatggcatattacatgatttcacatgtgtagacactcctaagcaaaacgttgtggctgaaagaaagcaccagcaccttcttaacgttgctcgtgctctgtgttttcaggctcatatacctattaaattttgggcagaaagcattatgactgctgcttatctcattaatcgcacgcctactccaaattagaaaaataagactccctatgagcttctatacaacatggagtctaactacacacacttaagagtttttggatgccttgagtttgcatctactcttctcgttaatagaaccaaatttgatccaagagctagaacttgtgttttcttgggatatcctcaaggtgttaaaggatatcgtttatatgacattaataataaacaaatgttcatctctcgaaatgtcatttttcatgaaagcattttttcttttcataaactgaatgaccaatctactaatgttgatccatttattaaattgatactaccttctaataatgtcactaacactcctataagtgattaccctactactgtttcagatactccaaaaatcactacagaagcaaataatgttctcactgatgcagaagatagcaattttgccccttctatccaaccttctgcagacacgactacacaaaccaacagtgataactcaactcctattccaagaatatctaccagaataacaaagagacctacctacctccgtgacttcgaatgttactcccccattcaagacaaaaattcaactccccatcaccttgataaatatatttcttatgctagactaactgaatcttataaagcctttattcttgcagtgacatctctcaaggaaccacaaacttacaagcaagctatccaattcaaggaatggctggatgcaatggacttagaactcacggctttaaaaaacaacaaaacctggatagtagttccattaccacaaaataaaagagccattggatgtagatgggtataccaaatcaagtttaatagtgacggatccgttgaaaggctcaaagctagacttgtagcacaaggctatactcaacaagagggccttgacgtctttgacacttcctcccctgtggccaaaatgatcaccttcaaattacttctttccatttccaccataaaacaatggcatattctacaaatcgatattaataaggcttttttaaatggagacctcaatgaagaggtctacatggcattacctcccagactaactgttgggttttatgccnnnnnnnnnnnnnnnnnnnnnnnnnnnnnnnnnnnnnnnnnnnaaagatcagaaataatattttatgttgcat

SEQ ID NO: 30579 - DNA, 2438 bp, Cannabis sativa
cgattcacggttcagtaagcctttcctgctttagtagtttattttattagtatgttataagaaaagcctgatacaagcatgttagtagcatgatagctgaatatgtgtatgttttaatttctaagataagcggtaattagtaattttttcttaatctcaatctgactatgctagctctttgtttcacaggctgttctattagaacggatgccaggcgaagcataaggagccgcggtaactcggtcgaattcagtggcgatcagggagcctagttttccctgaatgtacgtggccaaggaaaaggcccaagatgtagggcgcgcggtcggggagatgttaacccacttcattctgcccaggattgagaaaataggtttccagcaatacaagccagaatcaatgaacaagacgaagagatcagacgtttgaggtcgcatggtgctccaaaagtgctagctcttgaaatgaaagtggcccctgcccctgctgtaacactttaaaaacttagacgcgctacagtgattttctaattgatgtgccacctctgctaatcaaaggattttccttaaaaatcgtgccaaattaaaacttttgattcaattactaaacttaataacctttaatataatatttacaaaagtcatgatcccatatttaaactttacaaatattcacaaaatacattaaaatttggtcacaccgcgactacaaaatgtaaccccagatgtctagcagatgtctagagaatgtctagagaccgaacagagaccgaacactccagattgctttgcctcgacatgtacaaacatcatcctagcttagagctcactcctatttagcttttgtctttcctttacctatacatggaaatagtaactgtgagtcgataaactcagtaagaaaagcatataacaaataatataataacgacttgtatttaggcgtccataaacctatttacaaggcttaacaaatgagtaggaacgttctttattagggtatagccactgtaccacatacactatgtaccaaactgtccgagtgttggtagggtttgttttgtaccctaagtaacactaagtattgtaccatgcacaacccttacttttccgtacttgtgctggtaacaccgtaactactctttaaacattataaaccataccaatacactctgtaccattactatactagtgtttgtagtgtacaaatcaaacaagcatgcatatatatcacacgtacatacattcacatttatacaatatattttatgctattcttacctcgttgccgaattcaagtgagttggtcgacttgagcgaaaaacttcatgcttgatggatgccctaatcacataacataaaaaagtaaacgacacaccaaaaccctaatccaggagacccaagcctcaaactaaaggttttgttattaacaattaataccacaataccctaagtatcaaggaatcaaccaactaaagctctgaaatcaacacaaattgacaaaatggattgctcaggaaacctgtcctcgaaccggttaaccgcttttacatgacctagcaaaccgattaaccagtttcacaagacctagcaaatcgattaaccattttgcaccaggtttccccaagcaatccaaatcctacccaaaacatgtccaaaccttaccaaatcttccaaaacatctaatacaacttccaacaacatatttcaagcaatagaatcctgaaatttgtacataatctaaacatgccattaaagatccaaggttgagttttcaaactcaaacttggtcattcaccacatcgctcaacaacatcaacatccagaactcattctcaactcaaattaagcttagaaattgaatcacaactcacccaaaccctaacagccattaaatcacaaaattgcatactcaaacaaaaattaaagcttaaaataacacaaggattagagctctatggttacctttgcttaacaccacttgaattcagctaacatttcttcaatttactccaaaaaaaaaatctaactcttggctggttcttgctaggctcgaataggagagagagagagagagtaagaaaatttggttttcttctttttcttttaatttccccaataacaaaaagctatacttagccgaataacttaaaaatgggcagctaccatgctaagaataagccacctaatccccttaataaaatgacaaaaatgcccttattcttaaaacttaagcaattataagactaggggtaaaattgtccaaaactataaccccgcttaacgtcggtactctatttatctcaaatattaatcctactaagaaaaagattctagacttacccatgtgactcaaacgaccatccatctcattttgcgtcgttgctgagcaaaatcataaaaattgtatagtttatatataatacaaataatacctct

SEQ ID NO: 30580 - DNA, 1917 bp, Cannabis sativa
ctttttatttttaatatctatagagaagagaaataaaaataaacaaagtgtttttagagcattctaatcaactaatctactttatcctttcaaataaattaattttttacagttaaattttctcaattatcattttacttgcacttaactttttaaatttaaattttgacggtaaaacctctatactaagtaaaaaatttatagtgccatccattttctacaattaactgttaatataaactgcttatgtgtacattttggtacatttgtcacaattatattactacacctaatattataatttaaaaaatataaaaattatttcaaaatttttaatatttttttttgtagtattaatgaaaaataaattttttattgaaaacaatataaattttgtgagaataaaaagaaaaaaaaatgtgtgaaaataaaaacttacatgtatattttataggggtataaacaaaaatatatgggatagaaataaaaaaatatataaattttatgggaataaatatataaaagtgtaaaaacatataaataaaaaatatttttatatgatcaaaatataaaatatttaaaaaattatatgcaaactaaacattataaaaagttgaggaggggaaatgacccatgtttcttttcctataactttttttattgtttttctacatttatttaattattatttttttaatttaatatttatttaattattcttatttttaacatatataaaatacacaataacaaacatatataaagtatgaataaaatattaattaaacattgtttaaaacatgaataattcttatctgcatgtagcattttttttttaatttgagttataataactcatttgaaagagctgattatttgtcattttttgatctctaagtagaaaagagcattataaattactattggatccttttcttactcatttttgtttcaccatcgagagaagtgaaaggaaaccgaaaaaaaaaaaaaagaaaaaccaaaaagatgagaagaggaagtaaaaatacccagaggtccgagagtagtccctacatattacgttcctaattaacatgcacacatagttttagctctagctttaatacaatagccctttttgaagggcacattcccccattatatgctttttccctcactgaaaaatcccttagcaggactatacacaatattttattttttccttttcttttttcactcggtacctttcaatggctacatgcagtaataataagtgggcagaaataaaaaaataccactaaattataataaaaggagagggaaaagaggctcaaaggtccagtcttgtccaccccttatctgactaactctgccactccaaacggaccactcccttctatatctcactctcttcaacgctcagtctctcactataactaaaacaaaactagtgattaatcccatcactagccctgttaattttacattatacaccccttaaaaacaaaattattgcacattcactcccttgttctttttttttttaccacctaaaaccacttcttataaacacccaaaaggcccaaacccacataccagttgagtaagaacaacaaatcttcatcatcgtctccctcgctgctgatcagtagtaccaatagttacgcccagaagataaatattccggtaattctggagtaggatcgctggaataatagtacgaccacattctggagattttcgcagtcaacccagctttcattaattctcaccatggttgtgaccgacccggatccggttttgtcactcgggtcggtgaattctaccgtcccggctgtggttccgccgtggatgaacccgtcttctgcggcggtgacgtcgtctctttcatcctgcacttcttcgaccccgtctccttcgatgagtctctggctg

SEQ ID NO: 30581 - DNA, 4845 bp, Cannabis sativa
tttagtttttttttattcatgtgtttttattatggtgtataattttttttgacaatatgatgtatatttttagtttcttcttaataattttttttttagttgtatgtgtgttgctttgtagtttagatacatatatttagtttattttttaacacatttttttaacatccaatgataagatttttttttttatattttttaatagacacaatgtctagtagatactgacatattaattatatattacccattatattatattccctattttgaaatcaattttattatttctattattaatgtaattatttatttgactttaaaataataaattatcattttgagttgatattgtttggcatattacaattaggtcattggtttgttatttttcgttactttgtagttatcttttgttgttttatagttattttcatgttgttttagagttatttttttagttattttttttttattttactgaaacacaatattttttaaaaacttagtacagtaaaaaagttaaaaaaagagtatgacagtaacaatataaaaataaccacaatttttagaaaattccaatattttttatataaacaatgtataatattggggatcggttcggagggccttggttgattgttagtgataccaactttctgctgaaggagttcgaaagaaaaggatcgaaagggagagatcagtttatctcgaatttggtgaactcgaagggactcatcagtctacatatccaacgggaccaattaacttgggataactactattcgggtgagggacatgttaatctgctctagataaggggattgtgaatggtgagtggatcaagttattcccaaaggccattttgcgctctgctcagacttgtaattcgcatcacagacccctgttgatgttcctattctttaggggagatgtagaaaaatttagaagaagctttaaatttaaagaagggtggacccgagatgaaaggagcaaactggtggtcaccaatgcttggaatttagttgtgcacaatttggcctcaactaggatgtttaaaaagattggtgccacttaggttgcgctgttacactagcattatactcaatatggtaatgttgatgctactattaaagagttggagtgtaagcttaatcatgtgcaaaggctgcttattggctctagagactggaaagtggagtatgaggtccgcaaaaccctcaatgaggccttaggaaagagagaaatctattggaaacaaagagactgggtttcgtggcttaaatagggggataaatgctcccaattcttctttctctctgcccctattagaggtaggtgcaacactattgagagtattttgaataatagtttcgcttaataggcgtagtgcgattggcaaagagtttacgggtttcttaaaggaaatattcatagatattggatctgggatggatcttaattgttctaaccttatacttgataaactctccccacttgagcaggaggatttagtaaatgtccttgatcatgatgaaattcgaagaactcttttcgccatgggtactaataaagcttctaggccggatgaaatgtcagttcttttctttaagcactactgggaggcagttggggtagacttttacaaggctgtctcaaatttcttttcctcatgagttatgcataagggggtgaatgctactaacttaatgctcattaccaaaattcagaatccaaacagggacaaccactatagactgatttccctttgtaatgtgtcatacaaagtgattttcaaaattattgccaacaaaatttagcctattctgctgagaataatttatccaacccagtctgcctttgtgccgggtaggaatatccatgacaataatgtcattgtacaagaaatcgttcactcattcaaaatgaaaaaaggaaaaaaaaaaagattttttctatcaagattgatctggtgaaagcttatgacaagatcagatggcagttcattgatcatgtgctttgttgctttgatgcgcccgttgtatttaggaattgggtttctctatgtattttgaccacttccctgagtgtgtatcttcaaggaggttaggttgggcagatcgccccgtcgtgcgaacttcgtcaaagggatccttttcctcctaacctttttatttgggcggcctaggtcttatcaagactgccagaagaggctttggggaggggtaacattaaaggaatctgtctctcctgcggaggccctactctttcccgtgtattctttgcggatgatttgattctggttggtagagcctctccaaaacaagcttgtagtttttggcactcccttgagaagttttgcgattggtctggtcaacaggtcaataaactcaaaacttcctttctctttagtaataacactccggttgatatgaaaaatgagattgaggaagccttgggaattggtgggtcggaaggtaatgttaagtatttgggactccctctttttcggtcaaaacaaaagatgcttatttcaattttattttggaaaatctttgctctaagttgcaagggtcgaaagcaaagttgctttcgaaagctggccgagcgacgcttattaagttcgtgggtctttctttgcctatgtatgccatgaaaactactaagatttctaactgttttgtcactaggattgatggcatggtccgtgatttttggtggggttttgagaagggaaactatgggttacacctgaaggcttgggataagctctgtcttcccaaatctagaggaggccttgcctttaggaaatcaaaagagatgaatcttgctttcctgactaagtggggatggagcttacttacaggtagccagtctctttgttgcaggatcttggaagccaagtatttgaaagggaaggagttcatacattgaaaatataaagattcaaattcttggttctggaagaatgtggtgaaagcaaatgatatcattcaaaaaggagcttgtaaagtggttattgatggcaggaatacaagaatttgggaggatttgtgggtgtctcatggtaatccttctttcccaagtcgaatggtcgtcccgtgagtcgattacataaggtggtcgatcttttgacttatgataggaaatgggacattcagaagctgactagcatatttgataaagataccatttttgctatcttgaatgggggcaatctttcttgacaaggttctgataagtgggtttgggctaaagggcgtaatagctggttctcgtgcaagtcagcctatcttattcaagctttacagagagctcctccttgtgatatggcattctgtctaatgcccttcatcttagggccatcattatgaagagattccatgttgatgatgtgatatgcccgttatgtggtatggagtaggaatcaatagagcatctattcttgttgtgtgactttgccagtcacttatggagatcttccccgtgggggatttatcctgtttttggatgtggaagtcgtgtctgggattgggatgagtttatatgggggctcaatactaagggtttaaatatagaggaggtctttatttatgcttcagttgtgttggatactatttggcgagttaggaatgaaaaggttcacaataattattttcatatataatgtgcatatttgtattgattctattcattgtgccttcgcagatttgaaagtttctcttttaccctctgtgtccttggtccatagggatggctcaagcttaattgtgatgtcagagttggtgtattgcagtacgtagtcaaaagaaatcattttggtgaggtggtctgggtgaatacaaaaaagttggactttgcggatactctttgtggtgaggtggcggcttgttgcttagcccttgataccacaaagttcaacggtcacaagtttattatcgtggagagtgattctaggatagtgatcaactctctcaaccgcgtatcggtgtgttgggatatcaagaattactctaatttttggttagatctctctagatattttaatggatgtatttttacttgtatttccaaaatctataattacgctgtctataatgtgactaagtggacgttcaaccacaactcgtttggttgcttgcatattttgccttccaaaaaacttattttgtaatagacgatccttttcaaaaaagaaaaaaaatagtataatattttttcatcagtagttgtgattagtagttagttatactaagttgaagtgactataaatttgtaatatataataaatgccgtattgatttacttatgtatatacatatttagttagaaggtagcaatattattaaggcatgcatgcatacataaatatatcaaggggtatcagtagttgtcatgtaatgttatactaaattttgcatgataattaatttggtaaacagactacgtctcactaaaaagtttgttatatttgttatagctccgcaaccgcaaaacccgctagagaatcccaacggccattttcttcgcaaccgtccaaaatatgatattacctccctaaatcctccgctatcaccacccattccaccattttctcttctacacccaaattttccaggaaaatcaaatcccacctaataatttatgatctatctctctctcgcttacaagacataaacaaattttgattataataaaaatagaaaagcagcacaaatgccaagcaagctcaggaaggcactcggggcagtgaaggaccaaacgagcattagcctagctaaggtctcgagtggttccaaatccaaatccaaatctaaattcaaagccaatggcaatggcaatgca

SEQ ID NO: 30582 - DNA, 1202 bp, Cannabis sativa
gctattatttgagactgcaagcagaaaagaattaaggaattaaaccctaaacaaaatatatatattatataaatgcttatgtatcagaatttgtggtgctttaacagattgttgtaataaagattttttttcaagaaaaacaaaaaagttgttaacctgctgttaattactaaaaagaaaaacaatacaatctgaacagttgcaaaaaaaaatgttgagattttcaacatatagtattagtttagtttgaaatatttaactgaacgtgtcaaatactaacaacaatgctgaagaaatacaaatgaataaaccataattgttcacaacttctttttacaggttattaattggtaactaacaattcaaagaagtattgcctactttgcttctcctacaaaatatgctgaatataacttgaaacaattacaaatcatctgtccagtcttcaacaacacaacattgttacaaattgcatgcaaaggtaacttaaaataattcctatcaaactgtctagatacaccataaattagattttacttggaggcagcttctcaatgccaccaaacacttcccttaacactagccaaaattacatctgattaaaaatatatcttatatcttcatcaaataaagacaattttccaaaattaaacgcattatctgtgcatacaaaaatagtttaaagatccatcttccttttctaaacactctgatacaaaaattattaatttatagattggaaagattcatcaccttcgtcatttccttctacacactaatataaacaaacccagcagacttattaaactttcaaaaaaaaataataaatttttccaaatatatgatttaacatatcaatacaaaaaacttattcctgtttgtaaaattagatatttagaagtaatataattcactacaaatttccaaagatgaatctacaatttattcatacacaacaacattaagagaagaacccatcatcagtaagagaaagtgtacctcaatttctttcgcgtcaccgagcgaaaccataggcagctacaatagaacgaaaatcacaatcagaggccgagagagtgggagcagaaaggaagagagggaatgagtgtgaatcgtagcaccgatcgaagaaccttagagagagagagagaggagtttagaaaaccctaatgtagtgggtttaagattaggagtaataaaaa

SEQ ID NO: 30583 - DNA, 1243 bp, Cannabis sativa
  modified_base (702)..(720): a, c, t, g, unknown or other
  modified_base (1195)..(1197): a, c, t, g, unknown or other
gaaactatcgctgacttccaggaacatgctagtatacccttccgactatgcggagctagaagtcctccggatacggattatgcttggtggaagctcacctaggcgagtaatgcgattgccctcccagaaggcctgctgatattgggtttggcccaatccttgtcatttaaggccaaataataggctttaattatctgtattgtgtccacgtgtctcttgccagaaatacggataacaaaaactcatgtatgtatctaatattttttaaaaaaaattaaaaaaaatcatgtaatatcaaattttttatataaaaaaaaaataaaatcttacatcattttataactatattttgtatcttttctaaaataagaatgacgaaaaattttaattatatcaattataataaaaagatatcacaaaccatttaatttgattctattatatcaattatattaatttcttggactctccaagagtatgattgatatcgaattatttgtgatattttttaatataaattatttttggggatttttttttatattatttgtggattttttttttgtcaagaatattatttgtggacttaaaatcaactatattaatatttaatttttttggacaaaagtatcgatttattttaattaacggatataatgcaaatagtttgcgattcatgatgaagattattattattattannnnnnnnnnnnnnnnnnntattattattattattatgcatatgtataaaataagatgtgatgttcacatagataatttttagaataaataaaccgaatagtaatttttcaaaaattataaaaaaaatacactaaactattctataattatattttagaatcattcatacttcataggttaaaaagaatgcaaggaatcaattattgaaattaaatatatattttaataaaaataagtacccatgcaacaagtcatcaataagttgtccatttattttgtattttttaaaaaagaataaataatttattgtatttaatatttttgtttatagtattaaccattagattaagatctaaaagttataaacaaatcactacaaataataattaattttgatcactattatacaagcacccatatatataaatatatatttatatattgaataatcacccatgtcgaagaggtttcaatggttatatttttattgtannnatcatggttacatttttttaagtcattggattactattaaatggtt

SEQ ID NO: 30584 - DNA, 1924 bp, Cannabis sativa
tatttaaaaaaagaagtaaaaatgatagaatttaaaaaaaaaaaaaagtaaaaataaaagaggacaatataaaaaggatataaggtgcaatttcctatgaatatgattaattagtttaatatatcagagtattattgttacgtattatagtatagtgatcaatacgatcaagagatcataatttattattggttattagcaatattagatctataatacttgtaaaagtaaaatatttcagattcaatcaactcacaatataacactttataacaatattgaacactattataccatttgttttccctcaataaatttaacataaatatgtacatgcatttttctttaagatatcaaaagagatcacaaaaaagacatggaggtcattgaagctaatcctcgggtcttatgaccaagggtccccatgttcatatgacgaaggttctcaggtgactgggtcccatgatgaagttccttggatatgaccaagttcctcgagtcccatgacgaaggtccccgggtcccgtcgagttaaccaactctcgaactccactcaagtggactgaccctcagaaaccactagtggatcgacccttcgagtccactcaagtggaacatgttggttttgttagcccaaaatatgttttcaagagaggggagctgaattggaaatttaagctaatttcgttaaattaaaacttttaacacaaaactatgcaactaaatacttaatcaaataaatgcaagtaatatggcaaacaataatgtataacaagtaatcaaacttgcaaagtaaagagtttaagggtaaaaaattgcaaactctcgatttttacaaggttcggtagagctaagccacctacatccttggtcttcaaagctatggacctagctttgagttccaatattgagccaagttaacaggcttgactaacctatacaaccgggaaatttttaccaaggtgtttccgaacctctaacaataggtttgcactgccaaggactattaacctttttctcagattgttgtagtgacaatctcactctaacaccgggttgtttacaataccggtgtcaacctcacctcaatcacaatatgaaaatgtgtttgaaaatacaagaaaattcactctagaagtatgataatataatagaaacttggagtaataagcaagcacagttgaaatgaataaacacaaattttagctcaaagtgtatgaaaagtgtttgtcggatattaaacttgggagttcattaatctcacttgaatgtgttataggtatatgatataaatgctcagccaactataatttttgagtaaaaatctcacttgcatttttttgaactaaaacgtgcataactttttactcgattacccgattttaaaaattccaatttttttctcttagttaaatgaaatgtgatttagaaagtcaatcaaattttttttgaaccatcgggtgagaaaacttgtcgcacaagttagtgagtggtccaaaatttatacttataaaccgtagtatactatgcaaatcactttaacaagaataaagtaaatttataccatttgattgtgtgtagtcttgatgtagatgagcttcctagcttgatttgcatgttttgatccaaagtttatttttcccgagagttgatcttgactttgactttcgggcagacttttgactttgagcttttaaagacctcttttgaatagggtcttgaattcttgattccttgatgaatcttttgctcttatcaagtatgaagtagttaatatacttgttgaatccacttcgaggcacttttaagaagcttggtaaaattaccattttaccttagaaaaatttattttcctttaattgcgctacaaaatcaacaaattattagtaacaaataataattaaatatttgttaatcatcaaaa

SEQ ID NO: 30585 - DNA, 2817 bp, Cannabis sativa
ctctctctctctctctcactatccactcctgcacattcctttaattatgggagcatacaagcttggaaatggcctatgcccatcttcaatcaaattatgaagaagcttaaagcatcatcaattttaccaaattttgaaacaaccggaattaatagcttgtaagtattgatattttgaacaagaccgattctgcatacttcgtggtaaagctcaatgcaaaactcaacttccccaaattttcaaatgacttccacgacataattgaacgtaaaaattattgtagatattgtcacacatgaaataaataatagattatagacccgtatataagaatatgagttactccacttatcattagttggttttaagatagaacttcataattcgtaccatcttcagggaaaatattgtggacattctcccacgcagaataaatggtttttatttcttttttcactcatctccttttcttatcatccttcatactaatgtgtaagcaccatgacagagctttacgttgcagagcgagaagagaaaggagttatggagctcgatgatttggtgacattagaaaatctttgaggctctgctaaagacttcgactgcctagtctacgagaccctgcttcccatatttctcgattatgaaacaaatggtatcggaagagacaattaagtcatgaaaggtctgcatctgttgaaggattttccacattgactcatacttttttgtttggatgagagttcgcgccagctcctccagcttgatggttgtgggtttgtaagaagggtggtgggttcaagaccaggttaagaaacggagtgactcaatgctggatttagaacaggcccggaggactcgatagacgagttcagagttgatggagattgataacttattgaaagttcaatccatgtagaaatcacgctatacgatgttagagatgtggcggattgctgtaaagtaatcatctttggaagttttagtgccattttgattcccctcgatgcggtcgttggcgaaaatggccattgagaaggtatagaggtagcaaacgataggttggaggctttgtgtcttgtatgtgtttgtgtttattcctctaagaaataggaaaatagcatttttggaggacctaaacatcatcatttttgccaggtgcctgggttgttttagtagctcacttataatatattctttgtcaactttccttttattagagttagtctcacattgttaatgtgtggaaataaattatcatagataaattatcatagataagattgggttactcctcttgggttactcctctcattgccaattagttttaagatggaacctcattcaccttatccaaaattctaacatgtatcagacccttttattaacctctatttgggatttttcaaccaatgtgttatacataagatgaatgaactactcctcttatttgaaatggaacctcattcaccttatgataaaaaagtatcgggttgcactcttcgagtcagtaccaaattccaataggaataaccctaattttcattcattttatttattgattctctatttgtaaaatggctttacatatttatactaactaggtaatactaacaattattaaatagtccatatacctttcatgtaacactccctaacccttcaaaatcaccttgtccccaagggggtaataataacaaattgaaactaagaacaagtacaaatataagaaagtaagaaactaatgacagcccaattattttctattaatatttggcctgagcccaagccaaaagactttagggtagttcttcttctctcacgtaatgtatcagtcgccgccttctccatttttttatagcttattcatcatttgacgtccatgcttgtttcttcaccaaggtaagtcatcgttcgcaccggtgagcttccacaatctggtgtgaccatgcttctcgccacccctctttgctttgatttagattatgcccgtgctcttccacaagtcgacatctgaaccaaactagtttagactgaaacaacattaaatgcgcattattgatgatggcaagtggatcagagggagtagcttttccacgatcaaaacacatgttcgccaccacaaataatggcagccacaacttcaccttcatacctgaggatgacatcattttcctcgcagaggtgatcgacggtaagcacgaacatcgcaaagtcaacacatccagctatgaggaacagtgagttgtctttgccttcgatccatggtgatgaaacttttgtgatctctctaaaagatccatgaaacaagtatagattggagaacagagccatcgggatctacatgaatcgaaacagatgggagcttcgctgccctcctggaagatgatgaaaggttcataagccatgtgaacaactctagctgaaatcaccaatggattctccactctctctagttcaattgccttatttggatgtggttgtcaagctccagagaagaaggtggtgcttgagatgtgggaaccgaaagtgtctccatagaaggaagatagcgatcaaacacgacacacatttgcttcctctaagcatcaaaatgttgttcgatacgcaactccatagatttcaccatggatctcatgaatttatgaaactcttcgtcagtcatggtgacgagctctcactagaatctttcgctatcgggttggagtcagtgccaaactccaataggaataatcctaattctcattcattttattcattgattctccatttattataaaatgactttaagtgtttatactaaggggagttatattt

SEQ ID NO: 30586 - DNA, 3660 bp, Cannabis sativa
tagttttcagagagaagatctagaccactcatttcaaattgtaaagattcagccgaagtataaatagacagtggcctgcatggaacggttaccaatatctttctgctgggctctcatgatctccatctcctgatccctccattctttgaactggttcctttgctcatcaaaagcaagattaatagctacttggagatcttgctagagtgttattgtggccttgcatcaaccctaatcagtgtcatccccgatcgacctttgagtatttgaagtggatgggattccatttccatgagtagtgtgcttagctgccgtactagtatttccagtttcttgcacgcctggagtgaatcttgatagagaggtagtcgctccgtggccagcagtttgtgagcctgtaggtggctaaaaattaacctgcctaggggccatcttgggtggatctcttgggtttccatgtgtttgtacgctcgaatctgtcaccattggatcgactttatcagtctgattcccccttcgagtttgcacaaccatcctttgtcttgtaaaagacttaagacaaaaaacttgggtgtctttgctcttaatgaaagcacaaaaatataaatcttgattttagccaacaatagtgagtcttaattaaagcgataagaataattaaataacagaaagtaaagatcataaagtaaagaaaataccagatttataaaggttcgatcctttatagttggtaatagtctactctccttcttgttgtattgacttgtgagaagagtgagcaagaatactgtgatctctctcgaaatctcttacaatgatctctgagtaattcactcttagaccgaggtttcactcttgagtgttttctttctaaattatcttgtgtccctgaatagtgagattaaaccactatttataggggctaattacatgaagaatggtttcccttaatttataacaaataaaatagaaaattaacatgtttccataattacaataaggagattggaaaatctaagctaattgcctttattctctaaaggtacgaattaatcccacatatgtagggattgttttcgtggcatgcaagcttagaaataaagatgtccatctctgaaattaccaactcacatcccttggtcggtacatgcgagttaatcatgcgatcaagttggtcgaatgtccatcagtggccttgtttggacatcctaccattcatgtatgacgtctttgggcttcatattaatctgcatggcttgctaggagtataatcatctgcctagattataaaacatagtacatgtgccacctaattggatgccacatcatataaaaattaggatgacacataaaataagatgtcaaaagacactggaaaaaaaaaccaaaataacatgtgcatcgtctaaatccaaaaagaattggagatcaaacaggaatgtaaacacatcgttattaaaatcaaaaaacagtaaaatagacatttttacaaataaaaaagacaaataacaaaatcaaagaaaaattaaataagaaaccaaacaccaccatcgtaaattttgggacaccatcacaattatcaggaacaggccatccaccaacactaaccccacaccagatctggtcgattctgatccaacaatcacgaaatagagccatgaaggaagagacagttggtcaaagttcaattaattttgtttccatatttttgttttaattttgtctcttggattgtgtttaatctagtggtctaaaaataatcaagtatatatttcaagaattaaattttacaagaaaaaaagaagtaaaactacatgttctaaaagtattttgtgacacgtactatataacaattaattctttttatttagtactatactttgactgaaaaaattgtttagctgccactcaaatattcatttcaatgcatgtgaaatgaatatttgtatgcccactaaaatggatctaataaatagatttttttcaaatgaatatataatttaaatttatattgttatggactatatatatggtacatacgaatacatgttttcattcaactgaattactatttatcctatggatacatacaaaataattaattgaaaatgggaaatcaaagaaaagatgcagcaaagtttatgtttaattatatatatagtaccaaaatttcaatttaattctggcgtgatgatgactccttggtgtcctatactacccactacatatcaacgtcatgctgtattgaccaatagtgttatatggtgccatcttaataaaccaattgccatgatatattagttttatacattaatagatatgttcaccaaataaggaatgttagtctgaacactaatcagacctattaatcgaaaatggagtgtatgaatcacatgtattgatgatttgactcatttcgtctatttcttcttcaactttatccactgatattatctatttcaattaagtcactaacataaatattacccattgggccattacttattgtgtgttaatgatttgaatcaacttattataataatactgtaacttaattaacgagtttctgaaatccatgcatacgtaaaatgtgtttgtacgacacacttcaaagaattaagtcacacctatgaaaaaaaactgtaattaatatattgggcattgctataccacaatcttttagtactcaaaaataaaataatgtttggcgtatcagatttggagagccgaaatatggcctattgggacctaattaaaaatctttcaagttgagtgtataaggaaccaaattaaaaggaatgtcttaattcgaattaatgttttttttaaccgataaaacatgtatagaggataagtattgaattcatatgtaaggaggttggtttccttttattcgaggtgataagttcgacaggcggacgctagctgtagtttgcatatttctggcacttgtcatactttttggaaaatttcatggcatccttcttgaaggagggccaataatatccctaccttcaaaattttacaagacatggagtatcccttacgtgattgccacattctcccttgtgtatagggaaaaggacttgtcgcatttctcttttctctatgcatcgtaggaggggggttgaaaatcctctcttgtataactaacaccccatcaattaccacgtaacagatcgccttataaactattctcctggcctcctttttatttgctggtagctccccttcctggatgtagctgagatacggggtcatccaagagtctctgtcagtcactaagcacacttgctcctgcttaatggtcgaccttttgaggtactccacgtgcattaattctaaggtatcgatagcccttgttgttgccaactttgccaatgcatcgacattggcattgttatctcgaggcatcttctctacagtataatgttgtagctactccaaataacttttcacccgctaggtatgccatcatctgactctcctttgcctggtattctctcttggcatggaacacaaccagttgggaatcactaaagatgtctagcttgataatttttaactcccttaccaagcgtaggccaaccaacaaagctttgtatttggcttcattattggaagtagggatgtacatggggacggggcaatgcggggaat

SEQ ID NO: 30587 - DNA, 1376 bp, Cannabis sativa
ttacattgaaacagagttttatttagggcataaaacccaacaaaagacacccgtgagccagcgactcactctactctagaagtcaagaccttgtgctcccgcaaggaacatggatctttaaccaagatacatcggtctaggatacgcctttaacccgcagaagctcagcccacgcgtgacaggccacggacccaatggtagagctttttttggtacaatgtcggaggttgtttcccacaccacgctaccgtgcagagcatgtgtatccttgtgtactgtgcaaaacaatccaacagttaggaataagggtaatttaaatgagaacagcccagagcgacaggcgtccaaagcatcgccagtacagctagtacaacctgacatcggtaaagaccacatggaaaatatgctaccaaccaatccaacggtgaaggtccatccctatgaagatccatgaaaagtggctcatgcgaggggatcgacctataaataaccccaaagatgaacaaggcatgggattcagattttgaggcttaacttcaccttccatccttcagctcttcaccttgaaaccgaagactaattctttgtaaaaacatcttactataaccccattatcaactccagaatattcctactaagcttcctcttctttaagagaaacacgatggattgggattaaagtaaatcctttttgtatttgtataaacaaccaccggccgataagcctaataaaatggactcgtggactaaagatagttaatgcttaaaacgagtaaaagtcttttgttcgctatcttattattcagatcttcattactttcttaagctctaatattatgtggtttatcaaaaaactcagtaaacacctattttaccaaaaagcgacatctcccagaaatggtgaacaatatcaccaaaactaagaaattggctaagtggtgtcaacatatgacttagacatcaaaaaaatacaagtttggggcattttttacttacccatcatctaggatgtcaacatgggtgttgggtgctaaacaaccttcagtaaaatagccataactccctcaatattgatccaattgacacgattaaacttgcattttgaagatctttcaagttaagtctcacagccatatcgaattctaaagattttgagtccaaaattgggcccaagacaagtgcaattattttcgtggattaccctaaaacggtccaaaggatgagtaacaagctttaaaaattgacaactttcatcaagagttaattttcaccattagatcatcataaattgccaagatcaagcgtaaatgatttttcatattttttgtattatttaattaatattttaataggatctccttgttggaaattatttt

SEQ ID NO: 30588 - DNA, 2952 bp, Cannabis sativa
gtattggtttatattaaattgagttatataaaatatttttatataattgtatgttcaattttatactaaaattctatatatttatatacttataaaaattaatattatatataattttacataaaatataatttaataatgtaccaaaagaatcctattaaaaaaccccaatttgaaaacttaattaacatatttagagctgcataagttgacaatttgttgaaattctaattacacttttactcttgccctatcctgaattagtcatattcattgttctatcttgattattaaaaatatttataattatgtgtacatgacatataataaagttcgtttggtacactgtattacattgtattgtatagtattatattatattatattttatacaatatttttatgtaaaattatatagtattgaattatatagaaacctaaatatataatatattagcataaattaaaatttaacaaagtattatataaaaatatgatatataatccaatttaatataatacaatacaatacatactaaacgagctcatatttccgcaatgttttaatacatatagatttccttccaactcaaactactaaatgttagaaacaaacttcatttacacaaaaaagtatttaagcaaaacaaagttgaccgaaaatccatcgagtactcaaaatgtctagaatgaataatccttcagatctgccctcgagtcgcctatttcgatgtcagccatgcattcttctttcatgagaggggggagatttcgagtcttacgtttcaagttatgcttatgccactcactcttgaagtgctccctgtactcactactcgaatcgcctacaaccgcattacatgtactgcatttgttttgctttccttcttcaccaccaccacttgtggagatagtctgtttttgcaatttttcactcagtttcttcgatgcaacagaatcagtcggtggctccttctccttgcgcaagtgtgatgcttcatgctcctcctcatcatattgatccaaatgagcgtctccttccgcatgaatggaaagtgcaagaacttcaaactttccctgtagattattcatcaaggcctcacagtcgcggtaaaggccaggatccaactcacaaatctatacaacaccaaatatgaggcttcaatatcaatcagactagaataataatcaagataaccataagaaaagaaacagttgatattaatatttacttcctgatttcaatcataaattcaatcttctaattctagcagggttttttatgttaaatttacaggaaagagaagtgactaaaactaaaaaactaaggctaaatagtgttgagagtcattaccgatctagaatgttctagaaaacacaaagaaaacccttggatgttttatgaaattctagaatgaacttagaattactactaagtatagataattctagacttctttagagagtaatagaaacatgtaaaaatcttagaaaattctaaaaaaagcttagatacttaaaagattctaaagtgtgtaaaattttaagaatgtcctaagagttattttaaagagttctaagttttgtactaatactcttcaatattaataaagtgttcgtaattttcctacacaacaattagtaagtaaataaaatgagagatacttacacaagatagttgggttcctaatttatcatccttagaaatcagtttagcattccatgaattcaaattttccatgagagtagaaagcccttgctcaggaacactcagccttaacttcattggagatcttttaattggaaagtgtttctgaagttcatgaataacttccagtgcctgaaattaagatacttaacttatggttgtgtgtgttacaacaatggagatagagaaagtagtagtagtagtagtggggtacctgcttcttggaggcactactgggatcaatggcgaaatgaatgtcacgcataaggcgctcaatcatggttatggtgtaagggcgttgagtttcaggattatatgttttctgcataacaatggtagcaatatccctgaactgactggataactgagactcccgctccttcccagcaacttgaagctctcctttctccaaaatctgcaaacatattttggactgatcgtccgtcccaaatgcagcaatcaagtctttggatttggccaaaacccctttggagacattggagtaaacggtttgcgactgcagcacttcgtccaaatccttctctctgttttaatgaaatgaattcaattccattcaattaattcaatcaaatcaatagagagagagagagagagaaagaagtaagcagcttacactcctgatcgccatgagaggaccttgttcttgtaacaggcgacttcaaagcgattaccgtgcttcttgagacggacaacggcgacattggtgagcctcttttgacctacgggctgaacaagaatccgagacatgcttctcttctcttctgtgatctgctttttcacctaaccgaaaccaatcagtctcttctgtcattaaaaaccttaaacatattgtacttcaaatttggaatgattatccacaccctcaactcattaaagaattagaggctctgatctcagcaaagcaagatcagattatggaacaatctctcttgttaataagagaattttttttcagttatcaatttacaacataagaaaacagatcaaattcaagtgaagagagatggtggggttttgatggtgataaagagacccttttacatattacttctctctcacaaaaagacatattactttaagcttgaagaagaagttgttaaacacaaatccaaattgattatccatttacaacttccaactctaaatacagaatatgaacaaaacaaaaaaaaaatgataaatgacatatacatatactgatacatatatatatacaaatattg

SEQ ID NO: 30589 - DNA, 976 bp, Cannabis sativa
  modified_base (914)..(930): a, c, t, g, unknown or other
attagagagttaaatgcaagtaaagtgagggtttagcaaccaaaaactctttaaaaattaaaaaagaagtaaaatttgctcttcaaaacccccattttgaaagttgagaatccaattcaaactcattagggttccaccattaccaaaacacatggaaggaaaatcttacaagagttttcctaagaccaagatctaagaaatggaaagaaagtcatcgaggtgcccacaaacttcaacaatcgacgaccggagataggccttgtggctcgctttccttttttgccaaagagatagctatcgtgagaggagagtgagcacgagagagataccaagagaggaagagaaatttctgggtttggggtttgaaggatcgagaatcgagttttgaggtttgtttgcattaaaggtggtcgaaagtggccttgctaggactacgcaatactgactgtgcgaaaaggaaaagggaaatagagagtgtgatagaagaagaagaagtaacagaagacccatgtctcaacggttaaagaagaagaaaatcgtctagggttttggctctaatggttgaagaagaagaaaagaaaaagaaagaaaggaaataaaataaaatatatttatttaattattgttttttcatattttttaattattttttataatgtttaaaaatatcattaaaattatgtggaccactaaaaatttattacatttacacttgtgtacacttgggcagtctacttggcacttaataaatttttttggatagaagtgtaaaaactaaaacataatggtagtttagagagttttaacactaaaaaatcgatttatgaagttgagtgttacaaatcatatagttcatatagttttactgccaatacttctgaacatggctatgttgggaatattttactaggatnnnnnnnnnnnnnnnnntatgttgaattaacatcctaaatgtgaattctctaaaataatgaaa

SEQ ID NO: 30590 - DNA, 3020 bp, Cannabis sativa
tgatgaaaggttatgaaacctctaacactatttataggaaaggaagtgcatgaagtaatatatgcaaaaatattgcattaggttattaatcttggaacgtgtgcctatataaatatttgctttttatatcattttattttataaatatggatcatatattaattgctgaattaatagcaataatatataaagacctacttaccaacttccattattgtagtctctccataacccaagttccaacccatctccattactatacctaaaacattatccaatttaattccattattgtagggtctccataacccaagttccaacccatctccattactatatctaaaacattatccaaataaattaagtatcaatacttaatatttttttttaaaggaaaaacggaaatattcattaataggtaaatcgaacaatgtccattacatgatgatatcactcaacgagcaaattccacaatagtaggccaaccaaaccgtttacaataataaggaaagaaaccctaacaacatctccaacaaaaggaccactaaaccgctacctttgaaatatcaaaaaatgtgaacaatacaatggcaaacttttgagtatagtggaattgggaaaggagatatagattggttgagaaatttgtgtgggaatagataatagttgggtactttggcaaactttgtacagattgtaaagattgattgagcaatacaacggcttatttacaaaattattttgtggatagcaaagttaataatagtgattgattcttatgttagatttgttggtagaagtagtagggtaactatggactacgtgttagtattgtgttttggttaattcactttctaaaattattataataatataatatatttataaaaaaaaacataaaatatttattgtctatattttgcgaatgtaaattatattttatgtacatatgaaagtttgctaaaatttagaatgactcttaagaaatgggatgggttgggttatatagagttagagtgtgccaaacccataattatatgtcttatcacttttcagcctaatgagccatggcctactcttaacataaccatttactacaaaaaatgggttgagttggctgggttgaatggtttggcctatattttgtgcacccctaattattaccatcggcataccatgtatacttcttagatcgagttaatccaggacaagaagaaagactgcaagcttaataagttcatttatgaacttaagtaggtttctcagtcctataatagaagatttgatgagatcatcaaaacctatggctttaaacaaaacgaagataaacctcgtatgtaccaactcaaggataatcaagtggtagtattcctagccgtttatgtggatggcatcttgatcattggaaactatgtcaagaagttgtcagatgtgaagggatgactatgcactcacttagaaatgaatgacttgggtgaagctagctgtgttcttagaatcaaaattataattagaaaccggaagaaaaaaaacacttactctctcacaagcagcttatatcgataaggtgctagagtgcttctcaatgactaactccaaaggggctcgttggccttttacgcatggagtacgactatctaaggagtagtgtcccactactccagatgagatagaagaaatgataagaatccactatgcttcaacagttagaattctaatgtatgctatgttgtgcactagaccaaataatttctatgcagtgggaatagtcagcatgtatcagactaatcttggaaaggaacattggacagtagtaaagcatatactaaagtatttgaaaaggactaagaactatatgctagtctatcatggtggtgcttaagaccctttaggctacacagactcagattttcatgcttgtgtcaatggcagaaagcctacatctgggatcttagctaggggtagagcagtgatttggagaagcatatattaagcagtttgcaatctgtgattccaccatggaggatgagtacatagctgtcgctgaggcagctaaggaactagtctagttgataaatttttttacagagcttgacgtatgcaagtgagacactctttgggagaaagagtgcaagtgctacaatttgaagggagttcaagatctcgacacttcagaaatttgattaggagtatagattacaacagtgcgaaaaatcaaacagggagtctttatttgcataagtcaatttagtattgtaatcattttgagattcttctaataaattttattctctgggcatagtccgtagactagtagcaatctaaaaaattgatgataccacgtataatttcgtgtgttctttactttatgtttgtttttactttctgttaattatctgtttaaacttatctctgttctgttcaaatagtttttgtgtctgttttaacatctcggtaacagtatataattaattatttattttgaataattaatttggtaattataaaaacaaaatttcaaatttcgtgataacttacctttttggagctaaaatcaaacctctgcacccaaaccctgtgttagcctacctctagttcaaaattgtggaatagaggagggaagaagacgatgggctcaactatgttttgtttgttttatttgaggccaatgacgtctataacaatgttaaacgtggcacacaagccacaaccagcaatgttggaacatgaatgagttggacgtgaaagagattcccaatgtgagattatctttcaagtccaggaatatgcgcatttactttattttcatgaccatcaaagctggttacaaaaatacctttcatgacctctcatatcatgatcaatatccaggagacgtgaaaatagatttcataaaatctttgataaaacttattgtcaattgttatgcttcatatttattttatgttttgaatattccaataacttataccaaatagaaattcaaaatagactataaactattttgatcttttgaaaaa

SEQ ID NO: 30591 - DNA, 2986 bp, Cannabis sativa
  modified_base (2936)..(2940): a, c, t, g, unknown or other
gtaaaataaattccaacagaagaagcgcccctccgggaggtacttgcccctcgagcataccccctgttcctccctaaggcaatggggctcccattggagttgggtttaagtgtggtaacctacttttgatctattcatacaagtgatctaatcagattaggttctcaattttgtcttttaggttttttcacttgtttgtggtgtggtcaatgtcattgtggtattcgcatctttttttgggatctctccgggagctgtccctgtacaagggtggagacttttgataatgtgtattttcccagtgctgaagtatacacgctcttgagtatctataagctcaatgtattgtatgtactgggggtataccccctatgctgtcgcttgtccttagtccgggtactacgccttgacgatctcttactccgggtgctttgtgaagctcctgccatactggtggcaggtgcggattaggacggagtttggatactcagccctgagggattgctcatgggcgccccaaaatgtgacaatgcgaaggctaaagcgagactttgattgtatcctggggtagcggagaattggataccgtttacttggggagtggcaggagatggagctcctggaagttgagctccaggcacatatcccgataccccgatcggatagtatcctttgtaagccactatttgggcttttcccaaattgatgtactttcagactctgttctgaaagtcttgaaggctagctattccctcttgctgccactcattccaaaaaggggttcccgtatggattccagcctgaagaagggccaactgttgtccgtcatccacctttttggtcttcgaggcctcctccttgaatctattatgaagttctttagggtttttacgggtaattgttttatgttagtcaaagcgctaacctcgaggttaatctttcttactgcgatgacttgtaacttgttctagtagtccactgatcccggctccaacttcttgaaccattattcagcagacctgctgaacgttagcggaaagcacaaacattttacgtcgttgctgaccctcatgatgacattaccttgttaaatcgggacagatggtcactggggtccgaatctcctgtataagtcgccatttcggtcatcttgaaatttttaggaagttccacttccaatatatttcgggcgcatggttcccagtcctcgcaatcagagttggagtcgtctcctttctgtctctaggaaactctagcgatgtctttgcggagtattgccaactcagctaatattccttcgttcaaggcgcctctagagactggtagcacacatttctttttctcaagatggtttcttaagtcactatgcttcttgttgattttctgccttttatcaattggaggataccaccgaattttcctccctctttccccgggttcttggtgtacggatacgctctttcagtccactcgatcctgagggccaaggctctctctagggagcttgcccctctgtggacctttgccttttgggaaatcagagcggacctttcccgaatcctgtgccttcttgtttctcccagggattgaagtaggatttttcttaaggtcttcctcggagggataccgtatagggcttggctccctagtcttgggcctttgagtgcttggcgaggattccacttgtgttttctctagtcctgcgggcatggctttgggatgcacatgtattctagccgtttctatagccttttgcatggcgaccattatctcttgcatcctcttattttgttctttttgggcagctagtttggcctcatgatcaacttctttttgccttaggatcagcaactcagtgtagctaccctcgtcgtaagcgtcataccctttgaatttttcttcatattcctcgtctttcatttcatctcattcctcagagcccatgtttaccagtgaagcagcctcttcaccttctgggttctaaggatcctggggggaagaggttggcgtgtgttgttttaagtgtccaccattgcagttctgattctttgactgttgtttccccaacaatgcttcccacagctctcaatgaaagcaccaaaatgttgactgagatttttggcaaccaattaaatgagataatgatgagagctgtagggataattaatgcaaataatttttacgtggttcgggcattaattagccgtagtccacgagtctatgttattaatgagagttcttatacagagaatgttcttgataagtttttctctctcccttttttgatcccctttcccattttgttcaggggtatttatagagattggtagggaagattcaaaaagggatcacttgtctttgagtgccagcaatatatgagcacaagttcctataaagtacaaaatagggcatgcataacctatactgtaggtatcttacagattaggtgagattaatctttatccttccttgattaatgtgattctttataatggagtcgtcactagccgctttgatttctgtgtagttgtcgtaaacaaggcttacgttgtctaacatgtcctcttatgggcattagaagacattttccccatgctgcattaaatgcgtggtgattgttcgagtatttcctcctcctcccggagatgctttatcatatgtctcgctctcggagaggaacgacatgctttttgtacttctccgggggctcacttcctgaactacacttgttcgtctgtatatgtctcagctaattctcaggtgaggtgtcctttggtccacgtgtcatacgtagtcgtggccatgtattttgggaaaaactcggggcaacacatagaataactcaaatcaattaaaatttaaaaaaaaaggagaaaatcagctctttaaacactgaacttaaattagaaacaaaattagtgtaacaccctaactannnnnggcgtattacgtgatttttaaacttactgtgcagctcgttgctaat

SEQ ID NO: 30592 - DNA, 1383 bp, Cannabis sativa
  modified_base (90)..(95): a, c, t, g, unknown or other
gtaaggtttctcaaacttttatgtgtttattttcattgtttcagaaattcatattaggatgttaaacaacatatatggtagtaaatctannnnnnggtaaaataattccaacagttgctcgaagagaaagagagatagagaaagagtttctcttattttttttgtcttttttcttaattttctctaaaatgaatgaaggataatgaattaattcttttttgaataaacttaagctaggtgtcatcaccctagccttccacctaactccctatttaccaaattactaaaatgcctcgttacttacaacttaagcaaaataaagtctaggagtaaaatggtcaaaaacaataatctcgctcaaactcggtattctattttcaccaatatacatcccactgagaaataaggttctagacttacccatgtgattaaactggaaatcatcgcttttaatagttgtcgccgaccaaaaattgtaaaaataacataattcatatataattcaaataatacatcttgagtttaataaaatttccagaattaaaaaattgtagctctaatgcccacttttgataatgggacccacaattaaataaattcacaaatgactataaaaattgcaataattagtactaattgcctttactaatccatattataaatgcggtcattacagtggctttatgggtggtttctcttggaaactctatataaggcgaggtagtgagttcaatatagtcaattacacaacttaggacttactatatgtcttagtatgtgtacttaagaaagtacttggtcattgattgatcttctacattttgttttacctggaagctactcttgggtatgggttacttgaatatgtttgtagctttgtttggttgctgacctctccttatttcttccatacagatagtgccaggtgttgaataggggaggtgacaactgcgtaggtgttaggctaattttagtttaagtttcgggtcatacttttgagtagtttttgctctttatttctagttttaggactatgttacgcttgattcatttgtttcagattctcggatgtttaaagaaagtatttacaggacttgaggataagtggagaaagaattgagaagaaaaacaaacaagaaactttgctgtctaatcccacctcgtcagggaaaaaagcttcgccgcgacggtagttggcagaaagttttgccgttttatggaaattccttcgccgcggcgaagccgcaatgatggaatttttgtacaatttcataatttcacgaattttaaagagaagacttggttaaattagaaggagttcgtgaaaagtgaggatgatttagatttggagcgctagaaacaaaggaggagacttcaagagcg

SEQ ID NO: 30593 - DNA, 1434 bp, Cannabis sativa
ggcttgggcttgagtttgggtttaatttcgggggcggggatctgcatctccggcggcatggtagccgcgcgctgaagcggagaagtagagaaatgcgcaggcggaggcggcggaggaggaagggtttcggcgaatggggctgcgccggcactaccgccgccaacgccaacgggaggtgacgtggaattggattgaacctggctcaattgaggattctgaacctcaccctcggcgtagtcgcttagggctgcgccggtgttcttaagatacatggcgtaagaggaatgagccgccgcaaaggcgttgcgagcgatcacggcttctttcatgtattgcttccgctctttacagcgagccacggcttcttcgttctcgatcttcgattgcccacaacccatcttgtagttcgcgccggcgattgatgggtcggctttggatttggctaataaatcatctatctatctatgtaaccgttttctagagagagaaacaaataatggtaaggagagagagagttgtgtgctttgttgggttcttctcttctctctctgcacttttttcagtgtgaggacaaaagaaagaataattggaagaagaaagaatacaaagacggtgccgttttaactttctttatttattaatttttcaccataaataaataattatttacatattggctgtaaacctgtaaagaaaagagccagacaaataatgaattattaggaaattgaactacgatattcgaggatgagaaacactcaagtgtttggatcttttttgtttgatgacaaaatgggcatatagtcaaataagaaatcaaaataaattagaattaaataaccaagaagtactgtaatagttttggtaatggtataaatgtcatgtgtgccatggaatctataaatgtcatgtgtgaataatttatgtaatttaaattacacacatacacacagtattttttgaatcaattacacatagtattaagtcttcaccttattataaaatttcagtaatgaataaataatgttgtgtaatattttagtgtgtgtgtatactctctttaatttactcaacaaaaatcttttttttttaacaatatctaaacactttgaaataataaaagaatatttatataatgaataaataatgttctgcaatatctttttttttatataagatttctattttatttaagaattttttaatttctactatctttttctctatataacaattgaaaatatatctattttgttttttttattagataagaaattgtatgcttgattttttatacaatatttattaatttatcttaattaaaaaagtgaaagtttatattattagaaagatatatataaaatattaaaatttaaaatttgatatttattagcaataaatttaatattttaagtatttatgtcacaaattttt

SEQ ID NO: 30594 - DNA, 1374 bp, Cannabis sativa
ggacttcaaccaatttggctctttttcttatagtgtcattttgcttacattttttttttctttttttttttttattttggaagattttatttaggtacacaaaaatactgcaatacctctaacacaaaataataaataaataaatcaaatagacttaaatattttaaaaacaaaataactaaacttaatatttttacataataactagaaataacttgcacatgcaatatttgatagaaaaaaagtgagattaattctctatgaaatcatattatttataaaaagtaactattattaaaatatatatatttcagaaaaaataaagggaatcttttacctttgcacaatgtatatgagcagtgcagcactctcacttatgtttgttaaatagtttaatttactttaaaacgcctataaaataatattttttcagaaaagtaaaataggttgaattatagagtttagcctaaaattaacaaaatagcagtccatattttatatgtctcctctaaattgaatagtagtccatcatattattattattagtattattatatatatttggaactacaaacatgtttttaataatatctaaatcctttgttttctctcaacttttttgtctttgttattattttatatttaaaataataattattatattatttataaattatatgttattataagaataatatgtgttatagtgtttaattaataaattgtataacttgcaatttacataattaagaattcaaaacagtaattgttttataatttatgaatcataaaccgtgtaatttaactgagtaaattgcatatatattatagaaattaattgctaaataattataattgttggaagatgataaatacttataaatatcaaattgttatctagttttttacacattgatgtggcaaaaggaccgagctacacatgtctcacatttctggtacatgggcagaggtaaatgtcctattcaacctctatataatacatcaacatttgcaattattgattactcgaccagagtggaagatagagcatccgaccaggtagaagtctggcttgtcgagctacttacagggagttgagtacttcagaatgatctcgtaatacccagacacaaagacaatccctacaaacgtgggattgaatcagagaaatatggccacctgttctagtttccattttatgtattgtaattatgtaatcactgtaatttcctattttacacgttgtaagcaaaaaggaaaccatccctcatatattaactccctataaatagtgggctagcctcttatgagaaagatcgaaagaactgcttcaaagaaagattctagagagaaaatagtgatctaatagaatta

SEQ ID NO: 30595 - DNA, 2806 bp, Cannabis sativa
ctacaggtttgggagaagcaatttgccttctacatcaaggaagccaaggcaggattaggccggcttctgtgtattctcccatcccaagttgttctcaattcaaggaggcttctccatgataggattgtatcaaaaagtttcaattagggaggtattaaactaatcctcctcattaaatgccacacgacatactctatagaaacacggataacagagttaaaaagataaaattaatgcccttatctctctaacccttgtgcgaacacaacgtaaagctcattgggttttagaaatgccattttagttctaggcttatcttttatcaaaaataccatttttctattctaaacctttaaatgtatattttgtctttaataattataaataattatcaaataaaataatcatttaacataattattaattagagtcactcaagtctcttaattaataataaaaccttagttttcctttttttttttcttaaaaactcccttgcatggtaaaattcataaataagaccagtcttacttaaaatcctcattgattaattaaaacaaatttattggtcttcaacgtagtaagatctcaagtagtgtggggaccatgagcctatataatcaggctcccaataagtagttctaaaatttactatgtaaattctcttagcttattaattcctctgactctactatagattcggaactgcactcttgattacacacaacacactattctgcaagaataaatacgctattagttacccactatttcaatcaaaataatcatcctctataaatacattgaataaggactaaattactattttaccctccaatgcattttatccttaaaacacttggctacttgtaaatgatatatgggaaaactaatagaattactaaaatgggtacaccatttaaattcgtttagtctagctctaaggaaatcatcatttctcttatatgaacttatagaagttatagatttcatatctatgactagagctcccactcaattacactatcatgttctcaagatgtaagtatttgagctaaaccaataggaaagctattaacgaacaagttaaagaacatgtgaaatacaattgagccagaacctaatcatatcaaaattaagatcattaatttaagattaacttttagatatttacctaaaaaagatattacggtaagtgtacaatatcttttaagttgagaatattggtcatgtcaaatttatagccaatacatctgatactagtttactttactgatgtcctggaaaagacactccacttagaaaagtgtaagtaaaccttatcgctgattattatatcagtataaatccaatgtactgagaaatcatgggactaaaagtttaatcatatattcatatttattttccaatgtgtagacaacacaataatcatgaatattgatgtgatagggatttaatagaatttatatatcgaacatatgatcatccataaaacatgtgaatcaagcaaaaaaacttaaataagtaatgaatagaaatatgatcttttattgataaataatagaatttagattacattgaatttgatttttatttaggcaacaaaacccaacaaactctcaccatcactaacataaaacaattagtgcattctaataaatcctaaattcctaatgtgtttctcataagtagtctttggaaaagtcttcatgaaaggattagtaggattatcttcagtatgaactttctctactttcacgtctcccatggccacatattctcggatgctatggtacttactctctatatgtttgtagtccttgtggctttgaggttccttactgttggcaatagctccggtgttgtcacaaagtaacaccatttgtttgtaaatatttggaattatgccaagttccgtgaagaatttccttagccagaccaattccttagtagcttcaacagcagcaatgtattcgacctccatggtagagttagagattgcaaattctttaacacttccccagcctactgctccacccccaagagcgaataccattccaaatgtacactttctgtcatcgacacaagcctaaaaatctaagtcggtatatcctaaagggtcgagaaaaccacccttatagcatatgtcggctctagtgcataacatggcataaattagactcctaagtataggatattcttctcatgtcttctatctcttgaggattagtgggacacaggtttgtagatagacgtaaaccatgtcagtctagagtgcatgcgagcacctttggcattagacattaagaagcgctccaacaccttatcaatgtaagatgcttgcgagagagcaagtgatcttttcttttggtctctaataatttggatcccaagaacatacttagcttcacccaaatgcttcatttcaaattgagtgttgagccacttctttatgttagtcatccttttaacattgtttccaatgaccaaaatgtcatccacataaaagaccaggaaaactatcccttataatccttgagttgataaacacatggttcctctttgattaaacgaaagtcgtaggtcttgatgatttcatcaaaccttttgttccaagaatgagaaggttgcttaagtctgtaaatggacttattaagcttacagactttgttttcttgtcttggaatcttatagccttcaagttgctcattatctagatggtttcttcaagaattccattaaggaaagctatcttgacatccatttgccatatctcaaaattgaaagcaacaactatggagagaag

SEQ ID NO: 30596 - DNA, 2498 bp, Cannabis sativa
ttaattctttgataacgatgtcatattattacaaattgaatagtagttattctagaaaataacatgaaaattgtgctacttaataataccatgttgtgaagaaactccttacaaatgattctcacattccatgcttgagagaaatttgatgaatggattagatctatatattgaactagcaatgagaaaacatgtcctatgtgctcaaaatatgtataccaactcataaatatgtattttctattatacaacattttcatgaagctctttctaatggggtcaaaactgatcacgccacctaactatgtatggttatgattttagggggcgttaggtatgaggtttagacttgatgagaatgagaatgtcagactaaattaaattataataatcgaggggtttgtgtttccaagttgatcttactttttaaattaaaatggcagtaatgttaatcccctccaacacttccttccaactctattctcttcaactcaaactcacataataaacaccccattaggtggcgtttggttagaaaaaataaaaatatagctagaatgaaaataacaatctaatactttaaaatgaaaccaaacaaaagaatggattatgaaagctctaatatctttgatagctagtaattgaactttaatgcatattatgaagaataaagacaagaaagctaaatcaatgaacaccatatttacaagcttcttctgcattggaaacacattcaaaccgagtagtgcttgggtccccaagaaccgggtaaagtaacatccactctaaaattaattaaattacatacaccagttctgattttaaaaatcaaactacataatctgaaatgactttacacgatgttacctaattcttgaacacaatcaagataaccaacctaagcacacttagatccaagaaaacaagctctccttgcctccaaatatgaagatcctttagcagatcagtatgaactctcctcaaacaacgtagatttgaactccttcttcaacctcttgaagattcactgaattttcatatgcatataacatagaaacactagagaaatatgttgccctaagaataaaaaacgtatctatcaaagatgagagagttagttagaaaaagcaacaacagaatattatatactcagtcgtaagggaaacagctcggctaactaacaaccacagttgagtccagcgcagctggcactaactcaaacaagaaaacaatataaaagctgaaagctgacatgtcacataataaaagtcaccaagacaaaacagatgacaactgatgacaacttagatgaccaatgtaaaaagctaagacagtaaacatggaaagacagaaaattgaacaatcaatgtaccacataattttccaaaaaaaaactattgcacttacagattaaaagttgttttcttgtccatttcattcaattttattacctcaaacgaaacgccacctcatagactttgccatcaacttttgataatgttgaaataaatccccacagacactatccaaatcagcacttaacaagaattacaaagcagtaaaaacctaagtggccttcggcctctaacaacctacagacagaacaaaagttagttgaaaagtttgttaaaactgttgcaactaactctcagctctctctgctaatctacaagctatatatttatatgcaaagcaattcagaacaaaagagaacaaattaggaaattggagaggaggagacatacactggttaagtcttggagccctagggttaggactcagagatccaaaccaaggaggaaacatacacacaggaagaagaagaagaagagattagtgcatattcagagagaaaagagagaaaataaacactgtaaactcaaaagattaccaatcgtacctgtgatttggaatctagctttttgtaactcttttatcttgaagatccaatagtggaaacaagcttttttgaggcgagctcaaagaggatgtacccagcaacatttggggaacctctataaaatttctggtgcactatttttaatttctcttgctttatttttgattaatctatgaagggataaactgggttttttgggttgtgtgcagacttcgagtttttggtgaagaaactcgaagctctactagggtttcatatttgggtttcgtgtgtgtgtgaatgaatggtttctagatattttttgtggttattgcaaaacgacttgtagtctagggattaaaaaactgtcgtttgggttcttaactttaaggagtcaaccgagctttgattctgtgtgtaaggtcgattttgaccttagataacttatttaattttctgttgggagtaggataaaagggcaaatttcctacagtggtattagagccaaacaaggcaagaaagctacaatagaaagcaaggaagaaatcaagaaaggatcaagaaaaattcgaaacacccagaattcaaatatacattacacagatcacaaaatcaacat

SEQ ID NO: 30597 - DNA, 3768 bp, Cannabis sativa
  modified_base (2644)..(2646): a, c, t, g, unknown or other
atatatatactaggtagatgttacgtggacgagccacgtattgttagttttatttaaggttttttttttcaattttggtaaataaagtaatatgattatttgagcaatttgtttttaaaaagtatactatgggtactgtgtttataaagtatactatgggtactgtgatcattaatgaaaataaatcaagacaaaaaagaatacacccaacataaatatacatacttgaaggctcaaaattatataacacatcagaacctaccttttaaagaagatagtttaggaataagatattcacatgaaatacatgtgaaggagagatatccactacttagtatggaaacaatgagattgaaaaaatacattaccacatgaaattacaagttaaaagcgcacagggaatcatgagtccattgctcattgcaagaaacatagaaccaggtgataaacccttaatattgtcaggaattaagaaacttgtccgctgaaaaaataaaaatcatcaaggttacattgtgaagttgtttaattgagcagaaacaaaaacactaactaaaatatagattattaccatttgtgatccacatgaagagaagtgtagtcgttcatctagatatagctccaacaaatttagtaccaatgtacgaaaatttgaattacaatacttaatcaaatgcctcattatcattaagcatattcaaaactctaccaaaattctttcaaacatgtatataatacactatacaacaacaacccaataagaacccaataatacactgaatatggatcttatgagttcatacctaatggtatagcaagagacttgcatcaaatgataatggtggtactgatttgatcaccaccacagtacaacaacaacccagtacaacaacaacccattaaaaacactcaattttgtaaataaatacactcataataaacattgccaaacccgtaccatttgactgcacatatcatttgcccaaaatatctgatactgttttgtcaacaatttggaaaagctcttccctataagaaagaaaaaaagtcattgcagagtacacaaaagaaagtcactgcaaagtcatattctaagaaagagaagctgctttgttttgtataacttcctagtattttttcagcagtacataatagtcatacaattggcttaatcttatacagaaacaaacaaaaaaattaatctaaaacaagcattaatatttcactggtttatatttatcatgataatattgttgttaagattcttacttggtattgcattgcattatctgatgtcacaacaatcacatccaatggtgtctctctcaaggaacagagaacctaaatttaactcaagcagaaaacatcagaccaaaaaaaggtaataataattacaataaatcttgagcttacttttcgttctaacaatagaataatctcttacatggttagatagcttagcaaaatcgatgactctgacattttacttctacctaccaaaatgttcgtccaagtccaagataactattaagtgtcatcacttggatttctcaacagagaataatacgccaacaacatctccatatcaaccaaacttaacacttaagactcattcagaaaggtcacccatttaaaagatcttgtttttactaatgcgatactaagaaaaagatcccatttatgatatatgaaatgattacataaaattgaagttgacattcataaaggcaattccattgggtgcaaaaaagattgaaattttgaaaaacatatattaggaaaacattaggtttcttgcatatactcataacacaattggcaacaagaaaagtcaacattgaaaataatgttgatgtttgaaaataatggcacctgtaatattctcttttgttgaaaagctctactgcctcgtcgaagctgcaattctcagcatcctcttcatcgtggtcgttcaaaggagagaatcggtagaaagtacggaaagaatcggaacaggcagggagttttagtgtattgtattgggaaggaatgaattgaatttttatgcggggagaaacggaataataagaagaagaaaatacgctgggacgatggaatgagcgattgagagaacttgataattgaaagttgaaaagaagactcaaattttctcttatttttcactggatcccatgattttagtaaatcggttagggctaaagaaatagattttggaaaccttctagtcaccttttggaaaccttctacctgaaaaagcacaggaggcattagacaaagattacccaaattccagtgataaaggaactactaatcctaattcattacatacagttgaaagaatcaatgtaaatttggtaaatttatgttagttgtgacctgaaatttatcgatcaagggtatggcaccagcgagttctggtggaatggccattgatagagaagtaggcgtactgcaagtcaatatttgaaatttgtaacaaaaatcaatgaatgaaaaagaagactacgaagaagaagaaagacttacggagtgcaaaacctataccagagtgcaaacatgattttttatcacaatatttggggatatacggtttgttagagagatatgtggctaacatgattttttttaattttttgggtttaannnttgggtttatttattaacggtagatcaaacttattaacatcgttaaatttaacagaatattctttttatttttaaggtatattctgttaaaccaaaaaatgccgttagatagacacttttaatatataaagatataaatacatacttgaatgttattgagttaccaacctttctacttaccataaccccttacttaattattttatatttaattactgttgtatataaatacatacatatattttttcttttgtgcaccatgttttggtgttctactatattattatttttgtaaactcatatttctttttctttgttgcgttatttttagtgtgtatatataaatatatacatgtaaatatatgaatatttagtgatcatatttatgtaaattatgtgtatatgtattttttttttaatttcaatatacataccataaccatcagaagaattgtttgctccaggatcacccacagtaccaatctataagtattcttgttgtaatataattgtaacataaagattgttactattataatcaaagccaaaactatttcattggattgatcatgcattgtaaaccttttaaagaatcatcataataaaggtattaaaattcgataatttcgatccaatttgtttcacatatttcatggacaatgaaaatcataaaggcacaacacaaatgtgattattttgtgagattaatgactacagctaatatgtacgtactcatatatatatatatatactagaagaaaattacgtgcgagacacgtatacttagttttatgttagatgttttttattttatttaaaaatgatacaatatataattgaagaaaaatattattagttattgtttgagattatttttacttaagacactggtatcaagaattacagtaaattacaaaatattataaaaattaatggcaattttcaaaaactacatatttttcctattgaccatttcataatattaggtccatgatactttaagatacccaaacggcaataaaaattgtcaatttcacactcaaatggatctgaaaaaaaacacaacatgacataagatacatgatcatcataatataacattaagcatatataatatatatt

SEQ ID NO: 30598 - DNA, 1769 bp, Cannabis sativa
  modified_base (434)..(449): a, c, t, g, unknown or other
ttttgagttgtatctaacgtgtagaaatgaatttgggcaattcgtgggtttgggcttatttaacaaaattttaataaactattattatttttttgggttcttacaaaaatattaattgttttatcatttttacaattttactgtcacatatttttttttacggttttagtatatcaagttttcaaatatattgtgttaacgttttaaaattacaaaatattgtgtttcaataaaataaaaaaaataactaagaaaataactttaaaatattttaccaaacaatatgaaaacaattataaaacaacaaaaaggtaaccaacagaaaaataacaactcctcaatatgcaaaataatatcatctcctcaatgtttttttttttttgtattacaattttctttacttagttttgacatctttttttttttttttaaannnnnnnnnnnnnnnnttgatttatctttttgtactactaaattaaattttttatgaaatttattgttacaactttatactttcaatttttttttttctttttttctttttgtgttagtgacagttaaaatgataaattattttttaaatggtaaataaataattacattaaacattaataattgaagtaataatatcttatgattttataataaggtatataatataatggggcattttttcagtggagttggtagaaagtcttgttgtccaaattggtcttcatcttgccttcaagctgcagctctccccctgcattcttcaatcaaattatttgttggtggtccgttttctgcagctcctgaggccgaacaacactgattggagtgtcttcttgctagaccaactttagtccgagagttttaagttgtgccaagctgttattcatgctaaaaagaggtgtaataatgttcaagtaagtgttgttgtagccaagtttggcatagtggaaatcctccctcctcctttcctagagctcctaagttcaatccttctccaggtctatagcaatgctctttttttttttaattattttggcatgggtattttcctttgttgttgctagtagggtgaggctctatcactcttgctttttctttggtggcagacatctttcttatcttacagtgactcatctaccatctgcggctctccttacattcatagatatgttgcctccccttactcttttttcttttacttttgttactttcattccataagtctaggattctaatagtcgtaacacgtgtgctaaatttgttgtactggttgcattatttgaatcccttttagacgcgcgtcctagtaaacttaacaccttagttttacctcataggtggagctgtcaaggcaatgcatcttctttaattcattttgtcttgggtcacatccagtgtcagctacttagagcagtgttccccactgccgaaatcattgacatttcatcttctgattcggaaaatgtttcacatagtccgcacattagatatgctagattagtgtcagagagggctaaccattttgaacacatcattgcctgtcaagagcgtatcgagaagatttaggcagaaaatctctcagttttgaacggagagagacatgaccttgtcgtcgaccctactgtctacctttccaaacttaaggcttctcttatgaaatctcaacttcatttggatttccttaagggaacccttcctcccatgcttgatatcccgtcatgctctcagactgttgaaccccctgtatgcaagggacaatcattgcctacctaggg

SEQ ID NO: 30599 - DNA, 4153 bp, Cannabis sativa
tttaaaaacacaattttaaaaactaaaaactaaaaacacagccaaacaagttctttaacttcttattttttttttctttaattgagaatttacatttgctactttttctatagattttttttctttcaattttagaaagttttatgagaaaagtttatggtacacccctacaaaatagatttattgttgtacccattaaactctgatgtcaacaaaatactcagtattccactgacacatgatgaacaacaaaacaatctaatgtgacataatgaatcaaatgggatgtatacagtcaaatcaggctatgctttagctatgcagttagaagaccattctccatcggctagtggagttctgacccaacaatgatggaaaaagttttggggttttccttgtcatcaaagattcgaattttactttggcgcgccatccatgactgtcttccagttgctgactttctacacaccaggcatataaatgactctgcaacttgttctatttgtaaccggaacaaagaaacaatcattcatgctctctttttctacaagcgggctcgacaagtgtggaatcgatccacttttagtcttgaaggtatgtcttttaacaatagaagcatgaaagaaattctgatgcatttttctgcatcatggacttctctgcagttagaacagttctcaacgattctttagagtatatggagtgaacgaaataaggagaggcatggtttcgtgccaaaatatgcagaaaccatactttactttgccctctcttttctggaagattatcataaagctaggagggattctcaatcggttgcatccaacaactaatccaatgcccgatcagtgtcacgagacactccatggctacttcccccctccggtcgtctgaagcttaatactgatactactgtcgacagcaggaaacaagtaacaggctttggtgtcgtccttagaaataactctgacgatatagttgttgctatgactatcccttttaaaggctgctttaaacccgaaataatggaagttatggctttaatgcacagtcttaaatggcttggggagctactactaccagttcatttaattgaaacggattcccttatggtggtttaaggattgcaaactgcacaaatgtcggcttctaattttcattgtatcttagataatatttctcttttagtatctaactttcctagtgctcagatctctcatgtgtttagattgctaataatgccgctcatttgttggaaaaatttgcactctcggtggatattaattgttcatggtttgaggagatgcctctaccactaatacctattgtattataactttattgtttaatataatagcatttgatctaaaaaaaaaaaaaaattatttacataacattgtacatcatatagttattaaaggtattctataatttttttttttaaaaaaatgacaataatttaatgtgtctaaaataagattcaattgcatccaagactcttttattttatacgagtatgaaataaatatttgaactctaatttagatattcaaaattatcataaattttttaaattttatatgatattttaaataactgcaatatactcattaaaataagaaaaataaaattataactattcaaatatcaaaaatataaagtaagtgcattaacaatacactcatttttgtagcatcttataagtatttttttaacaataaattttcattgaatataatgagagtttgtttaatacattataaaaaaaaaaaaatagagaaaaatcatctataaactaactcgacatccactcagagtttatgtatgttaataaaaatatgattttagaaaaattaagtagaaaagtgaataatatgataatctatatttgtatatattaaataccaacaaactattttttttaataacgaaaaactaatttttaagaatttttatacaaagtaactaaaaggggtaagttgaaataaatcctttttttatccgttaataaaaaataaccttattttaaatttaattcaaatgtactccttttataagtccattaccgattataccctcacataagggtactattcaggaaggtaagaaagatttttttcattatataaggatataattgggatataacaaataaaagagggtttaaattaaatatatagaaaaaaaaaaagatagaaaatgaaatgggttaacaaaaaaaaggtatagggtgcaatttctactaactaaaatcactaatatatttaatatttttacagattttcttagtgatttttaagtatacaatattattttcatgttgaagcaacataataatataagataacaataatataaaaacaacattatttaaaaacaaccgtccgtattttgtaaaattttaaaacttttgggtaattatgaaagaaattcctttattcaaaaagaaagttcccaaaacaaatagtactatttgagacattggcccattagttaatatcatgccaagcctaaggcccaaagaattgtgtgtgccgtagatcattttacatatatttaatttctcaaacatattagcaaaataaagtattttgaaaaatttgtggcaagaagcgttcttttcattttaattacaaatttagtcttctttaaattaataggattttatactgtttatattttaaattttagagtgtcacatataccatttaaattattttggtatttggtatattttcgtcgccccgcttctctctcttcccaatccccaatggaacctctctcttttaagttcccaacgccgaacacccttttccgcctcctctgtctggcatccaagaccagagcactaataagaaaagagagttcgtcatctgccatatccgtgacacaaccgaggccaaaatttgtatcgacgacactcattcatcctcctccgacgaacgagtcatattcatcacctctgactccactcttccctgatcgaaatttgatcacatggataataacaacaggtggagtaatagctctagccctagtgatagagaaagctcgccgtcagtagctcagttggcgcttttaaaggtgttggagaagatggttatagcggaggagtatgagaatatgaatgattgttttatagtttatttatatttaatttataattatcacaaggttattttctcgttatttttttttttattttttgctgaacaaagtgtatttttgtaattttaaacatttacaagcgtatttttgtaactaagaatttaggccgtaaaattataaataaaacataaaagaataatatttttaaaaattatcccaaaagaaaactagtgtttttttttaaatgcattgaaaataattagagtttaatacattatagagataagatggaaaacatctatctaaattagttcgtcatccacctgagtgcacaaactgttaattcatgtgtataacaaacatgaatgagagatgcctgaggataattagatagcaaactaagaatacccgctaagagagatcataaatcattacaaaaagtgaatctcttagagaacataaaaatcaaaggtaaacaaccagaatcaaaagaactaaggtagcctttggttggaagtaataaaatggaatgaaaataaaacaatctcccttccattcatttgtttggttgcatattaaactattaaaatgttattctaatacaatggtatttctatcattttggtagaataactattccattttgaaatataaggaaagactattttaatatatgatgataaaaaaattaattgacttttttttatcatttttttaatatattttaaattttattctattccattcctattctcattttcattcccatttatattcttatctcaaccaaacaccacctaataagcattctaagtgtaagctacaactacaacttatgcttagattacttcaaatctttttagtacaaactattttgatgttattaacacatttacataatttgtttaaataataatgaaacccctataaaaatattaaaataaataataagaacccttttaaatcaacaaactaaatgataaacaaataaactaataaatcttaaaaattcaatgattaaaaaaaatgaaacttatcttattct

SEQ ID NO: 30600 - DNA, 1473 bp, Cannabis sativa
  modified_base (690)..(690): a, c, t, g, unknown or other
tatacctatcaataaaaaatatatttactttgaaaaaaataaaaataaattatattttcataattataaaaaaaataaaataaaattatgtaattttttttttgagtcaatgtaaaattttattaaaaaaatatacatgattttctaaaaattataaaaaaataaaattaaaataaaaagaatatttacttatttggtactactattttataaaaatacatatttactaccctaaacgtaaattaagtattattgaaatcatacattatttactaccctaaatacattatttaattattttaaaatcatacatatttactaacttaaacttaaattaagtaatattaaaaaaacaatgtactaaatatatttttccaaaaaatctaaagtattaaatcagtatattattaaaaataatacaaaataaataatgtagaattttttttttaaaataagagtgatttttaattttttaaatatattaattttaaaaataatttttttaaatattaaaatatacttattatttggtgggatttaaatagaatttttttattttatttattttttgtcatgttcctcttcacttcgcttcccttgttctgtcgaccctttggaaaaaagacgaaacttctgtcttctctacttccttcttcccaaaacgttttatcataataataataataatanataaataaataaataaaataatgtagttagtgtccccacctcagacccaagcgcgtaaaagatagatgatagagagaagagagaagagagtagtacgtatcactgtagtataacacattcaagaaaagtcttaagtcaccgtaaaaaggcccccacaccgcgttcacatttgcccacacgcttactcatccgccatgggagtatatatacctaaccaacccaagtcttcttcatctctaaggcttcttcttctcctccgtttacttattttcgataaagactcaatctttgttcacactttcttttcaatccatttttttatttataccctgtttgatctgttttccatggaaattagctccgtctctttatttagccaggacgatatctcccatttatacaccttgttccccgaaatggaagactggggtgtcaacaacgactctaaaaagtggcgaagaaaagaagaggaatatgggtttgatgagttggagggttttgataatggaaatggtggtggtgctggtagtggtgggtttaaggaaattctcacttctttaattttgcttgacgaagaagagaagcaagaacagaagcaaagagaggttgattttgagcaagagattgctagctttgattccaatttcaagctcgagactcaaaccatgaacgactacggtaacagtatgaaacgacattatacccaattgggtgagatggaacagtccaggaccaagcgggttcgccgcaactcagcttcaactgcagccgccgctacggcgg

SEQ ID NO: 30601 - DNA, 1476 bp, Cannabis sativa
gaactctagaggcatcgaggctaagccagaaaagataaaggccttgatcgacatgaaatccccaactaaagttaaagacgttcaaagcttaactggttgaatcgctgccttaagtagattcgtttcaaagtaaaccgaaaagtgtgtccctttcttcaacatcctaagtggtaacaaaagattcaaatggactgaagaatgcaaaaatgccttccaagctttaaagcaacaattatcccagccttcggtcctttcaaaacccttagatggtgaagggtttagcttatacctagcagtaacataacatgcggttagttcagtcttagtaagggaggaaaatagagtacaacacccagtctactatgtaagcaaaacattgattgggcagagtgtagataccccctcatagaaaaattgacctactacttactcttagcatcccggaagcttcgacccaactttcaagctcaccacattgtggtactcactgaccaacccttacgctaggtgctacaaaaacccgatgcatcggctattaaagggcaggccctggctgactttgtagccgagtgtaccggggttccaaatgtcgatgttgagataagggcgcaagagggcgaccaaccaacaataatcagtgacacccaaaggcctgacccgagcgattcacctgaaccacacgtccctaactctaagaaaaatgaaaaccaagatcacctaagtgaaacctggaagctacaagttgatggttcttctaccgatcagtcatcaggagcggggatcaccctaataacaccggagggacaacaaattcacacggccattcccttcggtctccctacctcaaacaacgaagcagagtatgaagcattaattgtcggtctgaaactagcgaaagaggtgaaggccagacacttagacatttacaacgactcccagctagttgtaaaccaagttttgggagagtacatggctagaggagaaaagatgatggcctaccttagcaaaatacaagacttgcttgcccaactggaagggtacaacattcaacaaacacgagaagagaatgctactgttgatgccttggcaagattggcaacgagtgaaaagatagataaagccagccttgtgccaataaaatacttattcgagccaagcatccacaccaaagaagaagtcctcatactcgatacaactcaataacggatgacccccatagtcgcttacttagaacaagggacactgcctacaaacaaaaacgaggcaaaaaaaatgagaagaaaggccacccggtacctaatcattgatggtgtcatgtatccacaagggtactcagtgcccctactacgatgtgtacatcaagaccaagcccaacgactaatggaagacgtctatgaaggtttttgcggtaatcacgctggggggcaaagcttatccaagaagatactaaggcaaggattcttctggccaaccatg

SEQ ID NO: 30602 - DNA, 935 bp, Cannabis sativa
gagtactcgcatatctatttttggtatccaagtagcccttgaatactcgcacaaaactggtgttgtcgaaatttgctcgacaacaaaagtgataaacactgtcatgaaacttgtgatatattttctctgaacgaacaacaataaatatttgtttgattgtgcttttaactctactaagcttattagtagggagattaggaaaattattaagtataggatgatagatgttaaagtggataaattgaagggagtggatttacatgttaatgtaattgctaatttctaatccagttgttgcttagccattgagaagctgcttcttgtagcagttggctttagtttgtacgtttgcttgtttgaatgaaaagttttcctctttttttttttttggtaattgaaaagttttcctcttattaaaaaaaaatatggtgttattttttctcatcattagtagactcttagtagttaatgtgtataggacaataaattattcaatttagatttaatttttcattcaccaaaaaagttatataagagtaaataaaataggttagtaaagagttttacctctaaagtattacaactactaaattgtacttttaaaatttttttgttcctcaaaaattctctccaactatttacactactagacttctgttaaattttatctcatgtgactaacaaaatattgatgtagctaatgtgttataaatatattagctcgacatgtgacacttaaatttttaaaaaattatcaagagcaaaataaataaaaataaataatttaaaattttcttattaattgttgaaaagattattagatttctaattttaaaataaattttttattttaaattatacatgtagcaattaggtatgagaattatacctgcgagcgggggttgactttcaagggtgggtatgggtttaaagat

SEQ ID NO: 30603 - DNA, 2682 bp, Cannabis sativa
  modified_base (62)..(71): a, c, t, g, unknown or other
taagttttgaaatataattatattgtttaaattactatttttttacattaaaatattatttnnnnnnnnnnttttttaattttttttataaagatgtgaagatttgattgaattagttatttttacatgtcaatcaaaatctccgcacaagtgcagattttgaattttccaatccgcacaagtgcggatatccacatgcagattaaatttgatcggctattttatgaacacccctacttgtcctttcgccataactattcaatttattgaataatttagccacatacaagtgcactaaagcaacaaaacatagagaagataggcaagttattgaaaatttgttccttaaaaaaatattttttatttaatgtttgaagagttttaaaacttaaggaatttcactaaaatatctcatttttattcgattcatttcctttgatttactctaccaaaacaaaggtacaaccaaaaatttcaaagaactattttgaaaggaaaaactatttcaataacagcagcatcctatgaatagaatataaccaaaaaagtaattaaaaaaaataatgtcagaaaatgagtttatttgacatcaatcaacattacaatcaatactacccgagtacattatctgatgagtttggtgtgaaggtcagtagactaattaacatgcaaaaaaaatgagcccctacactaattgacattcaaaaaaatgaggcaaccgaacaaattttacatcaaaaatcatctaaggattatttaacacctcttaacttttgttgaaattttgatgaacaaatggactggggaggaacttgaatgtcttgtccagaagcatctcaagttatacttcattgttcttgaactcaattgctatgatttcctcaatctcaaaaatacaaaatagccaacttcaaacaataaagagagcaaagaactccacccccaccacttcttttggctaaattagagagcaaaggacctttccttgattatatgcatatacaaaggtccttctagatttcaccacctggactcattaatgactaacgccggccagttcgagatttcggcttagatgatttctgtgaagaagacataaaacacaaaggaaagatggttattcatatgtaatgtaaactagtgtagagttttcacaagttaattatatgcttcaggaaaaagcaaataaaaaagtaacagaaaacaaagaaaaagaacccattgcaattcacttaccgacgcagcaccaaaactagccccagaacccattgcagtaccttaaaagaaaaagaatgaacttagttgagctagttaacttggccaagaagaaaaaagcattataaaatgaaacccaatcgatgtgaaataagatcaacaattcatcgtaaaatgctacagcataaatatttaagatccatagtattaagaatactggtgcataatcaatatcttgagtccaagtaaatttaatttaatataaccccttcacacactgttaaaaaccaagtcatctagcttctaacaccagtgtgtatgtgactaaacaacttgatcacagtttcttataagagttaaaattaaatcaacattaacatcaataatatagtgttggcttcactattcatatcaattctgctggactaatatcattaactctatgaatctgcacttagcatcccctacattcacatgtcctcttctcaaaactactttagtctacttccatttagattattcttttgtcacattcttccatttaaatttagaccactaattaaaaaaaaatcttgaatctaagaatttttggaatcttggacacacataatgccctcagcaacacaacaacttttcgcacattttattacaggggcgaggggaaacactttcgtttactaaatatacattttaatgtaaaggtaaaatggacaagaatgtacctgaggcaaatggtgttgaaaatagtgaacttccagcaggagtggaagaaccaaaagctggagcagtactaccaagcagggaaggggtggaactagacccaaataaagatgatgaagagccaaaaagagaggtctggggtgtggcagaagatgatccaaacagagaggatgttggagcagaagtagcgggtgtcgcaaacattgaaggcatggatgaagatggggcagaaggtgtactgaagagtgaaagcccactccctgatgaagctattggagcaactgtaaccgtctgtggtgtagtggatgtcgcttgagctccccaagtgaccaatgctgtggattgagttgatggttgtggatttgcaggcaaatgtgatgttggatgtacccttttagcagcagcctcttgtcttgctgtttcacgtcgatcagcctcaagaaatggatcgttcacatcacctcgacggcgttggtcagcaagataagctgttctcatggattcaatatattgatgaatactctccacctaaggaatacatcaaagtatttattgtcaagttatttatcatctaaaatcacaacatgctcttccttatttgtacagatgagtatgtggtttggggagtgaaaggccagacaaatcattaacttctggaaactacatactttaaacacaagagacacatgtatgaacttttgagtaaaagaacagcaagtagatcatataagcctcgaaatggtataa

SEQ ID NO: 30604 - DNA, 2129 bp, Cannabis sativa
tatatatatatacaagaagaaggaaacaactgaaaatatagacaattgttgactgatcaaatcagcatactttttcaagaaattctaattctcttctcctttcctcacgcacatcatactcctgcctgttatagacacagttcatcaaatacttgatggaagacagaagaaattattggaaagtagaataaacattataaacatagaaagagaacaccagacctaagctccgcttgagccttctcaatcgctgctcgacgaggagaggtcttcaaaccaataccaactcctccgtcaacaactcctcccatggaatcaacttcagcatttactgggagcgcataccctgagctacatccatgcattcccgtcctaacacctacaatcttccccttccatctgtcaacaacatttcgtaataatagatcagaaacatcatataaattaagaatacaaggtaagctatcctacaccactattttagctacattaaataatctccatagatatttgggagcatcaattcaatgaaacgtgcattataattcagatgcctgaattttattaaatctcacaaaagaactattcccctgactagcaaagcaaaagcctttcaacaattttaagagatccactctttaaataatagtgctaagacaaccataagggttcaacatcgaaattcacattactctctatacttatactatctcttttgatgttcctaactgagccaaaacaaaaaacttcaaagttttggcaactatagcaatgtcttgaccgaagacacagataaaacgagtgacagtatagcacaaatcaactaatagttacaaatttcttagtgatcatgtttaaaaagttgtttaaaatatatttaaaaaagaaaaatcaaaacttacaaattagaaagcaaatccaggagttaatatttgtgagtgcgtgtctacagaacaaaaagagcgaaagaaaataattttttttagaaaaataaacgatcatgatatatagcctatcccaaaacgtaccccagagatagaaaagaaaaatctactaaattaattttttgaaaaacgaattctccaccacaaaatttgcaaacatgatgtaagacctgattgcaaaagcattagaaagaaatagtcagctaggcagactgaagatgatacagtaacgtaatgcaggtaaaatatgaagataccaacgatagtgaagacacattttagttataacttgtattcccaataaggaaaagatacctaaacagttcccactatagctagcatatatgtttgtaccaaaaattgcaaacaatagacttgccgccaaggaatccctttgaattttggtatcagtatactcgaccaaatctatttgagttccaaaaccactaacatacaacttcaaaagccttccaggaacaattcaatcacatgtccacgacaaattatgatatccaatcacatttcaaagtatcaatcacaggcacaacattaacctactgttactattcaaagttacaggcattccatcacaatgcataacctaatccgagaccaacgactagattgcacaaattgccgttgaacaaaaccctaatccactcaagccccaaaataattgaacaaatttaaaaattctagggttttccaacaacgaacagaaaaagaaggaatcacctgaaattaaaagcagagttgccaaattggaaggtagggcaagaaggtggtgggaatagagagttgaattccgtccagtttctctctcctagggtttaaaaaaaatgacgaagaacagaacagaacaaggccccctttaaaaatggaaaacgcccgaacttgccctagcacaaaatacctctctgaaaatgtcagccatgaaaaggttggcgaatcaacctgcgaaaccctatgaagaacatgtgtgtgtatgtaatctgtgttcaatttctggtacgtatgatgtttgtttcggttttcttcgttcttcgtttggggaactatgcgagacctctgcgagtagtgggctgggcatggagaagaagatgcagaagaggccttaagccttaaacaaacaaacaatttttttggacaatcattttgggctttttttttcattattattattat

SEQ ID NO: 30605 - DNA, 1392 bp, Cannabis sativa
catataattctaaccaatttttttagtttataattcattaagtaggccacctttttagttgattttttctttccaaaaaaacagtgtatatgtttaggcactccttttgttaaaatttatattatagttgcatcatatatagaagaaaagagtaaattttttgtgtaaggatgaactatatatcataaacataataatttttgagactttggatgacaatttttaagagtttctttttatttttattgtttttgttttgtttagggtagaaagatttcactatatatgctctttctctatacatatctcatgaaattacatatattgtaaattttatatttattcatatattgttttttttacaattctcaacttatttttgttctattttttaaaataatactaagatatatataaaaaaatatttatcaatttaagcctcacataaattatcactttaaaatggtatatatcattgtgtaatgatttaaaatatgtataataataaaattaataaaaaaattatgataaaacaagtacataaataatatatatattgttaagtttttattgactccggccatcaatttatattttatttttcatttttgttttttgaatttttgttaatattattatacaagtattatatattagtggaattgaagaaatttacaaaaaaaaaaaataattattttcttcacaaacaaataatagttattattatattaatatttttttattagtatctgttataataattatgtaaattaagtatcatttgaattaatatttaaattcaaattttattagatatttaatttattattttttattctactttttaatatatataatttatgattatcaaatttgtaaattttaaaaataaagaatttaattaaataattgaccataaattaaagggattaaaaagctcattaattcaaaaactttccaccaaccccaagagagtggaagttataatattaagaagacaactcttaaagaagatatgtttatcaacaagataactatttaaaaattattcgactgattggagtgatacggtgatgacaatggatgagatacgatattttaatgatacagtgaggataataagcgagatacggtaaagatatagtgataggtgagatacgatgagagacaacggaggagcagatacggtattaatacggtgatgacaacggagattcagtattgaatgatcagatatacaaataatgcattatatttataaaaaaaacactatttttttttttctaaatcaccctatttacttatttctataataataatttttttaacaaagtaattcaaaattatatatgtaatatatataaatagtataaatttaaactttataatatt

SEQ ID NO: 30606 - DNA, 1722 bp, Cannabis sativa
aatactagttttgttgaaaaagatgaggtgcttcattaaaggaatttttaccccacatgctaaaattttcaatttgtaccatgtatagcgttaaattttcaccattattccacagttgatttttaattgttctactgttttaattattctatttaatattttacgggctatttaaaaaaaaaaaacagtatttttgtaaaaaaattcgtctaataataaaattgtaaatttttacgcaaaattatatatttttgtaaaaactccattaaagtaggtgtcaattttaaggctgagatggcatgattttaatagtattaggctggtctatttgaaacaaagcttgagaaataatgacatttgtatgatttcttttgagaaggataataactacatagtacatgctaacttgttccatttttgtgaagaaaaaaaataagttctaaattgatctttaacaaaatataaagcccattagagatttatgcacagcacgagccgaaaaaacaaaagacttttgcccaaaaaattattaataataaaaccaaataaaggctagaagtgaagtgtgacaacatgcataaaccaagtaatcatgggttaagaataagatgatggattttgtggcaaaatggagtcgtttttttcttcttagaattgacatcgacctggtaagatagctagtctactccacacatgtgtaatctttgataggaactctgggccacaccaaaattggataagtacaagtttcagtttcctactttatttatccactaccacttaattattccatcacctaaagtttagtgtcatataactaacagcacttgtttatagcttgcgtatataatcttgggaaataaactcttgccttagatcattggtgaatgaaaaacaggttgtctagtgttctaagtatgtgcactgaactgaataatgaaagcattagaactaaacttagtgactgaaaatgtgaacttaacaggttgtctagtgttcaaaatccacacccggagagaccggaagaacaacaccgaccgactatgctccaccttggaacttttctattttccacttataggcaattcttaacatttgacttgaacccaattcttaaaatgtaaatattcaaatgaggttagttcttatggtggctgtgtgtgatagttaccacagtaaattcccataataaaaaataaatacaagcagcaagcaaccataacaaaagagcattcaagtgacaaagacaatcatttgacatagtccaacaatgcacaccaacaccgcccgagggggttggagggggttggtgtgcattgtacattgtgattctaaaataatataacaaagtggttaaactggtttcatttggattctagctacaaacaacccccagaggggtcgtaaggaggagtcttggaaaatgctggtagacatttgttccaaagctcgaatccccacaggctcaaaaaaaattgttggggccatatcccggtcgaactgccaggttacgctcaaaaaatcaattctaacatgtacatcattgaaagttgctattacttgcacaaaggttacgcaccttatgttacattacaaaaaaccatactaaaatattcagagaataataaacctaagaaaaagtgaagagtcagatagaatagtgagccaacagcaatcaaatatgtactagctggttatttttcatcataatttataatcaag

SEQ ID NO: 30607 - DNA, 5152 bp, Cannabis sativa
gagagatggcgggtgcattctggggaacacgattaatggagatagtgaagaagcatgactccggaggtcttgtttggaagagaataaagctcacacctactcgtaaggccaacgccaagaagcgtctccttcgcgtttggcaggtccctcttcatctctctcttcccactttcgttttcgttatgtttatgattagggtttaatctcaagttaaattgtacactcactttgtttttagctttctatggctttgattcttcatatttgtttcgtttgattcagcttgaatatgtgtacaaatgcaaaaactatgaacttttattgtgaacttaactatgggaatggaaggactttagatcacttttatctgttgaatttgtattctacgaataagaaattaatctatatattaatggtagatgatttttttttttgttgttgttgcttttttaaatttattgtaaggccaactgtaactttcttttggcgtatcactattagtttaatctttgttacaagtcatgtattcatatagttgcgtatactatggaaaagatatcagtttgtcagctcagtcactttggagccctgttattgttaaagatggaaaaataactctttctgctatatttttgttgtgacgtataagagaaatgtaggtttttcatgataatgtaaaaggcagtgtttgaatttcttatgactattaattatgcaattgcttgtgtagtttagtattgtgtgagttataagtcctcatctccaactttatggtgtgaatttttctttccgttggactattagtatatcattaaatacaaattttgaatgagctattgcttgttttatgttttggactaaaatcttctcctttttgtccttgatttcattgagatgtcccttgttcttggtaatgataataagtttataaatactatgtaaagaacagaagattgctgaaacatggttggggcattttcacaaatttgaataacatgcatataatatagcaaactgaataaaaattcaaatttatttggtgaatctttgtcatcttgtagatgctataatcactgctagctgacagttattaggagatgtccacattgtagtatcaagatttttttctgttcttttttctctaaagttaaagaaaaatgattctttcacaatactccttgggatctagtgcaacaatttctctcaatttctagataagggctgtgctatttagttgacatttgaatttcaacagatttggttgaacaatttgttttagtaagttatgcataaaactgatatgatcacataatatggtgtatttcattcttaatattgattgaagttagattctgctgcatctctcttatagcaatgtgattgacatgcatctctgcttgcggactgttgcatacgggtattatttaagcaacgtactgtacatatgaagcataattgctttcatatttcttactccaaaaccaatatcagaatcaaaattgatcactctttgctcccttcgaaaataacaagtctctgttttataatttttaagatagtgacataagttccttccattttcccttgcagaatgaagctgtcttgagggcttgttctgaagaacctccttcaaaagctgctgaaaaagtttgtgaaaaagcaaatgaagttgccaagagtgagtgagattatgaacacttggaaggagtaatataatttttgcccactttgtttctcttttcaactgtttggtataaactaaaaactatcatgttttgttttgtttgatgtttgaggataaagtcttactcaactcaaacattaacaacaaatgcttctgcatttgtagaatccactagattaatgtgataatatcattttttttaatgaatacaaatatgtaagactcatggagatcataaatatacatttgatggagcacgatataatgtcagattgtcgttttaacttgtttggtgcaacacatgctggccttctggcacaggaaacgcttatggtgatgtctacttcattgtctattttatctcttttttccattttccattattgtatatttgtattatgggtttggtgacccatttacattataggtgaagttacaaaaaattacatcaacgatatcacattatcaaaaggaaaagggctcttgtggttatgaaaggttgaagggttagaagggttcatcttcataaggaggaatctttgccctccaaaaatctcaaccaaagataatactgaatcttggcacacaattttgtggtccatttttgattttttaagaagaaaaaaaaaactgatgctttgattgtgatgtgcacacataataaaccaccgaaagaatgggttgaaaattccatcgcccctgctataggtagaatattgattttgacattgaagaaattaaatatatatattcatttagtgtaaatattactgttagagactatgaagatgatgagaagagagaataaataaacgatagttctgttctggacctagtgagtagtttcataagttttcacgcaacccctttttttttggttaaatgatcttacattacatgtgctctcatcaggaaaatttatatgtattgagctaaacatgtacttttattttttgtccttttatgggagatttatttttgctataaatctatgatagtgacatacaatgtttattgtgcatttgcagttgtcgaaatgtttcactttctactaccattaattaaaatagatattttactaacaaaaacaaaatagtgtatttctcttacctattatccttctctgataatgcatattttagactagcataaaaaaaatacctgtccttataaacagggcacaaattaaagaaaaactcttatctgtcattgagctcatcactgccatacttgaatgcaattttgggtaaagcaatggtaacactgaaatctcattgaccacatttaatttcaactgcaactaaattaatatcttcacatactagctgttactatttttatgtgtcagtaatagatatatttaaattgttgggttgcacctacccacttagtgttattagtttcttaattagttcatccataaaaaccataataataataataaaatattaaaaaaaaaaacagcttataaatctcttttagtgcaaagattatttgaggctttggatacccttttttgcaagtttttactgcatgacaatattggatgatgtagattggctggtacattaatttacaagagtcgggctccaccctagtctctattgattgataattttatttactcaaagcgaaataaggatttatcttttattttaaacgtttatatattataatatatataacttagcactgcaagtggttaaggataataagtaataatagttcaatattttgattcattaatatcagaccaaattattgaaatatggttaaaaataatttgtactcatctcacttgcagagataccaagcaacccttttaacttaataatattattatttgtccaaacaaacaagcagcatggaaagtagtactactagtatagtagtagtagttggttttagaagtagtccacttaacttacataaacacacaaaccatttcataaagataacattgtatttaacaatttcttatattatttattaaattaaaaaatataaaactcagtaataaaatacaccaataataataaccattttccttctataaattcattcatttcgttccctgtctacaaggtaagcttttgaaaatgtcaatgtagtttttattattatgaaattaaaaaaataacaaaaacaaagaataccccaattatgtttatgtatgacagagacccatattgcccttatatatgtgtttgaattcaaggacaggtagtatatgtatatgtatatatatagtgagagagagaaagagagagagaggggtaaggggttctttctttatgtgattgacctaatcaggtgatcttattgctattgtagctgtgaatgtgtggtctaccatgacgggctgcccacgtgattgacaatattttttagaacccaagtcagcattccacaaaccaatccaatcccttctctcctttttcattgtcaatttgtcatgaaaatgaaatattatgtatatatttatataagaacaagtgacgtgaagaactcctacagcgcccaagaggcaatctaattcaattttaaaccagtgtcacaagaaacctcatagtggtcggcatatataaatggtttttttggctttaacattcctattatggcatgacaaattatgtgttatgtgtgtgtatatatataaatatataatcaaagaaagaaagaaaagaagagttaagggtttacacatttacttatatataaatataaattgtatgtgccgccctttgtccagccaatgtacacatggcagtgccgtataggtctcaaaataattggtcccacactttcacctatttaagcatatgatatcattatccatgtctacatagggagacaacctaccttgcaggttttgctcttcctttattttactaatggaagaaattaatggaattggattataaaaaagtataataattataaacataatattatataatatatatatccatcattatcattagctaacacaacccaacccaatacaacacaaaacaaagcaatgttcttcttggctttgttcattaatcattattattaataattagtaatagtaatattattttgttaatggaggagtcaactgtcaaccgtagccggcttcttcgcctttcatgtacgacacgtgtactttattatttttctttttttaatttttttaagacaactccagaaaggaagagaagagaaagaagaggattaatttttgagtcttattgattatattgtgttacaacttataattagtttctttagtagtgcaaatgactcatatgtgtacatatcaatatatggtttaattttcacttttcaagtcaatcttggagagtagttggaaaatagtggcgtatatttatttatatgtatataaatagatatagatataaatatatattggtacctatagagggaatttcgctcggctaataatcatctcataaataatat

SEQ ID NO: 30608 - DNA, 4237 bp, Cannabis sativa
  modified_base (821)..(831): a, c, t, g, unknown or other
agaaatagaagtaagaatacaaatgcttttcttaatgaaagaaaacaaatattatagtataaaaatggtataaataggattttttttttcaaaatttgaagtctccacaaaaattatattgcttcactaatgtctcagtatgacaattctccttattttttgttgtaaagaaagtgatatagatttttaattgggatggggtgatgtctatgaggtacactaaaaaatagagagagtaagagagagagcatatgtcattggacaatagtgtgtccagcactttttaataggtgatatcatacgattgattagcaatattatttaaaaattattttttaagttttatgaaacccaatacttaataacaccaatattaatatgatacaaaaaaatactaagcaccagtaaattttttttttttttttggctattcttgatgtgtgtatatataaaatttaggaaatagagaaagaaagtctgtataagtatacttttatgtatatttatgttaatatatattattattaatataatatatttatattgataaataaatatatagatatagattattatgaagtgtaatattagggtagtaattacaagttgaacggatatttaacaattataaattgagtaatttgcagtaaaaatatctaggtttaacttctagttgtaaataaatatttaagttaaatttttgacagtaataatacttatgttatatttttagttatttataagtacctaaccgttaaatattaagtcattatccatgtgtcatttttttattggtatatttaaattaatttttttaaaannnnnnnnnnnttaatgacttagaccaattaagaattgacacgtgtcaatttacttaacacttaataggtaggcacctacaaaaattctaaaattataactaattattattacggctaaaaattaaacttaagtatttatttacaaccgggagttaaactcaaatatttataccacaaattactcttataaatttgataaaagagtaatggttagcttttataaaaaaaaaaaaaaaaatgaaaaagaaagaggagtaatggttagcattaaagaatagcgaccactcaaataacacattcattttgagtttttatataaataatttgattgtcacgttgtttaatagggtgaccaactaaattattttaaataccaagagccatacgatttttatgagtcatgacacctacatttatgaagcctaccaatctctccaatccctctcaaatctccccgataattttcatttacacataaactcgagcagtttgtgggcagcgcaatccaaacccatcgtctccaattcacatggatgctcttcctccttcactcatattgacccaataaattttcgtccaaactttgtacgatttcattgaatagatttaaggagactgttggtggtagttgtgagtactaactctgttttctcggccctaaagatactataaggagtacacgcacatctttctctctccgttacgccaatatctgctaatcaatccattacatacagttacaggttcatttctttttctctctacctttttgttacattcttttaagtttttaacattctcatattgtggttttttttccctttcttctgaaaactgcagtttttgtgacttgtttgggttgaattattgtcttttattgccaaattagacgatttgaggaactgggtttcgttaattttatgaaaatttgaaccgagtgtgcaatttttgagctcaatccgaattgggtcattgagcttttgggttattgatggacctgcaagttgtgcgaaagggtattgattttgcccgtaaaaggaagaagtgggttattgtattggccgccttagggttctctggttatggtgcctataagttttatcacttgccttcggtggcccaaaaaagaaaaagaattttgaagcttttgggagcttttgtctctgtagccgaagcggtttctgattcagccgagtcaattagcttggtctcgaaagatctgaaggaatttcttcagtctgattcggatcaaattccaaatagtttaaagcaattttcaaaaattgctaggtcagatgatttttctggctctctgataaaggttactcaggctttaacacttggtatgttaaggggttaccggcaattagagaaggatgatggaagtgatggagcttcttcaggttctagctttacagaacgtgtaatggacaaggtctttaccacagcaggttctggttttgcttctgttgttgttggaagctttgctaggaacttggtattgggtttctattctgctggtgaaacaggtggtgaacaaacctcaaagacatcatcaaatatggataattgtggttcagaaactaatcctattcctgaatggatgaatgtgattttcagtgataaatgcagagatttagttggtgattgcatacaagtatttgtgaccactgcagttggtgtgtatcttgacaagaccatggatatcaatacctatgatgaactcttttctggacttaccaaccccaagcatgaaacgaaagtgaaagaaatgtttgtttctgtctgcaatggtgcggttgagactctagtgaaaacatctcatcaggttttaacgcgtcccactttcaaggagaaacctttggctattgaggaaggcccaacttcgacttcaacaaaagtggaggacttggatgaagaagaaaaggaaacattctccacagaatcggagacagggagtgaagctgatgagaaagatgatggcgggtgggtcggtaaggtttcgtctactttggcagtgcccagtaataggaggcttgttcttgatgtcacagggagagttacatttgaaacagttaggtccttccttgagttcttattggaaaaactgtatgatggtgtgaagagatgcgtcaactttgttcatgaagctgtgattgagaggggtttcgatttagtgagatatgcagcagccaagtcctcagtcatagttactatatgtctctctctgtgcttacatataactggaagtgcttggttgttaatgcccgcttgaccttcttgaccattatcatcgattcatttattaggaaaatcttatagaatagaccaccaacattctttccaagcaaactgcttgtttggagaatccacttgtatttgatcgctctgtctctctctctctctctgtgtatatgtttgttcacccaagaaaaaggaaagatgttatgcatttcattgtacttttgaaaattatggtctttgtaggttgggtgacattcttgagatatatgttttcgaattctcatggagagattcttaggaaatatgtaagaaaatgatagtattatttgaatcaatatgcacacgttgtaatattttcttcactttcttttaatcattatgtggtagcttttcaaatacaggataattcatttgactatgtcaagttagaaataaaaatgggttttcatttttatctatatatcaataatcaaatggcgtcgtaaaagctaacatggatgccctaggtgattatcagcttccgaacttgcttactacgttcagaagaagaaaaataagagttgacgcacacaagaaaggtgcactgccgccattaatactgatccataaagataaaactctttggaagattcttcttaagatgtcagctattgaggatgggtttcctttcctatgtacacaaacacaacttttgcttttgaactcgtttgttatgggtttccttcactcaaggggttttctcagaaatcttatccatatcttttattttctttttcttgtattgaattaaaataccaaaacatcccttccctaacactttcgataattttcatgcttttctttttctttatttaaacagcaatattacatatttccataaagaaaagactacttcgtaactcacacatttgataaatttttcaaactatgtattccaaaaatacaagttcagtacataaatcaatatatatctgttcctaaaaatccacggttgacaaggtttttttttgttcagtaaagcttgtactgaattattgttggcaaattgagtggaattgtacaataaaaagttaaaaattgctatagcttttcatccttgagatttaccatggaaaataatggctaaaccaattaatctaatgcattttggggttggtaaaaaatgaataaaa

SEQ ID NO: 30609 - DNA, 1082 bp, Cannabis sativa
gtcatggttaggggttgtggtctaagtttggggataaaggcaagagattggattcgggagtcgaggtttgatatcatgaggtcgggggctgtagttcaatcttggagccgaagtttggatttgagttggggtttagggttcgacatgaggtcgagattcaattgcagggagtctaaaatattgattaaaaagaatacaaattatattataattaaaaaaagatgtataaatatatattttgaaagtaacttatttttaaaatgtttaaaattttaattttcataaaaataaatttacaaaatatgtttttatttttttaaaatcctaatttaaataataattacaaaacacacccatttagatctatgtttatgatacataataatttttactgtaccgatataatatgcccttaaattagcacagtttgattgttttattcccaattttatctatgatgagattcatttgtagttatatatactatcaaaagttgattaataatttctcacacatctattaaaaaaagagacatgtgcaacaaactacttaactcaatattgtaaaatattaagaatttcttggaaaatataaaattcactataagtacaatgaaaaccgtcatcaaattaaaaagcataagctgcatgtgatttatttatttattatatatatatatatatatatactaggcagaaattacgtgtaaatacacgtatgtttgtatatctcgttaaaggaaaacttaaaattgaaattgattcaataaataatcatatacaacgtctctacagctgttgggattgtaggttgaaccaagttcagaaaaaatataatacaagtaaaaccttcatgctatagaagttatctatggctatgaaaaacttaataatagactaaaaatttaggccaaccaagaccaaataagaacaaaaaaaaatttcatccaacaatcatgatatccaccgacttctttcgaaccaaagtattggaagacactgacacatccaaactttagttcatatatatatatacatagattatggctttaccgtcacttgtatctagggccttcttaaaca

SEQ ID NO: 30610 - DNA, 2269 bp, Cannabis sativa
  modified_base (1003)..(1004): a, c, t, g, unknown or other
  modified_base (2241)..(2243): a, c, t, g, unknown or other
atccccgtgtccgacacagtactaattgtagaacgttcatacgacaatacaatcgaccataatgtcagcctatactcaatatgtcagtcatactctagccatattgatgtgacaacattggtcaatatttcagccaacatacatttatatataatcaatacaactgtacgtatattattactgcgatcaatgtattttaactgacataaatatcatgtatgctaaacatgtaattacatattcataacattatactgatcgtaccttgtttctgaattcaggtgtgccagccaaacctgagtggaacaactactcgtcaaattacaggcccttaaatcacatcgttcataacacggataagtgccatgctatatcacaaccggggacataggttttaaacaaaaagtttttctactaaaagttaacatggaaataccctaaacgaacagggaattaaccaactaaagctctgaaactaacacaaatcgaatataaagacaattcaggaaactgatttttgatccggttaaccggctttacaggttttacaccaggtaacctaaaagttttagaaacctaaccaattcgactccaaaccttaccaaacattacagacctgcatattataccccaatcaacatatccaaggccgtaaaacacatcaacatgcacataatcaagattcaccattagagaccaaagtttgagttttaaaactcaaaccttgtctaaacaccaaattaacccatcaattaacttcaaatcagttgaaacaaccataatatatcattaaaatacaaaatccaacaactttaacaactcagaacccaacatctcaaaaatcatgcaagagaagctacttaaactaaagaaaccataaaaaatgaactaggaagcttatccaagcttaaaacctcaacactgatgctaaataatctcagaattgctgaataaaatccatggttccttgtcggtttctagtgagtgagagagagagagaganngagatagagagagagagagagaaagggtttgcttaatcttgcttttcttctaattttaaataaatgaaaataaaatgatgcttatctatctattttcagcaataaaaaacagatcccgttaattaaatataaaccactaaagacaaaataatttccttggcaaaaagacaattttccccttcacttagcccaaaagtcataaaaccaactaggggtaattcggtcaattctaaaagctcgactattcctgactttcccaatgtctaactatattgccccactatacttaaaataccaaaatgtgattctaatagccaaacaccgcgttccaatgttgtcaggtacataacatgcaaaattatgaaattccatatatgacatatcaaatgcattttgaattcaaataaatctccgtaaactgataattcataactaacatgcaagtttcatatttaaaccctatttatctgctaatttccaaattaaggttaactggtgtttacaattatccccccttaaaaggatttcgtcctcgaaatctatcctgaaaaactctggatactgagtcctcatgttggactctaactcccaggtggcttcctcaaccttgttgtttctcaagagtaccttgaccaaagctattgtcttgttccgaagaaccttatcttttctgtctaggatctgaattggttatttttcgtatgataagtcttgttgcagctcaagattttcataacttagtatattagcagggtctaaaacgttttttcgtagcatggaaacatggaaaacgttgttaactgctaaaagagctgaaggcaaagccaaatgatatgccacttatccaatcttcttgagaatctcgaaaggtcttgtaaatctagggaataatttgcctctttcctgaaacgtttgatccccttgattggagacaccagtaggaacacatgatctcctacttgaaactctggattcctgtgtttcagatctacataactcttttgcctaatttgagaggcaagcattttggttttaatcttctcgattgctttattagtccattgtactgattctggacctaagtatttcttctcccctgtctcatcccagtgaatgggagatctacacaatctactatataacaattcatagggagccatccctattgtactttaataactgttattatttgagatctctattagtggtagatactaactgttgggttttatgcccnnnataaaactctttacaatctgattagt

SEQ ID NO: 30611 - DNA, 4039 bp, Cannabis sativa
tggtgttgctgagattcgcattggccatattggcttgaatattatgaagagactctattgtgtgttgttgaatgcccatctcttgactttgcaacatgaattgaacttttggaagagagagtggtttagatcgagaggtgaggttgacaatcacagcttcgtattcaaatcctaggccaccaagaatgtaaagaaccaaatcatcatctttgatggattgaccagcagctgccagatttagcatgttatttcatcttcagtatatattcttcaatcgataaggagcctttcttgattgtttgaaaaagattttgaagtttcaagagtcaagctcgagatcttgtggcaataaccaaaggtggtccagatctcaattgaggttgcacaatggataacatgtccaggcatgtgttcagtgacaaaattcattagccaatgcatcaagaattgatcaagacgaagccattgttgaaaagaagggttgggaacattacctgcaaggagagctggaggttgaggaatggtgccaagaaagtagccatcaagttcataggcacaggcagctacaagaaccagggatcgccaatgagtatagtttgtacgatctaatttgagatttaggggaaggaggtgattgttggggaggggaatttgagcttgtgcttgttcaattcttgaaccagttggtggatcgatttgaactcaaggaccattgccattatcgccattgtaaccttgattagacatggctttgatacgatgaaagaactctaagaaacagaggtcaagatcgagcaagaaaaagaaatgaaagagagaatgaaggtagatacattggaaatgaatgctcaatctttaactgcttcagtagagctttatttatactgatttggatacaatacaatttagagtaaaactctaactaacactaactacctataatagactcttaacaaacttttacaacaaacaacaataacaattattaactatttaatattctaaaaactttgctcttaagattttgaagagtctaattttttcttaaaaaaaaaaagaaaaagatcttgttggtacatccaaaaaattaatctcaatatgaaaaatctcaagtcccctaaaacaatttattacttggccttccatggctttcctaacaaaagacaaactttattactataaataaacactgtgataggtcatgtaaatctactttaattgcagaaaatacaaaaaataaaggtttcctggccataccaaacacatctaggataattcttcaaagcaaaacgatctactttattacaatgtaatcttgaatcataatactaaggtagccttctaagcccatcatcatggacctatacattaaccacaccctcataaataaactaaagtactttgattcttagaaatagccagatccaaactacctttaatacgatttgccaaacacacaacaataatcttataagacattttacaccaacaactaggttaaaaatctagaactttattaagaagtttaattttgatgagcgcgtacagaagagtgtggtaaaccgtgtgtaaccaacattattattcaacacctctaagcacactttcacgatatcaaggtccactaccacccagtaaccatgataaaacaaagaagtaaaatcatgacaccatgaagctttaagaacatgaatttgagaaactgctctgtccttacaaataatagtaaaaggcttaagtcaatgctcattattcaaaaaaaaaaaattagtttattagggacacattgctaatttggagtttgaggcctctatttcgaaccatcgaagtaaaagttgctaaacaaacatatgcgatgacaaccaactcattagttttgtcatgtaaacaaaaaacaaaaaaagcctttcatcttgttattttgtctcttttttttcttttagaagaaggcttgttgaaaaggcaagcattgtcgtctccatgttagagccaaggggctcaactcctttactttcaaaaaatttcatttttagcaagacaagcattatggctattttccaagttcctaagaagtaaccaattctctaaacaagtagatcttgataagtaattaatttttaacttaagttcattaatttgcttatacggatctttgttcttataatttcacctttaaagtcgttgctcacgaacaagaatataatgatgatgctagcttgaataagaaataggctcctcatttccctaagcattaacatcaatttttcaataatcctcactattagacaaagcttgatcatactaaaatttggaggactaagtcttggaacccccgtgaagtggtataagtattaaacaacaaaagtaaatttttataatctgagttctaagacttaaaatggttcacttttgagaccaaaaataattgatcccactcattattattcccaaccttctatcaaccctttcaaaaatagggaattctttcgaccattacaccatgagtagaagccaccttcaattaatgtctttaaagcaacactcgtcaataatattgtaaaacattttcactaatacttcaattaacaagcctctcatttcttatttgattatcaacaatcttattaaaggcaacgccgcaaacccaatggccaccatatttctcttctagatgacaaaagagagtccatgagtgtttttattgttccaagtctacgttcaggtcctcattgaaccatgttgttcacacagtaatctggccaactcgctcgtatatttaaacgaaatgaaatttagaagtaactaagtaaaatagagaacacacgcaagaatttataatatccatgtgactacccaaaatttgattttctcaaaaaaattctccactgatctctcaaaagcttcaaagattctactatttcacttggtccacatatccctataataatgccaaaagtgtagacctccacaacttaactcttcttttgccccctgctagtttgcgtagcaaacatggaaaactcaatttaacttaaattctttgtataattaacacttgattttttgagtgtatgtgcattctagtaataaatgttcaattgtttcataactaaatctataacaaaaaattggtcaaaagagatgtccatgtatggtcttctcttttccaaaacctcatgcacacttgcttttcttaaagccaccaaccagcccaagacttttacttttacaggtacactacttttccaaagagttttggtccaatctaaatcacttgaacactaatttgaagtaaactagaggaaagaaaatttacaagagaatgattctccaaattttggcgtccaacctctacaatcaattgatatatgggcaaagttcacatgttcataacactgcaacaaaccctttaggctcaaaacttccctgtccaaaaattttctcctgaaattagagtctcaattgatcaccctaaagctaccttcctctactattggcatatctttgatgcacatgctctttgatctagccaaaattgctaatttcgggtaggaattcaacaatgagttctctccaatccacacatctttccaaaaccagattccctacctgaaatgacactaaacttaagtatttaccatattgccatgaaattcctttccaaggtcctcggaggacattctctcacctaatttggtgtcccaaaagttatctgatattcaataatgacttttgatcactttatgatgaagtgaatctttttcacaagaaaatctccatagccctttcttcaacaatcccttgttttgtgcatccagtctcccaatttctagtccctcttccgctttcggtttacacacttcctcccaagcaaccaggtgtacacctttcgaaagatcaccaccttcccaaagaaagtttgtcatcatcctctcaaatgtttgtagcatcatctttggtgctttaaatagaaaaaggtagtaaataggaagagaggaaataactgattggataagtgttaatcttccccccccccccc
